United States Patent Application Publication US 2011/0183924 A1 - sequence listing, part 164

SEQ ID NO: 421598 - DNA, 3139 bp, Homo sapiens
ggcaagctttgtttttggtagtggtatcaatccagagagagatccagaaatctccaatggattcaggctaatatcagtcaacaatttctgcgtttgtgatcttgctaatgacaacaacatagagaatgcatctctttcaggcagcaactttgggattgtggattctctaagtgagctagaggccttaatggaaaggatgaaaagacttcaagaagaaagggaagatgaagaggcgtctcaagaagaaatgagcactcgttttgaaaaggagaagaaagaaagtctttttgtggtctctggagatacttttcattcatttcctcattcagattttgaggatgacatgattataacatctgatgtctctcgatatattgaagaccctggttttgggtatgaagactttgccagacgaggagaagagcatttgccaacattccgagctcaggactatacctgggaaaatcatgggttctccctggtgaacagactttattctgacattggacatcttcttgatgaaaagtttcggatggtctacaatctcacatataacactatggccacccatgaggatgttgacacaaccatgctgcgcagagctttatttaactatgttcactgtatgtttggaatcaggtatgatgactatgattatggagaagttaatcaattacttgaaagaagcctgaaggtttacattaagacagtgacctgctatcctgagagaactacaaaacgcatgtatgatagttactggcggcagttcaaacactcagaaaaagttcatgtcaatctacttttaatggaagcacgaatgcaagctgaacttctttatgctcttcgtgccataactcggcatttgacctgaagtatcacccaaggaaaatgtcatacatgtgtaaagacctttcacataagataaacattgaagctatttgtgatatagcatcaaaaattattcagttctctagtgtcaaagtttagccgtttgtttttttttttttgttttttgcggctgtaatgtgcaatgatgtgttttattttccttgatgcttaacattactaacaattgcaaaaataatactgaggagcactactttgcattgtttgtagttggagttttggatactgatcataaatcatgaatctggcgtattaatgcttaacttcagcgcttttgggttgtgtgtatgtgtattttttctccccccaccccgcccttttttttttaagaataaggacaagtgcttacaatctgctcaagcaattgtttttcagatattggaattcagcaaagagtgacctctctggccattctaaaactttaatgttgtgtcctaaatctggtggaggaaaagcatgcgctgttgaaccaagctgctcactggacacatatttgtgtccccaggagattatttgtcaggcactgttttttatttgtttgtttgttcatttattgttgttttactgctattggcgataacatgaaatgtgatacagctattgcccataatttaatgtgaaattaatcatgatgaattctatagcatgctactgaaatgccaaattcagctattttctttctcttctaaaatggaagtttcagttttccatatcagatgtatataagtggaattataacacaatcctatcactgacagtaatcctcagtcaccttaaataatcagtgctcacagtgctgcttacagttcatttagttggcacatataaacctgtacccacacaagactgaccaaaaattttctttgcacatttttcctttctcatagtttttttctatatttcgttaagcaaaggaaggttaatatgcctatttttcctgttaggcttttagaaattattttccatgacttttgttcttataataggttagacagtttatttttcaaaggtaaaaattgtgtttctatgcattaatgtgattgaactacaaaaacagagtgcaatatgttcaaaaaatactcaactaaactttccccctgtcatatcactgcaaaagtgtccttttaaacagagccataaagaaatttttttcaaatttctttattgcacaggcttttttcagttttacctttctgggattgaacaatgttcctttcataatgccaaagcattcccttccccagaaaaatctccttggacaactggtttaaaaacgttattaagtcataggggaggaataagcggccaaaaagtcacatttttgcattggtttacgttgcttgattagactatcttcagagagcacattatgtgtttatagctttaatttgtattatgtcaatgaaccagtgaagtgcctaaagagatgcttacaactatccagtaggacacaactgcactgctttttaaacactttttggttagttaagggtgacttgaattgtacacatacatgctaatttttgaaaacttatccatttttcatagtaaataatatagataaaattttctgttagagttcccgcaaatatttcattttagacttacttgtgatataagatttaacttttcttttgtgaaagaatcgtgaactagtgtttcatgaaatcattttcctcttccatttatcatcctcctctggtacaatatattgggttgctttcttttagattttgttccagataggaaaacaaatatgactgtatacttattaacataaggtagttctgcatttttggattccaggatcctgtttgaaatcttccatgtgaggaaaaaattactaatatttttaaagacagggtggtttatttaaagagattattcagagaacttgtgccatatctcgtctgttttattgcatatgccatatgttaacttttattcaatattacattatgtagatatgtaatacaaagaaaatatttaggagaatggcaaaacacaaatggcaacataaatgtccatttgacttacctaacttcacaactttcaagttgaggatgtcatttattcttgaatttgtttttttactagatgctttcaattaatagccctatatttttgtgcaggcgaactgtataacaggataaaaaatgatttgtatgtattgaaaaggaggagaaattctcacagaacaccatatgagctttagaccaaaaggggaaacaag

SEQ ID NO: 421599 - DNA, 1224 bp, Homo sapiens
ggcaagctttgtttttggtagtggtatcaatccagagagagatccagaaatctccaatggattcaggctaatatcagtcaacaatttctgcgtttgtgatcttgctaatgacaacaacatagagaatgcatctctttcaggcagcaactttgggattgtggattctctaagtgagctagaggccttaatggaaaggatgaaaagacttcaagaagaaagggaagatgaagaggcgtctcaagaagaaatgagcactcgttttgaaaaggagaagaaagaaagtctttttgtggtctctggagatacttttcattcatttcctcattcagattttgaggatgacatgattataacatctgatgtctctcgatatattgaagaccctggttttgggtatgaagactttgccagacgaggagaagagcatttgccaacattccgagctcaggactatacctgggaaaatcatgggttctccctggtgaacagactttattctgacattggacatcttcttgatgaaaagtttcggatggtctacaatctcacatataacactatggccacccatgaggatgttgacacaaccatgctgcgcagagctttatttaactatgttcactgtatgtttggaatcaggtatgatgactatgattatggagaagttaatcaattacttgaaagaagcctgaaggtttacattaagacagtgacctgctatcctgagagaactacaaaacgcatgtatgatagttactggcggcagttcaaacactcagaaaaagttcatgtcaatctacttttaatggaagcacgaatgcaagctgaacttctttatgctcttcgtgccataactcggcatttgacctgaagtatcacccaaggaaaatgtcatacatgtgtaaagacctttcacataagataaacattgaagctatttgtgatatagcatcaaaaattattcagttctctagtgtcaaagtttagccgtttgtttttttttttttgttttttgcggctgtaatgtgcaatgatgtgttttattttccttgatgcttaacattactaacaattgcaaaaataatactgaggagcactactttgcattgtttgtagttggagttttggatactgatcataaatcatgaatctggcgtattaatgcttaacttcagcgcttttgggttgtgtgtattaataaaatatttgctaagaaaaaaaaaa

SEQ ID NO: 421600 - DNA, 398 bp, Homo sapiens
gggttatttttactgcttgcagagccattagacacaggtttgagtgttgcatcatgaacatggataaatatgcctaggtgtgtgtgtgtgtgtatattgcttatatacacataaaaaaacctttgtgaatgtctaataagattttccaggtgtttataatggttactaaactgataacattttcacttctaggttcatgtcaatctacttttaatggaagcacgaatgcaagctgaacttctttatgctcttcgtgccataactcggcatttgacctgaagtatcacccaaggaaaatgtcatacatgtgtaaagacctttcacataagataaacattgaagctatttgtgatatagcatcaaaaattattcagttctctagtgtcaaagtttagccg

SEQ ID NO: 421601 - DNA, 5817 bp, Homo sapiens
agcaatatttaggggaggctgaggaggcctggggacagttttgggagagaaagagaatggtcgttgtggggctggggtaaatggggagaagaaagggtaggtctgcgctgagccggagtagtttggaaagggtgaatcagggagaggttaaagtgattggaaggggagcgagggagggcggtggggggcaggcttggggtactggggggggggcagagaccttagttgcgggatcccgcgctcagcgtcgcccctcgcgcccctagcggctcccgccatcactcaggcgcccgaggcgctgtcgcggacgcgggcgagcacagcgcgcttcgtgtgccgcgcgtcgggggagccgcggccagcgctgcgctggctgcacaacggggcgccgctgcggcccaacgggcgcgtcaaggtccagggcggcggtggcagcctggtcatcacacagatcggcctgcaggacgccggctactaccagtgcgtggctgagaacagcgcgggaatggcgtgcgctgccgcgtcgctggccgtggtggtgcgcgaggggctgcccagcgcccccacgcgggtcactgctacgccactgagcagctccgctgtgttggtggcctgggagcggcccgagatgcacagcgagcagatcatcggcttctctctccactaccagaaggcacggggcatggacaatgtggaataccagtttgcagtgaacaacgacaccacagaactacaggttcgggacctggaacccaacacagattatgagttctacgtggtggcctactcccagctgggagccagccgcacctccaccccagcactggtgcacacactggatgatgtccccagtgcagcaccccagctctccctgtccagccccaacccttcggacatcagggtggcgtggctgcccctgccccccagcctgagcaatgggcaggtggtgaagtacaagatagaatacggtttgggaaaggaagatcagattttctctactgaggtgcgaggaaatgagacacagcttatgctgaactcgcttcagccaaacaaggtgtatcgagtacggatttcggctggtacagcagccggcttcggggccccctcccagtggatgcatcacaggacgcccagtatgcacaaccagagccatgtcccttttgcccctgcagagttgaaggtgcaggcaaagatggagtccctggtcgtgtcatggcagccaccccctcaccccacccagatctctggctacaaactatattggcgggaggtgggggctgaggaggaggccaatggcgatcgcctgccagggggccgtggagaccaggcttgggatgtggggcctgtccggctcaagaagaaagtgaagcagtatgagctgacccagctagtccctggccggctgtacgaggtgaagctcgtggctttcaacaaacatgaggatggctatgcagcagtgtggaagggcaagacggagaaggcgccggcaccagacatgcctatccagaggggaccacccctgcctccagcccacgtccatgcggaatcaaacagctccacatccatctggcttcggtggaaaaagccagatttcaccacagtcaagattgtcaactacactgtgcgcttcagcccctgggggctcaggaatgcctccctggtcacctattacaccagttctggagaagacatcctcattggcggcttgaagccattcaccaaatacgagtttgcagtgcagtctcacggcgtggacatggatgggcctttcggctctgtggtggagcgctccaccctgcctgaccggccctccacacccccatccgacctgcgactgagccccctgacaccgtccacggttcggctgcactggtgcccccccacagagcccaacggggagatcgtggagtatctgatcctgtacagcagcaaccacacgcagcctgagcaccagtggaccttgctcaccacgcagggaaacatcttcagtgctgaggtccatggcctggagagcgacactcggtacttcttcaagatgggggcgcgcacagaggtgggacctgggcctttctcccgcctgcaggatgtgatcacgctccaggagaagctgtcagactcgctggacatgcactcagtcacgggcatcatcgtgggtgtctgcctgggcctcctctgcctcctggcctgcatgtgtgctggcctgcgccgcagcccccacagggaatccctcccaggcctgtcctccaccgccacccccgggaatcccgcgctgtactccagagctcggcttggcccccccagccccccagctgcccatgaattggagtcccttgtgcacccccatccccaggactggtccccgccaccctcagacgtggaggacagggctgaagtgcacagccttatgggtggcggtgtttctgaaggccggagtcactccaaaagaaagatctcctgggctcaaccaagcgggctgagctgggctggttcctgggcaggctgtgagctgccccaggcaggcccccggccggctctgacccgggccctgctgccccctgctggaactgggcagacgctgttgctgcaggctctggtgtacgacgccataaagggcaatgggaggaagaagtcacccccagcctgcaggaaccaggtggaggctgaagtcattgtccactctgactttagtgcatctaacgggaaccctgacctccatctccaagacctggagcctgaggaccccctgcctccagaggctcctgatctcatctcgggtgttggggatccagggcagggggcagcctggctggacagggagttgggagggtgtgagctggcagcccccgggccagacagacttacctgcttgccagaggcagccagtgcttcctgctcctacccggacctccagccaggcgaggtgctagaggagacccctggagatagctgccagctcaaatccccctgccctctaggagccagcccaggcctgcccagatccccggtctcctcctctgcctagctcttcccagaggatgtggtttggggcaggcaggtatggatcacataggatgcgatacctgtggccgtgtatgtccacatgtgtgcctgtagatacatcatcaagccctttggagcttcctaagttgctttggctgaggggagaggaaaacatggattattcactccccccatactctttgtgatacacatgtgacatgtgaaagacatacgagacatagctacatgtgatgtgcacatgtgtgaagtgcatgtatgcgtactggttgttgagctgggaaaccgtggcccaggcagtggtcactacagcctgattggtcctccaggtcagaacggtgccccacagtggtcagtccccagccctgtgggcccccacctccatcgcccagccttttattacacactctgagagtgtctccaatgcctgtctgacaaagacagtcccagcccattctcctgtctggctgggttgggtgcaagcaggctctgaatgcctggcatttcagctgcatcacctcccagctccttattgcccaaatagagagggtggccctggctcccctccgagcaactctgcatttaattttgtaatctgggaagtgcctggttttgaaaatccgctttctctcactcttcccctccttccttgcccctggctgctctagtgttctgtctcccagtcacctcgctctcccagcaccagtgcccttctcctgctcccagatactctttcctttcctctctcctgttttccttcctctgctatctctcacacctctcccagactatgtcatcttgttctcctgcctgggttcaaactctgcatccttctctaacaacgtgactacctcatgtctgcttcaaggcccccgtgcccttcctgtatccgcggctgccgcgcactcgcctgccatcctcctgcctcctcttcactcagtgcttctgcttgccctgccccaggcagcccacccacgcccagtgcgggtgtggagaagatcttctggcttccctgcatcttgcctttgggattgggatccaagggttctccatggatggatccaagtcatagaggggaatgtttgagacagggaagggggctgtgatccagaggctcagaataaaaagatgccctcccttctatgcaggggggcaagtttactggatggagatgatttgggcctctcttccagaagaagctaaaggaagagaaggggagtgagagttcagggaggcccttcccaccctgtgaggcttgacttgatctggattggggatgacaggaatctcaccctctggggtgctggcaaggaggtctttgcacaggaaaaggggtagctcatttcagtttgttttttctttaaattgaatcctcaagtcattttctgttcacctgccgcacagggacaagcttgacttctattttctgtgtagtgaaaacaatgtcatttatttggtttttcacctcagccctctcataggagcatagaatgttagggtctttactccctaatgatgtctgattggcacatcaagagttaactctgccttctgggccaaattcgaaataaccagtccatttttccttttttttttttttttttttaaatggtggaatgtctctcagcacagttgcggcttcctcaaaccctgaaagcatctgtgtttattatactcgggtgtcactcactgttgatgtctgcacctacgtttccacctcctccccctccttcagccagcctatgataacactaaagattattaatgttggttttgtatctcgttaaagacagaattgtcacttgtagtatttctgtagcattcagcgctgctgtggctaacaccactgtgtatgtttcatcattgctctgaaggtcaaaagcctcattttattttgctggtttgattttttttttttaaagaagaaaaaaaaactgccctgaattaaatggctgttttaacagtaggctcttagcattataccacatagtcatttttcatgttcttgtttaacaggcactgaggttctggtttaaattaaatagctgcaaatgagacaatttataacccattaggttgggtggaaaattgtttctcaaaagcaaataagtaataaatctggtatctgcctataactcacagttgataagaaagtggccatttctcactagcattatatatgatttgggctctgggtaatttggaagtgttaggtttgtgtctttgtagcagtatttttattagaaaagaatctattggccttttacagggtattaatccctttgtcacctaccattgatgccttaagttttctgagtctcaattaaaaatcttccttttcttgatgcatgacaagtgtaatcagtacttgctcatttatttgtctgtatttagtttatgctgtactatttaattatccttccagcgtttttttttctccttacaaatatgatactctttagtgttaagctaaggcattgattcatgtatctgtccttataatgaattaataaactattttccagaaaaaaaaaaaaaaaaaaaaaaaaaaaaggggggggcgcgcccttatagagagatttctcccctgcggggggccccccaggcctttatccgcggtctacccccgcgtcttttcttgtgtgtgtcacaaggggggggctccctctattaggggagagccctgtgtgtatttatattttatcgcgccactatgtggcgccgcgcgtggtgcgccgccgcgcgccgggggtcttttctcctccacaccaccgcgctgtcgcggtgcgccaccgtgtg

SEQ ID NO: 421602 - DNA, 5783 bp, Homo sapiens
agcaatatttaggggaggctgaggaggcctggggacagttttgggagagaaagagaatggtcgttgtggggctggggtaaatggggagaagaaagggtaggtctgcgctgagccggagtagtttggaaagggtgaatcagggagaggttaaagtgattggaaggggagcgagggagggcggtggggggcaggcttggggtactggggggggggcagagaccttagttgcgggatcccgcgctcagcgtcgcccctcgcgcccctagcggctcccgccatcactcaggcgcccgaggcgctgtcgcggacgcgggcgagcacagcgcgcttcgtgtgccgcgcgtcgggggagccgcggccagcgctgcgctggctgcacaacggggcgccgctgcggcccaacgggcgcgtcaaggtccagggcggcggtggcagcctggtcatcacacagatcggcctgcaggacgccggctactaccagtgcgtggctgagaacagcgcgggaatggcgtgcgctgccgcgtcgctggccgtggtggtgcgcgaggggctgcccagcgcccccacgcgggtcactgctacgccactgagcagctccgctgtgttggtggcctgggagcggcccgagatgcacagcgagcagatcatcggcttctctctccactaccagaaggcacggggcatggacaatgtggaataccagtttgcagtgaacaacgacaccacagaactacaggttcgggacctggaacccaacacagattatgagttctacgtggtggcctactcccagctgggagccagccgcacctccaccccagcactggtgcacacactggatgatgtccccagtgcagcaccccagctctccctgtccagccccaacccttcggacatcagggtggcgtggctgcccctgccccccagcctgagcaatgggcaggtggtgaagtacaagatagaatacggtttgggaaaggaagatcagattttctctactgaggtgcgaggaaatgagacacagcttatgctgaactcgcttcagccaaacaaggtgtatcgagtacggatttcggctggtacagcagccggcttcggggccccctcccagtggatgcatcacaggacgcccagtatgcacaaccagagccatgtcccttttgcccctgcagagttgaaggtgcaggcaaagatggagtccctggtcgtgtcatggcagccaccccctcaccccacccagatctctggctacaaactatattggcgggaggtgggggctgaggaggaggccaatggcgatcgcctgccagggggccgtggagaccaggcttgggatgtggggcctgtccggctcaagaagaaagtgaagcagtatgagctgacccagctagtccctggccggctgtacgaggtgaagctcgtggctttcaacaaacatgaggatggctatgcagcagtgtggaagggcaagacggagaaggcgccggcaccagacatgcctatccagaggggaccacccctgcctccagcccacgtccatgcggaatcaaacagctccacatccatctggcttcggtggaaaaagccagatttcaccacagtcaagattgtcaactacactgtgcgcttcagcccctgggggctcaggaatgcctccctggtcacctattacaccagttctggagaagacatcctcattggcggcttgaagccattcaccaaatacgagtttgcagtgcagtctcacggcgtggacatggatgggcctttcggctctgtggtggagcgctccaccctgcctgaccggccctccacacccccatccgacctgcgactgagccccctgacaccgtccacggttcggctgcactggtgcccccccacagagcccaacggggagatcgtggagtatctgatcctgtacagcagcaaccacacgcagcctgagcaccagtggaccttgctcaccacgcagggaaacatcttcagtgctgaggtccatggcctggagagcgacactcggtacttcttcaagatgggggcgcgcacagaggtgggacctgggcctttctcccgcctgcaggatgtgatcacgctccaggagaagctgtcagactcgctggacatgcactcagtcacgggcatcatcgtgggtgtctgcctgggcctcctctgcctcctggcctgcatgtgtgctggcctgcgccgcagcccccacagggaatccctcccaggcctgtcctccaccgccacccccgggaatcccgcgctgtactccagagctcggcttggcccccccagccccccagctgcccatgaattggagtcccttgtgcacccccatccccaggactggtccccgccaccctcagacgtggaggacagggctgaagtgcacagccttatgggtggcggtgtttctgaaggccggagtcactccaaaagaaagatctcctgggctcaaccaagcgggctgagctgggctggttcctgggcaggctgtgagctgccccaggcaggcccccggccggctctgacccgggccctgctgccccctgctggaactgggcagacgctgttgctgcaggctctggtgtacgacgccataaagggcaatgggaggaagaagtcacccccagcctgcaggaaccaggtggaggctgaagtcattgtccactctgactttagtgcatctaacgggaaccctgacctccatctccaagacctggagcctgaggaccccctgcctccagaggctcctgatctcatctcgggtgttggggatccagggcagggggcagcctggctggacagggagttgggagggtgtgagctggcagcccccgggccagacagacttacctgcttgccagaggcagccagtgcttcctgctcctacccggacctccagccaggcgaggtgctagaggagacccctggagatagctgccagctcaaatccccctgccctctaggagccagcccaggcctgcccagatccccggtctcctcctctgcctagctcttcccagaggatgtggtttggggcaggcaggtatggatcacataggatgcgatacctgtggccgtgtatgtccacatgtgtgcctgtagatacatcatcaagccctttggagcttcctaagttgctttggctgaggggagaggaaaacatggattattcactccccccatactctttgtgatacacatgtgacatgtgaaagacatacgagacatagctacatgtgatgtgcacatgtgtgaagtgcatgtatgcgtactggttgttgagctgggaaaccgtggcccaggcagtggtcactacagcctgattggtcctccaggtcagaacggtgccccacagtggtcagtccccagccctgtgggcccccacctccatcgcccagccttttattacacactctgagagtgtctccaatgcctgtctgacaaagacagtcccagcccattctcctgtctggctgggttgggtgcaagcaggctctgaatgcctggcatttcagctgcatcacctcccagctccttattgcccaaatagagagggtggccctggctcccctccgagcaactctgcatttaattttgtaatctgggaagtgcctggttttgaaaatccgctttctctcactcttcccctccttccttgcccctggctgctctagtgttctgtctcccagtcacctcgctctcccagcaccagtgcccttctcctgctcccagatactctttcctttcctctctcctgttttccttcctctgctatctctcacacctctcccagactatgtcatcttgttctcctgcctgggttcaaactctgcatccttctctaacaacgtgactacctcatgtctgcttcaaggcactcgcctgccatcctcctgcctcctcttcactcagtgcttctgcttgccctgccccaggcagcccacccacgcccagtgcgggtgtggagaagatcttctggcttccctgcatcttgcctttgggattgggatccaagggttctccatggatggatccaagtcatagaggggaatgtttgagacagggaagggggctgtgatccagaggctcagaataaaaagatgccctcccttctatgcaggggggcaagtttactggatggagatgatttgggcctctcttccagaagaagctaaaggaagagaaggggagtgagagttcagggaggcccttcccaccctgtgaggcttgacttgatctggattggggatgacaggaatctcaccctctggggtgctggcaaggaggtctttgcacaggaaaaggggtagctcatttcagtttgttttttctttaaattgaatcctcaagtcattttctgttcacctgccgcacagggacaagcttgacttctattttctgtgtagtgaaaacaatgtcatttatttggtttttcacctcagccctctcataggagcatagaatgttagggtctttactccctaatgatgtctgattggcacatcaagagttaactctgccttctgggccaaattcgaaataaccagtccatttttccttttttttttttttttttttaaatggtggaatgtctctcagcacagttgcggcttcctcaaaccctgaaagcatctgtgtttattatactcgggtgtcactcactgttgatgtctgcacctacgtttccacctcctccccctccttcagccagcctatgataacactaaagattattaatgttggttttgtatctcgttaaagacagaattgtcacttgtagtatttctgtagcattcagcgctgctgtggctaacaccactgtgtatgtttcatcattgctctgaaggtcaaaagcctcattttattttgctggtttgattttttttttttaaagaagaaaaaaaaactgccctgaattaaatggctgttttaacagtaggctcttagcattataccacatagtcatttttcatgttcttgtttaacaggcactgaggttctggtttaaattaaatagctgcaaatgagacaatttataacccattaggttgggtggaaaattgtttctcaaaagcaaataagtaataaatctggtatctgcctataactcacagttgataagaaagtggccatttctcactagcattatatatgatttgggctctgggtaatttggaagtgttaggtttgtgtctttgtagcagtatttttattagaaaagaatctattggccttttacagggtattaatccctttgtcacctaccattgatgccttaagttttctgagtctcaattaaaaatcttccttttcttgatgcatgacaagtgtaatcagtacttgctcatttatttgtctgtatttagtttatgctgtactatttaattatccttccagcgtttttttttctccttacaaatatgatactctttagtgttaagctaaggcattgattcatgtatctgtccttataatgaattaataaactattttccagaaaaaaaaaaaaaaaaaaaaaaaaaaaaggggggggcgcgcccttatagagagatttctcccctgcggggggccccccaggcctttatccgcggtctacccccgcgtcttttcttgtgtgtgtcacaaggggggggctccctctattaggggagagccctgtgtgtatttatattttatcgcgccactatgtggcgccgcgcgtggtgcgccgccgcgcgccgggggtcttttctcctccacaccaccgcgctgtcgcggtgcgccaccgtgtg

SEQ ID NO: 421603 - DNA, 5677 bp, Homo sapiens
agcaatatttaggggaggctgaggaggcctggggacagttttgggagagaaagagaatggtcgttgtggggctggggtaaatggggagaagaaagggtaggtctgcgctgagccggagtagtttggaaagggtgaatcagggagaggttaaagtgattggaaggggagcgagggagggcggtggggggcaggcttggggtactggggggggggcagagaccttagttgcgggatcccgcgctcagcgtcgcccctcgcgcccctagcggctcccgccatcactcaggcgcccgaggcgctgtcgcggacgcgggcgagcacagcgcgcttcgtgtgccgcgcgtcgggggagccgcggccagcgctgcgctggctgcacaacggggcgccgctgcggcccaacgggcgcgtcaaggtccagggcggcggtggcagcctggtcatcacacagatcggcctgcaggacgccggctactaccagtgcgtggctgagaacagcgcgggaatggcgtgcgctgccgcgtcgctggccgtggtggtgcgcgaggggctgcccagcgcccccacgcgggtcactgctacgccactgagcagctccgctgtgttggtggcctgggagcggcccgagatgcacagcgagcagatcatcggcttctctctccactaccagaaggcacggggcatggacaatgtggaataccagtttgcagtgaacaacgacaccacagaactacaggttcgggacctggaacccaacacagattatgagttctacgtggtggcctactcccagctgggagccagccgcacctccaccccagcactggtgcacacactggatgatgtccccagtgcagcaccccagctctccctgtccagccccaacccttcggacatcagggtggcgtggctgcccctgccccccagcctgagcaatgggcaggtggtgaagtacaagatagaatacggtttgggaaaggaagatcagattttctctactgaggtgcgaggaaatgagacacagcttatgctgaactcgcttcagccaaacaaggtgtatcgagtacggatttcggctggtacagcagccggcttcggggccccctcccagtggatgcatcacaggacgcccagtatgcacaaccagagccatgtcccttttgcccctgcagagttgaaggtgcaggcaaagatggagtccctggtcgtgtcatggcagccaccccctcaccccacccagatctctggctacaaactatattggcgggaggtgggggctgaggaggaggccaatggcgatcgcctgccagggggccgtggagaccaggcttgggatgtggggcctgtccggctcaagaagaaagtgaagcagtatgagctgacccagctagtccctggccggctgtacgaggtgaagctcgtggctttcaacaaacatgaggatggctatgcagcagtgtggaagggcaagacggagaaggcgccggcaccagacatgcctatccagaggggaccacccctgcctccagcccacgtccatgcggaatcaaacagctccacatccatctggcttcggtggaaaaagccagatttcaccacagtcaagattgtcaactacactgtgcgcttcagcccctgggggctcaggaatgcctccctggtcacctattacaccagttctggagaagacatcctcattggcggcttgaagccattcaccaaatacgagtttgcagtgcagtctcacggcgtggacatggatgggcctttcggctctgtggtggagcgctccaccctgcctgaccggccctccacacccccatccgacctgcgactgagccccctgacaccgtccacggttcggctgcactggtgcccccccacagagcccaacggggagatcgtggagtatctgatcctgtacagcagcaaccacacgcagcctgagcaccagtggaccttgctcaccacgcagggaaacatcttcagtgctgaggtccatggcctggagagcgacactcggtacttcttcaagatgggggcgcgcacagaggtgggacctgggcctttctcccgcctgcaggatgtgatcacgctccaggagaagctgtcagactcgctggacatgcactcagtcacgggcatcatcgtgggtgtctgcctgggcctcctctgcctcctggcctgcatgtgtgctggcctgcgccgcagcccccacagggaatccctcccaggcctgtcctccaccgccacccccgggaatcccgcgctgtactccagagctcggcttggcccccccagccccccagctgcccatgaattggagtcccttgtgcacccccatccccaggactggtccccgccaccctcagacgtggaggacagggctgaagtgcacagccttatgggtggcggtgtttctgaaggccggagtcactccaaaagaaagatctcctgggctcaaccaagcgggctgagctgggctggttcctgggcaggctgtgagctgccccaggcaggcccccggccggctctgacccgggccctgctgccccctgctggaactgggcagacgctgttgctgcaggctctggtgtacgacgccataaagggcaatgggaggaagaagtcacccccagcctgcaggaaccaggtggaggctgaagtcattgtccactctgactttagtgcatctaacgggaaccctgacctccatctccaagacctggagcctgaggaccccctgcctccagaggctcctgatctcatctcgggtgttggggatccagggcagggggcagcctggctggacagggagttgggagggtgtgagctggcagcccccgggccagacagacttacctgcttgccagaggcagccagtgcttcctgctcctacccggacctccagccaggcgaggtgctagaggagacccctggagatagctgccagctcaaatccccctgccctctaggagccagcccaggcctgcccagatccccggtctcctcctctgcctagctcttcccagaggatgtggtttggggcaggcaggtatggatcacataggatgcgatacctgtggccgtgtatgtccacatgtgtgcctgtagatacatcatcaagccctttggagcttcctaagttgctttggctgaggggagaggaaaacatggattattcactccccccatactctttgtgatacacatgtgacatgtgaaagacatacgagacatagctacatgtgatgtgcacatgtgtgaagtgcatgtatgcgtactggttgttgagctgggaaaccgtggcccaggcagtggtcactacagcctgattggtcctccaggtcagaacggtgccccacagtggtcagtccccagccctgtgggcccccacctccatcgcccagccttttattacacactctgagagtgtctccaatgcctgtctgacaaagacagtcccagcccattctcctgtctggctgggttgggtgcaagcaggctctgaatgcctggcatttcagctgcatcacctcccagctccttattgcccaaatagagagggtggccctggctcccctccgagcaactctgcatttaattttgtaatctgggaagtgcctggttttgaaaatccgctttctctcactcttcccctccttccttgcccctggctgctctagtgttctgtctcccagtcacctcgctctcccagcaccagtgcccttctcctgctcccagatactctttcctttcctctctcctgttttccttcctctgctatctctcacacctctcccagactatgtcatcttgttctcctgcctgggttcaaactctgcatccttctctaacaacgtgactacctcatgtctgcttcaaggcccccgtgcccttcctgtatccgcggctgccgcgcactcgcctgccatcctcctgcctcctcttcactcagtgcttctgcttgccctgccccaggcagcccacccacgcccagtgcgggtgtggagaagatcttctggcttccctgcatcttgcctttgggattgggatccaagggttctccatggatggatccaagtcatagaggggaatgtttgagacagggaagggggctgtgatccagaggctcagaataaaaagatgccctcccttctatgcaggggggcaagtttactggatggagatgatttgggcctctcttccagaagaagctaaaggaagagaaggggagtgagagttcagggaggcccttcccaccctgtgaggcttgacttgatctggattggggatgacaggaatctcaccctctggggtgctggcaaggaggtctttgcacaggaaaaggggtagctcatttcagtttgttttttctttaaattgaatcctcaagtcattttctgttcacctgccgcacagggacaagcttgacttctattttctgtgtagtgaaaacaatgtcatttatttggtttttcacctcagccctctcataggagcatagaatgttagggtctttactccctaatgatgtctgattggcacatcaagagttaactctgccttctgggccaaattcgaaataaccagtccatttttccttttttttttttttttttttaaatggtggaatgtctctcagcacagttgcggcttcctcaaaccctgaaagcatctgtgtttattatactcgggtgtcactcactgttgatgtctgcacctacgtttccacctcctccccctccttcagccagcctatgataacactaaagattattaatgttggttttgtatctcgttaaagacagaattgtcacttgtagtatttctgtagcattcagcgctgctgtggctaacaccactgtgtatgtttcatcattgctctgaaggtcaaaagcctcattttattttgctggtttgattttttttttttaaagaagaaaaaaaaactgccctgaattaaatggctgttttaacagtaggcttctgggtaatttggaagtgttaggtttgtgtctttgtagcagtatttttattagaaaagaatctattggccttttacagggtattaatccctttgtcacctaccattgatgccttaagttttctgagtctcaattaaaaatcttccttttcttgatgcatgacaagtgtaatcagtacttgctcatttatttgtctgtatttagtttatgctgtactatttaattatccttccagcgtttttttttctccttacaaatatgatactctttagtgttaagctaaggcattgattcatgtatctgtccttataatgaattaataaactattttccagaaaaaaaaaaaaaaaaaaaaaaaaaaaaaaacacaaaaaaacaaaaaacacagaaaaaaaaaaacctttttcggggcactctcgagccccacgaaaaagttttatgacaaaccacctcgtgggcgccgcgggggcaccatatggagtagataaaccacgtggccacacacggtctccacacagggaaacccggaggacaacaagaggggtgggaaccaccacaagataaaaaaagagggcgggggggaacacacagaggtgtgtgaaaaacacccccacggaggatacagagagacaagagggggacatacacagcgggcgatccaaagaggaaagcaatacaaaaaaagccgg

SEQ ID NO: 421604 - DNA, 2070 bp, Homo sapiens
cccgctgtctactccccaccttcggtgagcggccgccatggtggagcagggtccgagccacgtcctgcagggcacgtctggggcatttcctgttttgtggtaggaaatgtccctgacctttcagaaccgaacccaatcctgaggctgactcctctacggaaaatgaggacaggacgggggtgagggaatgagagtgggaggtccctgcacctcctcgcccggctcctcaggaagaaaaccgctggcccttcccgagtgtgccggccgagggccgagggccgtgcacatggggagagggcgtcagcctgatggctgagcttttaaatgtcatcatcataacattatttatttaaatgtagttattttggtatttaatttttttttagagaggaaaaaacctgtattttcctggtgggatgaaatagggatgaaatggctcagaatggtatatttaggcaattttaaaacatttattatttacataaagaccaaatatgatgaatctgttccgtgaattgtgtcggccctcagcatggggctggggcagcgtcactgcggtgacgcccattgaaaggtatgaaatgactgcacactagctggattatcactcagccgtttaagaaataaaagcaaaaccatcacgtgactgagaccgtgtgtgtgaccgcagcaaagcgcagcgtgttggatggatcagagcccctcggtgcagctgtctgcatcttccaagcactttacagataccttggaatgtatatttttgtcttcttactcagaaggtttgcagtttgtaaaataatcaggattctgctctgtcctgtgtgtggggtcagctccctccacagagggctccagctctgttggtcacagctgatggggttctctgattgataggagacgagctctcgagctctaaggaacagtgaggtcgccggtggggagcttggctgggacaccaagcaaatgcatcgtatgtccccttggagacgtttttatgcagctgtgtatgttactatccagaaggagtcgggggtagactttcccgtgtaagctcagtccataaactggttacttctgatcctggaacgtggacttcacatgataggtctggatctgtttctgttgggatcacaggtaaggaaaatgtccattcaaatggtaaagaagggaggagggtgtttttttttttttttgctgtaggcaccattctgcatcttgaacccagactgaagtgtgcctctcacagatggaaggtgcacacgctcctgtctcctcctcactctgccacgttcacttggctttttcattggtacctaggaatttaagaatatcgaagcgagagcagtaacaaaccatagatgagcagactcccacaccgggttttcttgcccgtctttaaggcactgtttctaaattttgaacttagctctgaatccccaagaacttgagcacagcaagggttgctgagctgctgtcgccgcagccctggcccctggtgctggagctgcagcacctttgggagaggtcctgcgtcgtcctcagctgcgtcgctgtgaactcccgctctccactgtgttcctcagtgtctgcttttcaggaagtctgctgtgacctttgcccaacttctgagctcctcagggactaggaacaatttcagtagctttgccctgaaccaaacgagaaaacaaaagggaactcccgtatgacccacgtcacgtggtgcactcagagtgtgtgcggcatgatcctcggttgctcctcctctcactttagtagagtacgcggtggacagctgatctccttcagtcgtctacccacttccgtcattgtcctccgctagaataacagagtagttggtagtcatggccagaaggggggtgggggcagtgtgaggacttggggtttctgtgctgtgtgacacaaggagataagtgacaatcttgaagtcctaacttccactattctagaaagtatagtggtgatttgtgtgcaaagatttgaagttttaaaaaagtaccaagttcctgaaattcaataaaatatttttattaattttaaaaaaaaaaaaag

SEQ ID NO: 421605 - DNA, 1992 bp, Homo sapiens
cccgctgtctactccccaccttcggtgagcggccgccatggtggagcagggtccgagccacgtcctgcagggcacgtctggggcatttcctgttttgtggtaggaaatgtccctgacctttcagaaccgaacccaatcctgaggctgactcctctacggaaaatgaggacaggacgggggtgagggaatgagagtgggaggtccctgcacctcctcgcccggctcctcaggaagaaaaccgctggcccttcccgagtgtgccggccgagggccgagggccgtgcacatggggagagggcgtcagcctgatggctgagcttttaaatgtcatcatcataacattatttatttaaatgtagttattttggtatatttaggcaattttaaaacatttattatttacataaagaccaaatatgatgaatctgttccgtgaattgtgtcggccctcagcatggggctggggcagcgtcactgcggtgacgcccattgaaaggtatgaaatgactgcacactagctggattatcactcagccgtttaagaaataaaagcaaaaccatcacgtgactgagaccgtgtgtgtgaccgcagcaaagcgcagcgtgttggatggatcagagcccctcggtgcagctgtctgcatcttccaagcactttacagataccttggaatgtatatttttgtcttcttactcagaaggtttgcagtttgtaaaataatcaggattctgctctgtcctgtgtgtggggtcagctccctccacagagggctccagctctgttggtcacagctgatggggttctctgattgataggagacgagctctcgagctctaaggaacagtgaggtcgccggtggggagcttggctgggacaccaagcaaatgcatcgtatgtccccttggagacgtttttatgcagctgtgtatgttactatccagaaggagtcgggggtagactttcccgtgtaagctcagtccataaactggttacttctgatcctggaacgtggacttcacatgataggtctggatctgtttctgttgggatcacaggtaaggaaaatgtccattcaaatggtaaagaagggaggagggtgtttttttttttttttgctgtaggcaccattctgcatcttgaacccagactgaagtgtgcctctcacagatggaaggtgcacacgctcctgtctcctcctcactctgccacgttcacttggctttttcattggtacctaggaatttaagaatatcgaagcgagagcagtaacaaaccatagatgagcagactcccacaccgggttttcttgcccgtctttaaggcactgtttctaaattttgaacttagctctgaatccccaagaacttgagcacagcaagggttgctgagctgctgtcgccgcagccctggcccctggtgctggagctgcagcacctttgggagaggtcctgcgtcgtcctcagctgcgtcgctgtgaactcccgctctccactgtgttcctcagtgtctgcttttcaggaagtctgctgtgacctttgcccaacttctgagctcctcagggactaggaacaatttcagtagctttgccctgaaccaaacgagaaaacaaaagggaactcccgtatgacccacgtcacgtggtgcactcagagtgtgtgcggcatgatcctcggttgctcctcctctcactttagtagagtacgcggtggacagctgatctccttcagtcgtctacccacttccgtcattgtcctccgctagaataacagagtagttggtagtcatggccagaaggggggtgggggcagtgtgaggacttggggtttctgtgctgtgtgacacaaggagataagtgacaatcttgaagtcctaacttccactattctagaaagtatagtggtgatttgtgtgcaaagatttgaagttttaaaaaagtaccaagttcctgaaattcaataaaatatttttattaattttaaaaaaaaaaaaag

SEQ ID NO: 421606 - DNA, 1429 bp, Homo sapiens
aaagacacagcacacacatgcacacgcagcaaagcgcagcgtgttggatggatcagagcccctcggtgcagctgtctgcatcttccaagcactttacagataccttggaatgtatatttttgtcttcttactcagaaggtttgcagtttgtaaaataatcaggattctgctctgtcctgtgtgtggggtcagctccctccacagagggctccagctctgttggtcacagctgatggggttctctgattgataggagacgagctctcgagctctaaggaacagtgaggtcgccggtggggagcttggctgggacaccaagcaaatgcatcgtatgtccccttggagacgtttttatgcagctgtgtatgttactatccagaaggagtcgggggtagactttcccgtgtaagctcagtccataaactggttacttctgatcctggaacgtggacttcacatgataggtctggatctgtttctgttgggatcacaggtaaggaaaatgtccattcaaatggtaaagaagggaggagggtgtttttttttttttttgctgtaggcaccattctgcatcttgaacccagactgaagtgtgcctctcacagatggaaggtgcacacgctcctgtctcctcctcactctgccacgttcacttggctttttcattggtacctaggaatttaagaatatcgaagcgagagcagtaacaaaccatagatgagcagactcccacaccgggttttcttgcccgtctttaaggcactgtttctaaattttgaacttagctctgaatccccaagaacttgagcacagcaagggttgctgagctgctgtcgccgcagccctggcccctggtgctggagctgcagcacctttgggagaggtcctgcgtcgtcctcagctgcgtcgctgtgaactcccgctctccactgtgttcctcagtgtctgcttttcaggaagtctgctgtgacctttgcccaacttctgagctcctcagggactaggaacaatttcagtagctttgccctgaaccaaacgagaaaacaaaagggaactcccgtatgacccacgtcacgtggtgcactcagagtgtgtgcggcatgatcctcggttgctcctcctctcactttagtagagtacgcggtggacagctgatctccttcagtcgtctacccacttccgtcattgtcctccgctagaataacagagtagttggtagtcatggccagaaggggggtgggggcagtgtgaggacttggggtttctgtgctgtgtgacacaaggagataagtgacaatcttgaagtcctaacttccactattctagaaagtatagtggtgatttgtgtgcaaagatttgaagttttaaaaaagtaccaagttcctgaaattcaataaaatatttttattaattttaaaaaaaaaaaaag

SEQ ID NO: 421607 - DNA, 1225 bp, Homo sapiens
ggagacatgatagaatcgagctcggtaccgtaatgtctcgagtcgtgaggagacgagctctcgagctctaaggaacagtgaggtcgccggtggggagcttggctgggacaccaagcaaatgcatcgtatgtccccttggagacgtttttatgcagctgtgtatgttactatccagaaggagtcgggggtagactttcccgtgtaagctcagtccataaactggttacttctgatcctggaacgtggacttcacatgataggtctggatctgtttctgttgggatcacaggtaaggaaaatgtccattcaaatggtaaagaagggaggagggtgtttttttttttttttgctgtaggcaccattctgcatcttgaacccagactgaagtgtgcctctcacagatggaaggtgcacacgctcctgtctcctcctcactctgccacgttcacttggctttttcattggtacctaggaatttaagaatatcgaagcgagagcagtaacaaaccatagatgagcagactcccacaccgggttttcttgcccgtctttaaggcactgtttctaaattttgaacttagctctgaatccccaagaacttgagcacagcaagggttgctgagctgctgtcgccgcagccctggcccctggtgctggagctgcagcacctttgggagaggtcctgcgtcgtcctcagctgcgtcgctgtgaactcccgctctccactgtgttcctcagtgtctgcttttcaggaagtctgctgtgacctttgcccaacttctgagctcctcagggactaggaacaatttcagtagctttgccctgaaccaaacgagaaaacaaaagggaactcccgtatgacccacgtcacgtggtgcactcagagtgtgtgcggcatgatcctcggttgctcctcctctcactttagtagagtacgcggtggacagctgatctccttcagtcgtctacccacttccgtcattgtcctccgctagaataacagagtagttggtagtcatggccagaaggggggtgggggcagtgtgaggacttggggtttctgtgctgtgtgacacaaggagataagtgacaatcttgaagtcctaacttccactattctagaaagtatagtggtgatttgtgtgcaaagatttgaagttttaaaaaagtaccaagttcctgaaattcaataaaatatttttattaattttaaaaaaaaaaaaag

SEQ ID NO: 421608 - DNA, 1041 bp, Homo sapiens
ccacgcgtcgcggacgcgtgggctcagtccataaactggttacttctgatcctggaacgtggacttcacatgataggtctggatctgtttctgttgggatcacaggtaaggaaaatgtccattcaaatggtaaagaagggaggagggtgtttttttttttttttgctgtaggcaccattctgcatcttgaacccagactgaagtgtgcctctcacagatggaaggtgcacacgctcctgtctcctcctcactctgccacgttcacttggctttttcattggtacctaggaatttaagaatatcgaagcgagagcagtaacaaaccatagatgagcagactcccacaccgggttttcttgcccgtctttaaggcactgtttctaaattttgaacttagctctgaatccccaagaacttgagcacagcaagggttgctgagctgctgtcgccgcagccctggcccctggtgctggagctgcagcacctttgggagaggtcctgcgtcgtcctcagctgcgtcgctgtgaactcccgctctccactgtgttcctcagtgtctgcttttcaggaagtctgctgtgacctttgcccaacttctgagctcctcagggactaggaacaatttcagtagctttgccctgaaccaaacgagaaaacaaaagggaactcccgtatgacccacgtcacgtggtgcactcagagtgtgtgcggcatgatcctcggttgctcctcctctcactttagtagagtacgcggtggacagctgatctccttcagtcgtctacccacttccgtcattgtcctccgctagaataacagagtagttggtagtcatggccagaaggggggtgggggcagtgtgaggacttggggtttctgtgctgtgtgacacaaggagataagtgacaatcttgaagtcctaacttccactattctagaaagtatagtggtgatttgtgtgcaaagatttgaagttttaaaaaagtaccaagttcctgaaattcaataaaatatttttattaattttaaaaaaaaaaaaag

SEQ ID NO: 421609 - DNA, 1722 bp, Homo sapiens
cccgctgtctactccccaccttcggtgagcggccgccatggtggagcagggtccgagccacgtcctgcagggcacgtctggggcatttcctgttttgtggtaggaaatgtccctgacctttcagaaccgaacccaatcctgaggctgactcctctacggaaaatgaggacaggacgggggtgagggaatgagagtgggaggtccctgcacctcctcgcccggctcctcaggaagaaaaccgctggcccttcccgagtgtgccggccgagggccgagggccgtgcacatggggagagggcgtcagcctgatggctgagcttttaaatgtcatcatcataacattatttatttaaatgtagttattttggtatttaatttttttttagagaggaaaaaacctgtattttcctggtgggatgaaatagggatgaaatggctcagaatggtatatttaggcaattttaaaacatttattatttacataaagaccaaatatgatgaatctgttccgtgaattgtgtcggccctcagcatggggctggggcagcgtcactgcggtgacgcccattgaaaggtatgaaatgactgcacactagctggattatcactcagccgtttaagaaataaaagcaaaaccatcacgtgactgagaccgtgtgtgtgaccgcagcaaagcgcagcgtgttggatggatcagagcccctcggtgcagctgtctgcatcttccaagcactttacagataccttggaatgtatatttttgtcttcttactcagaaggtttgcagtttgtaaaataatcaggattctgctctgtcctgtgtgtggggtcagctccctccacagagggctccagctctgttggtcacagctgatggggttctctgattgataggagacgagctctcgagctctaaggaacagtgaggtcgccggtggggagcttggctgggacaccaagcaaatgcatcgtatgtccccttggagacgtttttatgcagctgtgtatgttactatccagaaggagtcgggggtagactttcccgtgtaagctcagtccataaactggttacttctgatcctggaacgtggacttcacatgataggtctggatctgtttctgttgggatcacaggtaaggaaaatgtccattcaaatggtaaagaagggaggagggtgtttttttttttttttgctgtaggcaccattctgcatcttgaacccagactgaagtgtgcctctcacagatggaaggtgcacacgctcctgtctcctcctcactctgccacgttcacttggctttttcattggtacctaggaatttaagaatatcgaagcgagagcagtaacaaaccatagatgagcagactcccacaccgggttttcttgcccgtctttaaggcactgtttctaaattttgaacttatagagtacgcggtggacagctgatctccttcagtcgtctacccacttccgtcattgtcctccgctagaataacagagtagttggtagtcatggccagaaggggggtgggggcagtgtgaggacttggggtttctgtgctgtgtgacacaaggagataagtgacaatcttgaagtcctaacttccactattctagaaagtatagtggtgatttgtgtgcaaagatttgaagttttaaaaaagtaccaagttcctgaaattcaataaaatatttttattaattttaaaaaaaaaaaaag

SEQ ID NO: 421610 - DNA, 3637 bp, Homo sapiens
ccccaggttcctgcgtgaagacaagttgggagcccaattgtttgttgccaactccaactccggccccttcaccatgcactccttggacgagccgctcgacctgaagttgagtatcaccaagctccgggcggcaagagagaagcgggagaggacgctgggtgtggtccggccccgtgctctgcacagggagctgggcctggtggatgacagccccacacctggctctccaggctccccgccctcaggcttcctgctgaactccaagttccccgagaaggtggagggacgcttttcagcagcccctctcgtggacctcagcctgtcaccaccatctgggctggactcccccaatggcagcagctcgctgtcccccgagcgccagggcaacggggacctgcctccagtgcccagtgcctcggacttccagccactgcgctatttggatggtgtccccagctccttccagttcttcctgcccctcggctccgggggggccctgcacctgcctgcctcctccttccttacccctcccaaggacaagtgcctctcgccagacctgcccctgcccaagcagctggtgtgtcgctgggccaagtgtaaccagctctttgagctcctgcaagacctggtggaccatgtcaacgattaccatgtcaagcccgagaaggatgcggggtactgctgccactgggagggctgcgcccgccatggccgaggtttcaacgccaggtacaagatgctcatccacatccgcacacacaccaacgagaagccacaccgctgtccgacctgcagcaagagcttctcccgcctggagaacctgaagatccacaaccggtcgcacacaggcgagaagccctacgtctgcccctacgagggctgcaacaagcgctattccaactccagtgaccgctttaagcacacgcgcacccactatgtggacaagccctactactgcaagatgcccggctgccacaagcgctacacggaccccagctcactgcgcaagcacatcaaggcccatggccactttgtgtcccacgagcagcaagagctcctgcagctgcgcccaccccccaagccgccactgcccgcccccgacggcggcccctatgtcagtggggcccagatcatcatccccaacccagctgccctctttggaggccctggcctgcccggcttacccctacccctggcccccggcccccttgacctcagtgccctggcctgtggcaacggtgggggcagtgggggtggggggggcatgggccctgggctgccaggccccgtcctgcctctcaatctggccaagaacccgctgctgccctcgccctttggggctggcggactgggcttgcctgtggtctccctccttgctggcgcagctggtggcaaggccgagggggagaaggggcgtgggtcggtgcccaccagggccctgggcatggagggccacaagacgccccttgaaaggacggagagcagctgctcccggccaagccccgatggactccccctgctgccaggcaccgtgctggacctgtccacgggcgtcaactcagctgccagcagcccagaggcgttggcccctggctgggtggtcatcccgccgggctcggtgctgctcaaaccggctgtggtgaactgagcccatcctgcggacagttgtggtgcccccccggcagctcccggcactgcccccgacgaacggaaactcttctgtgaaatagcaataatgtcctactgcccgggcagccccagcccagcccgccgggagcaaggatggtgctaggtcattcatggctggcctcccagcccccgggtggggacctggcctgtcatgcagggagagctgtgctcctgggtgctgaagcctcgctcctgtctgtcccccaccacctggccctcagcttctgagaggctttcccctgcccgacctcctcccgtttccctctcccaccctggcacctccctcacctagtgaccacccatggcaagttgccctctcccagcagagggggtgggtggggtggcatctgccctccctgctagcaccaggctccttggacccctttccctctgaccctgcctccagagggaaagcaagacagatgcaggcccctgcaaagccccaggtagaagcatgccccccaggacaaggcgcctcccactagttaggaggaggcccgctctgcagccgccgtcctcaccccaggccaggcctgcagtaccagacgggatagctggccactccacccctgcaccccagggtctcctccctctaccttttggggcaccctgggagcgtgggaagcaggtccgagggcccctgagctggcaaggggaggtgccaggccagctgtggtgccaagatactgagtgacctgggccctggctcagggagcatgtggggccaggcccagcgccccgtcttcctccttctacccccgctgggcctggcctgggcagcgccccctgcagaggcctttgggtccttggtcctgtaacaggaagggggaggctggctggggacgaccgaccacaggctgggacacagctcctggtctgggggctccaagtgacagcatgcaggggagggggctcccagtcagtgctgtgttgggagctttctggaggctgtggactgaaggccttgagggaagcagtggctggaggagggtgctggacccatgacacgttgcttcctctggcttttccctgctgggccgctttctcagaggcacttccccacccctaacacccagtgggcccccccaggttctgtgccactcagagggaccctggcaggggccagaaccacttaagggtggtgctggagggccttgtgccccagtcccatcccaggacgccctgagggatggacgcagccatgcaccccccatctggggcctctccctgctccctctcccacctggcagctgggagttctggcttctaggcctgccctgtcaccaggcctctgagtggccaggcccttccacctccccatctgtaaaacgaggcagctgcccggacagccttggggtccttagtggccctgcaggtcctctggcagctctgctgaccccaccctctcccggactgcccttctgtcccagaggggtcaccctgacccggcccaccttgccactgggctttggactccagccctgacagggcccagccacactggctctgcccctcgaaggggctatgagcaaggtaggagggagctggtctcctttcttcgggccccacccaggccctgagcaccccccacccctgtgagggccccaggccttaagtccctggcggggtcatgggtttgcgacttgagcagagcggaggaacagggcactggaaggccgacgagctcagcatgcgactcggtgacggaccaggctcggcagggccggtgtactttttgtggttgtcattggtgtgttgttgcacattccaggacgtcagtattttaacaggttctaagtgcctttctatcgtagcttatgttttcctcctcttggctccattgctgttagcatagagttttaaaaaaagagataagctaatgactataacaatatattcctccatgggagaggaagtttataaagaaacaataaaagtgagttgcaaa

SEQ ID NO: 421611 - DNA, 3953 bp, Homo sapiens
ccccaggttcctgcgtgaagacaagttgggagcccaattgtttgttgccaactccaactccggccccttcaccatgcactccttggacgagccgctcgacctgaagttgagtatcaccaagctccgggcggcaagagagaagcgggagaggacgctgggtgtggtccggccccgtgctctgcacagggagctgggcctggtggatgacagccccacacctggctctccaggctccccgccctcaggcttcctgctgaactccaagttccccgagaaggtggagggacgcttttcagcagcccctctcgtggacctcagcctgtcaccaccatctgggctggactcccccaatggcagcagctcgctgtcccccgagcgccagggcaacggggacctgcctccagtgcccagtgcctcggacttccagccactgcgctatttggatggtgtccccagctccttccagttcttcctgcccctcggctccgggggggccctgcacctgcctgcctcctccttccttacccctcccaaggacaagtgcctctcgccagacctgcccctgcccaagcagctggtgtgtcgctgggccaagtgtaaccagctctttgagctcctgcaagacctggtggaccatgtcaacgattaccatgtcaagcccgagaaggatgcggggtactgctgccactgggagggctgcgcccgccatggccgaggtttcaacgccaggtacaagatgctcatccacatccgcacacacaccaacgagaagccacaccgctgtccgacctgcagcaagagcttctcccgcctggagaacctgaagatccacaaccggtcgcacacaggcgagaagccctacgtctgcccctacgagggctgcaacaagcgctattccaactccagtgaccgctttaagcacacgcgcacccactatgtggacaagccctactactgcaagatgcccggctgccacaagcgctacacggaccccagctcactgcgcaagcacatcaaggcccatggccactttgtgtcccacgagcagcaagagctcctgcagctgcgcccaccccccaagccgccactgcccgcccccgacggcggcccctatgtcagtggggcccagatcatcatccccaacccagctgccctctttggaggccctggcctgcccggcttacccctacccctggcccccggcccccttgacctcagtgccctggcctgtggcaacggtgggggcagtgggggtggggggggcatgggccctgggctgccaggccccgtcctgcctctcaatctggccaagaacccgctgctgccctcgccctttggggctggcggactgggcttgcctgtggtctccctccttgctggcgcagctggtggcaaggccgagggggagaaggggcgtgggtcggtgcccaccagggccctgggcatggagggccacaagacgccccttgaaaggacggagagcagctgctcccggccaagccccgatggactccccctgctgccaggcaccgtgctggacctgtccacgggcgtcaactcagctgccagcagcccagaggcgttggcccctggctgggtggtcatcccgccgggctcggtgctgctcaaaccggctgtggtgaactgagcccatcctgcggacagttgtggtgcccccccggcagctcccggcactgcccccgacgaacggaaactcttctgtgaaatagcaataatgtcctactgcccgggcagccccagcccagcccgccgggagcaaggatggtgctaggtcattcatggctggcctcccagcccccgggtggggacctggcctgtcatgcagggagagctgtgctcctgggtgctgaagcctcgctcctgtctgtcccccaccacctggccctcagcttctgagaggctttcccctgcccgacctcctcccgtttccctctcccaccctggcacctccctcacctagtgaccacccatggcaagttgccctctcccagcagagggggtgggtggggtggcatctgccctccctgctagcaccaggctccttggacccctttccctctgaccctgcctccagagggaaagcaagacagatgcaggcccctgcaaagccccaggtagaagcatgccccccaggacaaggcgcctcccactagttaggaggaggcccgctctgcagccgccgtcctcaccccaggccaggcctgcagtaccagacgggatagctggccactccacccctgcaccccagggtctcctccctctaccttttggggcaccctgggagcgtgggaagcaggtccgagggcccctgagctggcaaggggaggtgccaggccagctgtggtgccaagatactgagtgacctgggccctggctcagggagcatgtggggccaggcccagcgccccgtcttcctccttctacccccgctgggcctggcctgggcagcgccccctgcagaggcctttgggtccttggtcctgtaacaggaagggggaggctggctggggacgaccgaccacaggctgggacacagctcctggtctgggggctccaagtgacagcatgcaggggagggggctcccagtcagtgctgtgttgggagctttctggaggctgtggactgaaggccttgagggaagcagtggctggaggagggtgctggacccatgacacgttgcttcctctggcttttccctgctgggccgctttctcagaggcacttccccacccctaacacccagtgggcccccccaggttctgtgccactcagagggaccctggcaggggccagaaccacttaagggtggtgctggagggccttgtgccccagtcccatcccaggacgccctgagggatggacgcagccatgcaccccccatctggggcctctccctgctccctctcccacctggcagctgggagttctggcttctaggcctgccctgtcaccaggcctctgagtggccaggcccttccacctccccatctgtaaaacgaggcagctgcccggacagccttggggtccttagtggccctgcaggtcctctggcagctctgctgaccccaccctctcccggactgcccttctgtcccagaggggtcaccctgacccggcccaccttgccactgggctttggactccagccctgacagggcccagccacactggctctgcccctcgaaggggctatgagcaaggtaggagggagctggtctcctttcttcgggccccacccaggccctgagcaccccccacccctgtgagggccccaggccttaagtccctggcggggtcatgggtttgcgacttgagcagagcggaggaacagggcactggaaggccgacgagctcagcatgcgactcggtgacggaccaggctcggcagggccggtgtactttttgtggttgtcattggtgtgttgttgcacattccaggacgtcagtattttaacaggttctaagtgcctttctatcgtagcttatgttttcctcctcttggctccattgctgttagcatagagttttaaaaaaagagataagctaatgactataacaatatattcctccatgggagaggaagtttataaagaaacaataaaagtgagttgcaaagatggcttgtatgtcgtggatgtgccaggaacccggccctgacatgaggccaccactgccctgagcccctgcaggcctgatccgggctttctccccgaccctgcaggtgcccctccctctcaatctgccgcttagagcaggaactggaaggttgggaaggaggtaggtgctgagggcgcacaggtgacaggaactgagacagaagattccaggcggagcatcccaaggtccaagtcctcagcccactactgcccgctgcggctttggagagtggtgggcaaaggcccttctccccccagccacattctggggtact

SEQ ID NO: 421612 - DNA, 347 bp, Homo sapiens
aagctctggcggctggtaaagctcagaggtggtgggtggtgtcacacacctgtcagctccacaggctgctcctcacattcgtgtggtctgggggcatggctggtgtctgctcccaaggtcacagtgggggttcggaggcaggagtacctggcccactgggactctacactccagcacaccctgaactgtgcctctccctcaggcttcctgctgaactccaagttccccgagaaggtggagggacgcttttcagcagcccctctcgtggacctcagcctgtcaccaccatctgggctggactcccccaatggcagcagctcgctgtcccccgagcgccagggcaacgg

SEQ ID NO: 421613 - DNA, 2663 bp, Homo sapiens
gtgtggaagtgacgctgcccccgctgcccaaaatgtcggcgcccagagggaggtagagagcccccacataccactgtattccccgccaccatggatgacgtccccgccccaacccctgcaccagcaccgcccgccgctgccgcccccagggtcccgtttcactgcagtgaatgtggcaagagcttccgctaccgctcagacctgcggcgccactttgcccggcacacagcgctcaagccccacgcatgtccgcgctgcggcaagggtttcaagcacagcttcaacctagccaaccacctgcgctcgcacaccggggagcggccctaccgctgctctgcctgccccaaggggttccgcgactccaccggcctgctgcaccaccaggtcgtccacactggtgagaaaccctactgctgcctggtctgcgagctccgcttctcctcacgctccagcctgggccgccacctcaagcgccagcaccgtggggttctcccctctcccctgcagcccggccctggcctgcccgccttgagtgcgccctgctccgtctgctgcaatgtggggccctgctcggtgtgcgggggctcaggggccggcggcggagagggccccgagggggcaggcgcgggtctgggcagctgggggctggcagaggcggcagctgcggccgcggcctccttgcccccatttgcgtgcggcgcctgcgcgcggcgcttcgaccacggccgcgagctggcggcccactgggcggcgcacaccgacgtgaagcccttcaagtgcccgcgctgcgagcgcgacttcaacgcgcccgcgctgctggagcggcacaagctgacccacgacctgcagggcccgggcgcgcccccagcgcaagcctgggccgcggggccaggcgcagggcccgagacggcgggcgaaggcaccgctgcggaggcgggcgacgctcctctggcttcggaccgcaggctgctcctgggccccgcggggggcggcgtgcccaagctcggggggctgctccccgagggcggtggggaggcgcctgcacctgcggcggccgccgagccctcggaagacaccctgtaccagtgcgactgcgggaccttctttgcgtcggccgcggccctggccagtcacctggaggcccactcgggcccggccacctacggctgcggccactgcggggctctgtacgcggcgctggccgccttggaggagcaccggcgggtcagccacggtgagggcggcggggaggaggcggcggccgccgcccgggaaagggaaccggcgtccggggaacccccgtctggctccggccgcggcaagaagatcttcggctgctccgagtgcgagaagctgttccgctcaccgcgagacctggagcggcacgtgctggtgcacactggcgagaagccgttcccgtgcctggagtgcggcaagttcttccgccacgagtgctacctcaagcgccaccggctgctgcacggcaccgagcggcccttcccttgccacatctgcggcaagggcttcatcacgctcagcaacctctccaggcacctgaagctgcaccggggcatggactgactgccaggctgcgtgcgccctgccctccacccagcctcctggactcggcctggaccaggggacctcgggactgcgcgtgaggccccggccctccaaatccaaatccagacgcaggccctgaaatgaggggaccctgactggagaggtgggggccaccaaaaacccacaaaggccccggagctgggggaccacaaacaaacagggtccttagctggggcaggggagcccaaatctagggagagactcctgagcctgaggtccctggaatgagtgtgggtagccgtaagtccccaagacatggggactttgcagtgagcaatgggtctccacaagtacctctcatcttgagagccctaatactaaaagatgggcacccacccccaccaagggaagactgccccattccctgagagccatcattcctaacgaccttgatctggagaatgtggagggagcatgtccctgaattttcctagatccctccaaatgccacccaccagagtcactggtgaccccagaaaatggatatagccgaaatctgcctttcccctttttcattccctgtgctgaaagagggaccagggtagatgccccctgccctcgaatcccccctccccgactgtggaatggatcgaccctaacgatcttccccgccccaaacactagaatagactggcctgaaatccccttgcccagtagaatggactgatctatgtgcacacacccccatcacatggaatgggctggtctaggctgtggcctgccaccttccttagagtgaatagggcggacactcctctcttttcctgtagcgtgtggaccggtccacgcaattctttatcctgtgaactcatctgagtgggaggtggtggacactggggtttccttccctctctccgtagcatccgttggtctttctctccatctctgttggtttgtctgtctctgtcttcctcccaatccctaggggaagggggcatttggctagggggtgcccctgtgagcctcgaccttgccccctcgtccctctccccagtgtttccaggacccccaataaaccttgtcctgtcagtcgctgatgc

SEQ ID NO: 421614 - DNA, 257 bp, Homo sapiens
gtgtggaagtgacgctgcccccgctgcccaaaatgtcggcgcccagagggaggtgtaagtaattaaagaggaaagccgacggacttccccggcctcccggggccgccccgggtctccaggaccaacgctccgtacgagcgaggtggactcgcctggccccggggcctgcccgacctgccccccaaccgggcgcccagggctgcaccttttaggggcagggggaggggcacaaaaggccggctctcggggcctggggc

SEQ ID NO: 421615 - DNA, 3558 bp, Homo sapiens
ctatcaggtctttataatgaatgtggaaaggacttgcaggggatgggaatagacttcgtagagaaggcctgagaaggtgacgggagtccagtggagagtcttagaaaggatgtggcttctttaaaggaaaaattgggtggagttttggaagtgggtcttagtggacccgagaggggcttagataagtcaaataacttagcaatcatggtaggacttaaggaggaatccaggaggaacttacgggataatagtcatccaaacagcttacttgttgcgtctttgctgtgcaccagcttaagtaggcacgtagcatttattgccacaattttacttaattctcgccaccactccatgaggtaggtactactattcccattttacagatgaagaatttttattatctgatgttacaggagtaattctggtctccctgcaaggatgactccagtgtgcttagccccaaatctttgccctcccattcgctaagtggtcatcctggaagaggagtgggaggagcttagaggggagtgggagggccttttggaaggaaaagggcttggcaaagaatacaagatccttagggaacattgtgggggactttgaagggagtaggtgggacttaaggaagagtgggagaggcttaaattacagtgggaggggcacagagagcagtggccgcgcattggcgaagagcgaggagaggcttaaaaacactccgtggagtgaggagactatgaagtgattaggaagattttgccacaggcgtggagccgcgagagaagggtttctaagagagtaggaggattttaaagaacaatgagagtggcttagagaggtgggcagtgggagggtctcccaggggacaggtggtgggtctgggaacctgggaggagagagctgatggggagccgaccccctcacctgctcctctgtctccccactactccagagagagcccccacataccactgtattccccgccaccatggatgacgtccccgccccaacccctgcaccagcaccgcccgccgctgccgcccccagggtcccgtttcactgcagtgaatgtggcaagagcttccgctaccgctcagacctgcggcgccactttgcccggcacacagcgctcaagccccacgcatgtccgcgctgcggcaagggtttcaagcacagcttcaacctagccaaccacctgcgctcgcacaccggggagcggccctaccgctgctctgcctgccccaaggggttccgcgactccaccggcctgctgcaccaccaggtcgtccacactggtgagaaaccctactgctgcctggtctgcgagctccgcttctcctcacgctccagcctgggccgccacctcaagcgccagcaccgtggggttctcccctctcccctgcagcccggccctggcctgcccgccttgagtgcgccctgctccgtctgctgcaatgtggggccctgctcggtgtgcgggggctcaggggccggcggcggagagggccccgagggggcaggcgcgggtctgggcagctgggggctggcagaggcggcagctgcggccgcggcctccttgcccccatttgcgtgcggcgcctgcgcgcggcgcttcgaccacggccgcgagctggcggcccactgggcggcgcacaccgacgtgaagcccttcaagtgcccgcgctgcgagcgcgacttcaacgcgcccgcgctgctggagcggcacaagctgacccacgacctgcagggcccgggcgcgcccccagcgcaagcctgggccgcggggccaggcgcagggcccgagacggcgggcgaaggcaccgctgcggaggcgggcgacgctcctctggcttcggaccgcaggctgctcctgggccccgcggggggcggcgtgcccaagctcggggggctgctccccgagggcggtggggaggcgcctgcacctgcggcggccgccgagccctcggaagacaccctgtaccagtgcgactgcgggaccttctttgcgtcggccgcggccctggccagtcacctggaggcccactcgggcccggccacctacggctgcggccactgcggggctctgtacgcggcgctggccgccttggaggagcaccggcgggtcagccacggtgagggcggcggggaggaggcggcggccgccgcccgggaaagggaaccggcgtccggggaacccccgtctggctccggccgcggcaagaagatcttcggctgctccgagtgcgagaagctgttccgctcaccgcgagacctggagcggcacgtgctggtgcacactggcgagaagccgttcccgtgcctggagtgcggcaagttcttccgccacgagtgctacctcaagcgccaccggctgctgcacggcaccgagcggcccttcccttgccacatctgcggcaagggcttcatcacgctcagcaacctctccaggcacctgaagctgcaccggggcatggactgactgccaggctgcgtgcgccctgccctccacccagcctcctggactcggcctggaccaggggacctcgggactgcgcgtgaggccccggccctccaaatccaaatccagacgcaggccctgaaatgaggggaccctgactggagaggtgggggccaccaaaaacccacaaaggccccggagctgggggaccacaaacaaacagggtccttagctggggcaggggagcccaaatctagggagagactcctgagcctgaggtccctggaatgagtgtgggtagccgtaagtccccaagacatggggactttgcagtgagcaatgggtctccacaagtacctctcatcttgagagccctaatactaaaagatgggcacccacccccaccaagggaagactgccccattccctgagagccatcattcctaacgaccttgatctggagaatgtggagggagcatgtccctgaattttcctagatccctccaaatgccacccaccagagtcactggtgaccccagaaaatggatatagccgaaatctgcctttcccctttttcattccctgtgctgaaagagggaccagggtagatgccccctgccctcgaatcccccctccccgactgtggaatggatcgaccctaacgatcttccccgccccaaacactagaatagactggcctgaaatccccttgcccagtagaatggactgatctatgtgcacacacccccatcacatggaatgggctggtctaggctgtggcctgccaccttccttagagtgaatagggcggacactcctctcttttcctgtagcgtgtggaccggtccacgcaattctttatcctgtgaactcatctgagtgggaggtggtggacactggggtttccttccctctctccgtagcatccgttggtctttctctccatctctgttggtttgtctgtctctgtcttcctcccaatccctaggggaagggggcatttggctagggggtgcccctgtgagcctcgaccttgccccctcgtccctctccccagtgtttccaggacccccaataaaccttgtcctgtcagtcgctgatgc

SEQ ID NO: 421616 - DNA, 2965 bp, Homo sapiens
ctatcaggtctttataatgaatgtggaaaggacttgcaggggatgggaatagacttcgtagagaaggcctgagaaggtgacgggagtccagtggagagtcttagaaaggatgtggcttctttaaaggaaaaattgggtggagttttggaagtgggtcttagtggacccgagaggggcttagataagtcaaataacttagcaatcatggtaggacttaaggaggaatccaggaggaacttacgggataatagtcatccaaacagcttacttgttgcgtctttgctgtgcaccagcttaagtaggcacgtagcatttattgccacaattttacttaattctcgccaccactccatgagagagagcccccacataccactgtattccccgccaccatggatgacgtccccgccccaacccctgcaccagcaccgcccgccgctgccgcccccagggtcccgtttcactgcagtgaatgtggcaagagcttccgctaccgctcagacctgcggcgccactttgcccggcacacagcgctcaagccccacgcatgtccgcgctgcggcaagggtttcaagcacagcttcaacctagccaaccacctgcgctcgcacaccggggagcggccctaccgctgctctgcctgccccaaggggttccgcgactccaccggcctgctgcaccaccaggtcgtccacactggtgagaaaccctactgctgcctggtctgcgagctccgcttctcctcacgctccagcctgggccgccacctcaagcgccagcaccgtggggttctcccctctcccctgcagcccggccctggcctgcccgccttgagtgcgccctgctccgtctgctgcaatgtggggccctgctcggtgtgcgggggctcaggggccggcggcggagagggccccgagggggcaggcgcgggtctgggcagctgggggctggcagaggcggcagctgcggccgcggcctccttgcccccatttgcgtgcggcgcctgcgcgcggcgcttcgaccacggccgcgagctggcggcccactgggcggcgcacaccgacgtgaagcccttcaagtgcccgcgctgcgagcgcgacttcaacgcgcccgcgctgctggagcggcacaagctgacccacgacctgcagggcccgggcgcgcccccagcgcaagcctgggccgcggggccaggcgcagggcccgagacggcgggcgaaggcaccgctgcggaggcgggcgacgctcctctggcttcggaccgcaggctgctcctgggccccgcggggggcggcgtgcccaagctcggggggctgctccccgagggcggtggggaggcgcctgcacctgcggcggccgccgagccctcggaagacaccctgtaccagtgcgactgcgggaccttctttgcgtcggccgcggccctggccagtcacctggaggcccactcgggcccggccacctacggctgcggccactgcggggctctgtacgcggcgctggccgccttggaggagcaccggcgggtcagccacggtgagggcggcggggaggaggcggcggccgccgcccgggaaagggaaccggcgtccggggaacccccgtctggctccggccgcggcaagaagatcttcggctgctccgagtgcgagaagctgttccgctcaccgcgagacctggagcggcacgtgctggtgcacactggcgagaagccgttcccgtgcctggagtgcggcaagttcttccgccacgagtgctacctcaagcgccaccggctgctgcacggcaccgagcggcccttcccttgccacatctgcggcaagggcttcatcacgctcagcaacctctccaggcacctgaagctgcaccggggcatggactgactgccaggctgcgtgcgccctgccctccacccagcctcctggactcggcctggaccaggggacctcgggactgcgcgtgaggccccggccctccaaatccaaatccagacgcaggccctgaaatgaggggaccctgactggagaggtgggggccaccaaaaacccacaaaggccccggagctgggggaccacaaacaaacagggtccttagctggggcaggggagcccaaatctagggagagactcctgagcctgaggtccctggaatgagtgtgggtagccgtaagtccccaagacatggggactttgcagtgagcaatgggtctccacaagtacctctcatcttgagagccctaatactaaaagatgggcacccacccccaccaagggaagactgccccattccctgagagccatcattcctaacgaccttgatctggagaatgtggagggagcatgtccctgaattttcctagatccctccaaatgccacccaccagagtcactggtgaccccagaaaatggatatagccgaaatctgcctttcccctttttcattccctgtgctgaaagagggaccagggtagatgccccctgccctcgaatcccccctccccgactgtggaatggatcgaccctaacgatcttccccgccccaaacactagaatagactggcctgaaatccccttgcccagtagaatggactgatctatgtgcacacacccccatcacatggaatgggctggtctaggctgtggcctgccaccttccttagagtgaatagggcggacactcctctcttttcctgtagcgtgtggaccggtccacgcaattctttatcctgtgaactcatctgagtgggaggtggtggacactggggtttccttccctctctccgtagcatccgttggtctttctctccatctctgttggtttgtctgtctctgtcttcctcccaatccctaggggaagggggcatttggctagggggtgcccctgtgagcctcgaccttgccccctcgtccctctccccagtgtttccaggacccccaataaaccttgtcctgtcagtcgctgatgc

SEQ ID NO: 421617 - DNA, 3498 bp, Homo sapiens
ctatcaggtctttataatgaatgtggaaaggacttgcaggggatgggaatagacttcgtagagaaggcctgagaaggtgacgggagtccagtggagagtcttagaaaggatgtggcttctttaaaggaaaaattgggtggagttttggaagtgggtcttagtggacccgagaggggcttagataagtcaaataacttagcaatcatggtaggacttaaggaggaatccaggaggaacttacgggataatagtcatccaaacagcttacttgttgcgtctttgctgtgcaccagcttaagtaggcacgtagcatttattgccacaattttacttaattctcgccaccactccatgaggtaggtactactattcccattttacagatgaagaatttttattatctgatgttacaggagtaattctggtctccctgcaaggatgactccagtgtgcttagccccaaatctttgccctcccattcgctaagtggtcatcctggaagaggagtgggaggagcttagaggggagtgggagggccttttggaaggaaaagggcttggcaaagaatacaagatccttagggaacattgtgggggactttgaagggagtaggtgggacttaaggaagagtgggagaggcttaaattacagtgggaggggcacagagagcagtggccgcgcattggcgaagagcgaggagaggcttaaaaacactccgtggagtgaggagactatgaagtgattaggaagattttgccacaggcgtggagccgcgagagaagggtttctaagagagtaggaggattttaaagaacaatgagagtggcttagagaggtgggcagtgggagggtctcccaggggacaggtggtgggtctgggaacctgggaggagagagctgatggggagccgaccccctcacctgctcctctgtctccccactactccagagagagcccccacataccactgtattccccgccaccatggatgacgtccccgccccaacccctgcaccagcaccgcccgccgctgccgcccccagggtcccgtttcactgcagtgaatgtggcaagagcttccgctaccgctcagacctgcggcgccactttgcccggcacacagcgctcaagccccacgcatgtccgcgctgcggcaagggtttcaagcacagcttcaacctagccaaccacctgcgctcgcacaccggggagcggccctaccgctgctctgcctgccccaaggggttccgcgactccaccggcctgctgcaccaccaggtcgtccacactggtgagaaaccctactgctgcctggtctgcgagctccgcttctcctcacgctccagcctgggccgccacctcaagcgccagcaccgtggggttctcccctctcccctgcagcccggccctggcctgcccgccttgagtgcgccctgctccgtctgctgcaatgtggggccctgctcggtgtgcgggggctcaggggccggcggcggagagggccccgagggggcaggcgcgggtctgggcagctgggggctggcagaggcggcagctgcggccgcggcctccttgcccccatttgcgtgcggcgcctgcgcgcggcgcttcgaccacggccgcgagctggcggcccactgggcggcgcacaccgacgtgaagcccttcaagtgcccgcgctgcgagcgcgacttcaacgcgcccgcgctgctggagcggcacaagctgacccacgacctgcagggcccgggcgcgcccccagcgcaagcctgggccgcggggccaggcgcagggcccgagacggcgggcgaaggcaccgctgcggaggcgggcgacgctcctctggcttcggaccgcaggctgctcctgggccccgcggggggcggcgtgcccaagctcggggggctgctccccgagggcggtggggaggcgcctgcacctgcggcggccgccgagccctcggaagacaccctgtaccagtgcgactgcgggaccttctttgcgtcggccgcggccctggccagtcacctggaggcccactcgggcccggccacctacggctgcggccactgcggggctctgtacgcggcgctggccgccgcccgggaaagggaaccggcgtccggggaacccccgtctggctccggccgcggcaagaagatcttcggctgctccgagtgcgagaagctgttccgctcaccgcgagacctggagcggcacgtgctggtgcacactggcgagaagccgttcccgtgcctggagtgcggcaagttcttccgccacgagtgctacctcaagcgccaccggctgctgcacggcaccgagcggcccttcccttgccacatctgcggcaagggcttcatcacgctcagcaacctctccaggcacctgaagctgcaccggggcatggactgactgccaggctgcgtgcgccctgccctccacccagcctcctggactcggcctggaccaggggacctcgggactgcgcgtgaggccccggccctccaaatccaaatccagacgcaggccctgaaatgaggggaccctgactggagaggtgggggccaccaaaaacccacaaaggccccggagctgggggaccacaaacaaacagggtccttagctggggcaggggagcccaaatctagggagagactcctgagcctgaggtccctggaatgagtgtgggtagccgtaagtccccaagacatggggactttgcagtgagcaatgggtctccacaagtacctctcatcttgagagccctaatactaaaagatgggcacccacccccaccaagggaagactgccccattccctgagagccatcattcctaacgaccttgatctggagaatgtggagggagcatgtccctgaattttcctagatccctccaaatgccacccaccagagtcactggtgaccccagaaaatggatatagccgaaatctgcctttcccctttttcattccctgtgctgaaagagggaccagggtagatgccccctgccctcgaatcccccctccccgactgtggaatggatcgaccctaacgatcttccccgccccaaacactagaatagactggcctgaaatccccttgcccagtagaatggactgatctatgtgcacacacccccatcacatggaatgggctggtctaggctgtggcctgccaccttccttagagtgaatagggcggacactcctctcttttcctgtagcgtgtggaccggtccacgcaattctttatcctgtgaactcatctgagtgggaggtggtggacactggggtttccttccctctctccgtagcatccgttggtctttctctccatctctgttggtttgtctgtctctgtcttcctcccaatccctaggggaagggggcatttggctagggggtgcccctgtgagcctcgaccttgccccctcgtccctctccccagtgtttccaggacccccaataaaccttgtcctgtcagtcgctgatgc

SEQ ID NO: 421618 - DNA, 3673 bp, Homo sapiens
ctatcaggtctttataatgaatgtggaaaggacttgcaggggatgggaatagacttcgtagagaaggcctgagaaggtgacgggagtccagtggagagtcttagaaaggatgtggcttctttaaaggaaaaattgggtggagttttggaagtgggtcttagtggacccgagaggggcttagataagtcaaataacttagcaatcatggtaggacttaaggaggaatccaggaggaacttacgggataatagtcatccaaacagcttacttgttgcgtctttgctgtgcaccagcttaagtaggcacgtagcatttattgccacaattttacttaattctcgccaccactccatgaggtaggtactactattcccattttacagatgaagaatttttattatctgatgttacaggagtaattctggtctccctgcaaggatgactccagtgtgcttagccccaaatctttgccctcccattcgctaagtggtcatcctggaagaggagtgggaggagcttagaggggagtgggagggccttttggaaggaaaagggcttggcaaagaatacaagatccttagggaacattgtgggggactttgaagggagtaggtgggacttaaggaagagtgggagaggcttaaattacagtgggaggggcacagagagcagtggccgcgcattggcgaagagcgaggagaggcttaaaaacactccgtggagtgaggagactatgaagtgattaggaagattttgccacaggcgtggagccgcgagagaagggtttctaagagagtaggaggattttaaagaacaatgagagtggcttagagaggtgggcagtgggagggtctcccaggggacaggtggtgggtctgggaacctgggaggagagagctgatggggagccgaccccctcacctgctcctctgtctccccactactccagagagagcccccacataccactgtattccccgccaccatggatgacgtccccgccccaacccctgcaccagcaccgcccgccgctgccgcccccagggtcccgtttcactgcagtgaatgtggcaagagcttccgctaccgctcagacctgcggcgccactttgcccggcacacagcgctcaagccccacgcatgtccgcgctgcggcaagggtttcaagcacagcttcaacctagccaaccacctgcgctcgcacaccggggagcggccctaccgctgctctgcctgccccaaggggttccgcgactccaccggcctgctgcaccaccaggaagcaaagcaggctttggaggaactggaggaaggccaatgtgactggagcatggagaagcagaaagtgtggctcaggagaagtctggagagtgccggaccctggaaatacagctgtcgtccacactggtgagaaaccctactgctgcctggtctgcgagctccgcttctcctcacgctccagcctgggccgccacctcaagcgccagcaccgtggggttctcccctctcccctgcagcccggccctggcctgcccgccttgagtgcgccctgctccgtctgctgcaatgtggggccctgctcggtgtgcgggggctcaggggccggcggcggagagggccccgagggggcaggcgcgggtctgggcagctgggggctggcagaggcggcagctgcggccgcggcctccttgcccccatttgcgtgcggcgcctgcgcgcggcgcttcgaccacggccgcgagctggcggcccactgggcggcgcacaccgacgtgaagcccttcaagtgcccgcgctgcgagcgcgacttcaacgcgcccgcgctgctggagcggcacaagctgacccacgacctgcagggcccgggcgcgcccccagcgcaagcctgggccgcggggccaggcgcagggcccgagacggcgggcgaaggcaccgctgcggaggcgggcgacgctcctctggcttcggaccgcaggctgctcctgggccccgcggggggcggcgtgcccaagctcggggggctgctccccgagggcggtggggaggcgcctgcacctgcggcggccgccgagccctcggaagacaccctgtaccagtgcgactgcgggaccttctttgcgtcggccgcggccctggccagtcacctggaggcccactcgggcccggccacctacggctgcggccactgcggggctctgtacgcggcgctggccgccttggaggagcaccggcgggtcagccacggtgagggcggcggggaggaggcggcggccgccgcccgggaaagggaaccggcgtccggggaacccccgtctggctccggccgcggcaagaagatcttcggctgctccgagtgcgagaagctgttccgctcaccgcgagacctggagcggcacgtgctggtgcacactggcgagaagccgttcccgtgcctggagtgcggcaagttcttccgccacgagtgctacctcaagcgccaccggctgctgcacggcaccgagcggcccttcccttgccacatctgcggcaagggcttcatcacgctcagcaacctctccaggcacctgaagctgcaccggggcatggactgactgccaggctgcgtgcgccctgccctccacccagcctcctggactcggcctggaccaggggacctcgggactgcgcgtgaggccccggccctccaaatccaaatccagacgcaggccctgaaatgaggggaccctgactggagaggtgggggccaccaaaaacccacaaaggccccggagctgggggaccacaaacaaacagggtccttagctggggcaggggagcccaaatctagggagagactcctgagcctgaggtccctggaatgagtgtgggtagccgtaagtccccaagacatggggactttgcagtgagcaatgggtctccacaagtacctctcatcttgagagccctaatactaaaagatgggcacccacccccaccaagggaagactgccccattccctgagagccatcattcctaacgaccttgatctggagaatgtggagggagcatgtccctgaattttcctagatccctccaaatgccacccaccagagtcactggtgaccccagaaaatggatatagccgaaatctgcctttcccctttttcattccctgtgctgaaagagggaccagggtagatgccccctgccctcgaatcccccctccccgactgtggaatggatcgaccctaacgatcttccccgccccaaacactagaatagactggcctgaaatccccttgcccagtagaatggactgatctatgtgcacacacccccatcacatggaatgggctggtctaggctgtggcctgccaccttccttagagtgaatagggcggacactcctctcttttcctgtagcgtgtggaccggtccacgcaattctttatcctgtgaactcatctgagtgggaggtggtggacactggggtttccttccctctctccgtagcatccgttggtctttctctccatctctgttggtttgtctgtctctgtcttcctcccaatccctaggggaagggggcatttggctagggggtgcccctgtgagcctcgaccttgccccctcgtccctctccccagtgtttccaggacccccaataaaccttgtcctgtcagtcgctgatgc

SEQ ID NO: 421619 - DNA, 5276 bp, Homo sapiens
  misc_feature (1054)..(1054): n is a, c, g, or t
ctctatgggaggagaccacccggaggatgaagaggatttctacgaggaagagatggactatggagagagtgaggagccaatgggagacgacgactatgacgagtactccaaggagctgaaccagtaccgccgctccaaggacagccgaggccgagggctaagtcgaggccgtggcaggggctcccgaggtcgagggaaaggaatgggtcggggccgaggccgaggtggcagccgaggagggatgaacaagggcggaatgaacgatgacgaagacttctatgacgaggacatgggcgacggtggtggtggaagctaccggagtcgtgaccatgacaagccccaccagcagtcggacaagaaaggcaaagtcatttgcaagtacttcgtggaagggcgctgcacctggggagaccactgtaattttagccatgacatcgaactgccaaagaagcgagaactgtgcaagttttacatcactggattttgcgccagagctgagaactgcccttatatgcacggtgatttcccgtgtaagctgtaccacaccactgggaactgcatcaatggtgacgactgcatgttttcccacgaccctctgaccgaagagacgagggagctcttggataagatgttggccgatgatgcagaagcaggtgccgaggatgagaaggaggtggaggaactgaagaagcagggcatcaaccccctgcccaaaccgccccctggtgtgggcctcctgcccacccctcctcggccccctggcccgcaggctccaacctctcccaacggcaggcccatgcagggtggccccccgcccccgccccctccccctcccccaccgcccgggccccctcagatgcccatgccggtgcatgagccactgtccccgcagcagctgcagcagcaggacatgtacaacaagaagatcccctccttgtttgagatcgtggtgcggcccacgggacagctggctgagaagctgggtgtgaggttccctggacccggtggacccccagggccaatgggccctgggcccaacatgggacccccaggnccaatgggcggtccaatgcatcctgacatgcaccccgacatgcacccggacatgcaccctgacatgcacgcagacatgcacgcagacatgccgatgggccctggcatgaatcctggcccacccatgggccctggcggccctccaatgatgccctacggccctggagactccccacattctggaatgatgccccctatcccgccagcccagaacttctatgaaaacttctaccagcagcaggagggcatggagatggagcccggactcctgggggatgcagaggactacgggcactacgaagagctgccaggggagcctggggagcacctcttccctgagcaccctctggagcccgacagcttctctgagggagggcccccaggccggccgaagccaggcgccggtgtccctgacttcctgccctcagcccagagggccctgtacctgaggatccagcagaagcagcaggaggaggaggagagagcgaggaggctggctgagagcagcaagcaggaccgggagaatgaggaaggtgacaccggaaactggtactcaagtgatgaggatgagggtggaagcagtgtcacctccatcctgaagaccttgaggcagcagacgtccagccgacccccggcttcagttggggagctgagcagcagtgggctgggggacccccgcctccagaagggacaccccacaggaagccggctggctgaccctcgcctcagccgggaccccagactcacccgccatgtggaggcttctggcgggtctggcccaggtgattcgggaccctccgatcctcggctggctcgcgccctgcccacctccaagcccgaaggcagccttcattccagccctgtgggccccagcagttccaaggggtctgggccgcccccaacggaggaggaggaaggggagcgggccctgcgggagaaggccgtgaacattcccctggacccactccccgggcaccctctgcgggacccacggtcacagctgcagcagttcagccacatcaagaaggacgtgaccctgagcaagcccagcttcgcccgcaccgtgctctggaatcccgaggacctgatccccctacccatccccaagcaggacgcagtgccccccgtgcccgcggccctgcaatccatgcccaccctggacccccggctgcaccgcgctgccacggcagggccccccaacgcccggcagcgcccgggcgcctccacggattccagcacacagggcgccaacctccccgactttgaacttctgtctcgcatcctcaagacagtcaatgccaccggctcctcggccgcccccggttccagcgacaaacccagtgacccccgggtgcggaaggcccccaccgaccctcggctgcagaaacccacagactctacggcctcctcccgggctgccaagcccggccctgctgaggcgccctctcccaccgccagcccgagtggggatgcctccccaccagccaccgctccctacgacccccgcgtgctggcggccggtggactgggccagggcggagggggcgggcagagcagtgtgctgagcggtatcagcctctacgacccgaggactcccaacgcggggggcaaagccacagagccggctgctgacacgggtgcccagcccaagggtgctgagggcaatggcaagagctcggcctccaaggctaaggagcccccgttcgtccgcaagtctgccctggaacagccagagacagggaaggccggtgctgatgggggcacccccacggacagatacaacagctacaaccggccccggcccaaggctgctgcagcccccgctgccaccaccgccaccccaccccccgagggtgccccaccccagcccggggtgcacaacctgcccgtgcccaccctcttcgggacggtgaagcagacacccaagacgggctcaggaagcccatttgctgggaacagtccggcccgcgagggtgagcaggatgcggcatccctgaaggatgtttttaaaggcttcgaccccacggcctcccccttttgccagtagtgtccagccagagctgcggctccagccacccttcctagggtggcattcagggcagcacccagggtagggaacttgggggcaaggggaggcaggctgggtgttccttttttcttttctttttcttttgctttccgtctcttttatttttttttaaagtagtactttctttgagatttgtaaattgtatataaccatcttaagttctggtcagtgtggcgggctcaggggctcctgctgagcaaaccgactcatgcccgcaaacctgtgaactttcgccagtgcctggcctcagactctgtgggctctgcgtggccgggccttgctggaggcccagtgggttttctgggcaaagcatggccccttttccccaggacaaagggaacagttggtgtctgggaaggtattgaacgctcctcaccctgtgcccgaagagacccggaaccaagaccatggcagggcctgcgtggaagcaggtccaggcgtttctagaaccctagggtgcaccatcactgtcttttcagtgcaggctgtaacaacccactcaggagacagtgagagtgaaaaggtattaaggaaaaagcccccagcggcactatgggggctccctggtgcatgcctgctcctgtccctggattaccacacgtgccctccctgccaccctccgtctagagcaagcggatgccccccagcctgcagcagaagcctccacagtgagaactggacccaaaggtagtgggggccggtgtggggcagagtcctgaagagccacctctaggaggcagcccctaggagcacgcacgttctgtcagtattaccccacctgtcctatcaggtgggccacaccctgcttgcccacaccagggtctgtcctggtcctcaagccacgcacccgctatgcctgcactgcagcccagccccggacagctccaggatccgtgcagtggctgcgccgccaggccccaacaatggggaccctggggtggctcctggccaagtgttctctgttttcctcgcacctccttacactgtgtgacctgcagggcatgaggtattgatgtgttcgggtttcctttcccaagccagcagatgcaggtgttccaaggtgtgttgctctgtgggatttgtggacacttaagaaacggactgagtgggaaccctgcagccaggggatggggagcctctgctccccccatgctcccaccctggctgagggccagcctcatctgcagagccctggaggaggcccacctatggacacagcccgagagatgggcgcaaggggtgctgggggaggcctgctatcctgcctctgggccacttgaggggcctcaggaagtgtgtgcttgtggctgcatctgcccgtctccctggcccaccatgtggctgcaggccaagctcttcattgctgaccatgaagagacctagttacctgccaagggattccccttccctcctcctcagggtggggtgaacaaggctcctatcccaccccaccccaaaaagagaaaaatgaaaaactcatagtttggagccaggaggcagggtgtcctacagggctgcacagccctgaggggtcagtgctgggatctggttggttggtttgtctttttgtcttttttttttttttttttttttacacaatcattaatgagatttgtcttcagccaccagtgttggccttgaagcagagggcacagcccttggtgtttgtaaaataagtatgaatacacagtgtggcagtgttgtggtttttgttgttgtttttcctctccttttgagaattttcttttgtaaaagaaaaatattttttaaaccgaaatctgtggatgaaatagaagctggagccctcctcttggaatattcagcctaagaacctcataggactatgaattcacccgaaattctcatttgccatcaggccgagcttttaaagaaaaattgttctctaaccaggattgtaacaaaagtgtaaatactgtttcagagttgagagttggtggtgcaaatatgtatataatgaactgtatttttacaatgatcgccgcatgactatttcacaccctttttatactccatatctgtcttccagaaacgtcacctgcctttctcctgtggtctcttaatccagtaattgtattactgccattaaaggatgcagttattttaaaaaaaaaat

SEQ ID NO: 421620 - DNA, 468 bp, Homo sapiens
gggaattttttggccaaaattttcaaccaatccatatagcctgaaacgtaattatggaggttgatgtgaatgcaaagcagcagcatatcctggtgaagttattgagcttcagggttgaatggggaatgattaaagcatccaaacagaagaggaggggaggatgaggttaaccttggacttcatagcagagttcaatgtcagaagatggaccaatgaccacagagttctgaaggaaacaagtataataacccagtattagttcagccggcagcttcttaccccagtatcccaggcagcaacagacaccagcagatgtgtgctcagggcacactgcacccctgcatctgtcttgggaagaaatagatgcttcaaacaaataatgttgtgtataaaataatttgttttttcctttgagaccaagtctcactgtcactccagcctaggcgacagagcaagactctgtcactg

SEQ ID NO: 421621 - DNA, 800 bp, Homo sapiens
tcatgctgttctagaggatcccgaaaatgacatagaggcagatgatgagcacattgatatggtggcgactctataaaggccgggccctgaatgactacggtgaatggtgccccctgctgagccgcaatggaagtgtagcaggaagaaaaagcaaatctttgctgaattcagccactaagacttttggggttgttttctacaccacatacattttttttctgtttctttctttttgtcttttttttttttttttttttttacacaatcattaatgagatttgtcttcagccaccagtgttggccttgaagcagagggcacagcccttggtgtttgtaaaataagtatgaatacacagtgtggcagtgttgtggtttttgttgttgtttttcctctccttttgagaattttcttttgtaaaagaaaaatattttttaaaccgaaatctgtggatgaaatagaagctggagccctcctcttggaatattcagcctaagaacctcataggactatgaattcacccgaaattctcatttgccatcaggccgagcttttaaagaaaaattgttctctaaccaggattgtaacaaaagtgtaaatactgtttcagagttgagagttggtggtgcaaatatgtatataatgaactgtatttttacaatgatcgccgcatgactatttcacaccctttttatactccatatctgtcttccagaaacgtcacctgcctttctcctgtggtctcttaatccagtaattgtattactgccattaaaggatgcagttattttaaaaaaaaaat

SEQ ID NO: 421622 - DNA, 832 bp, Homo sapiens
cccgatcccatctctacccttccctttcattcccctttacgtccacaccctgtccattgcaggacggtggtggtggaagctaccggagtcgtgaccatgacaagccccaccagcagtcggacaagaaaggcaaagtcatttgcaagtacttcgtggaagggcgctgcacctgggtaaggagcgctgaaagctgggcacctctaggaggccatagcccccagaggacacatggcttccagaaggttctggagccgtggtgagggtgggtgggagtgactgtgtagtccttgtccttgtggacacttgccgatactgggagttgcctgggcggcctgaaagactcaggttacctttcagagtgaggaggacccccagtaagatgaggacttttggttttaggggaattttttggccaaaattttcaaccaatccatatagcctgaaacgtaattatggaggttgatgtgaatgcaaagcagcagcatatcctggtgaagttattgagcttcagggttgaatggggaatgattaaagcatccaaacagaagaggaggggaggatgaggttaaccttggacttcatagcagagttcaatgtcagaagatggaccaatgaccacagagttctgaaggaaacaagtataataacccagtattagttcagccggcagcttcttaccccagtatcccaggcagcaacagacaccagcagatgtgtgctcagggcacactgcacccctgcatctgtcttgggaagaaatagatgcttcaaacaaataatgttgtgtataaaataatttgttttttcctttgagaccaagtctcactgtcac

SEQ ID NO: 421623 - DNA, 1901 bp, Homo sapiens
  misc_feature (1054)..(1054): n is a, c, g, or t
ctctatgggaggagaccacccggaggatgaagaggatttctacgaggaagagatggactatggagagagtgaggagccaatgggagacgacgactatgacgagtactccaaggagctgaaccagtaccgccgctccaaggacagccgaggccgagggctaagtcgaggccgtggcaggggctcccgaggtcgagggaaaggaatgggtcggggccgaggccgaggtggcagccgaggagggatgaacaagggcggaatgaacgatgacgaagacttctatgacgaggacatgggcgacggtggtggtggaagctaccggagtcgtgaccatgacaagccccaccagcagtcggacaagaaaggcaaagtcatttgcaagtacttcgtggaagggcgctgcacctggggagaccactgtaattttagccatgacatcgaactgccaaagaagcgagaactgtgcaagttttacatcactggattttgcgccagagctgagaactgcccttatatgcacggtgatttcccgtgtaagctgtaccacaccactgggaactgcatcaatggtgacgactgcatgttttcccacgaccctctgaccgaagagacgagggagctcttggataagatgttggccgatgatgcagaagcaggtgccgaggatgagaaggaggtggaggaactgaagaagcagggcatcaaccccctgcccaaaccgccccctggtgtgggcctcctgcccacccctcctcggccccctggcccgcaggctccaacctctcccaacggcaggcccatgcagggtggccccccgcccccgccccctccccctcccccaccgcccgggccccctcagatgcccatgccggtgcatgagccactgtccccgcagcagctgcagcagcaggacatgtacaacaagaagatcccctccttgtttgagatcgtggtgcggcccacgggacagctggctgagaagctgggtgtgaggttccctggacccggtggacccccagggccaatgggccctgggcccaacatgggacccccaggnccaatgggcggtccaatgcatcctgacatgcaccccgacatgcacccggacatgcaccctgacatgcacgcagacatgcacgcagacatgccgatgggccctggcatgaatcctggcccacccatgggccctggcggccctccaatgatgccctacggccctggagactccccacattctggaatgatgccccctatcccgccagcccagaacttctatgaaaacttctaccagcagcaggagggcatggagatggagcccggactcctgggggatgcagaggactacgggcactacgaagagctgccaggggagcctggggagcacctcttccctgagcaccctctggagcccgacagcttctctgagggagggcccccaggccggccgaagccaggcgccggtgtccctgacttcctgccctcagcccagagggccctgtacctgaggatccagcagaagcagcaggaggaggaggagagagcgaggaggctggctgagagcagcaagcaggaccgggagaatgaggaaggtgacaccggaaactggtactcaagtgatgaggatgagggtggaagcagtgtcacctccatcctgaagaccttgaggcagcagacgtccagccgacccccggcttcagttggggagctgagcagcagtgggctgggggacccccgcctccagaagggacaccccacaggaagccggctggctgaccctcgcctcagccgggaccccagactcacccgccatgtggaggcttctggcgggtctggcccaggtgattcgggaccctccgatcctcggctgtccttggagcgccggtactggttcagctccttggatg

SEQ ID NO: 421624 - DNA, 2317 bp, Homo sapiens
catcccacaatcctctcgtcacgtatttccggtttatctagctcagccgtaagtagtttctctatcagtcgcgcagctgtgttcgcggactcaggtggaaggaatttcttctcttcgttgacgttgctggtgttcactgtttggaattagtcaagtttcgggaatcaccgtcgctgccatcaacatgtcggtcccaagcgctctcatgaagcaaccgcccattcagtctacggctggggccgtcccagttcgcaatgagaaaggtgagatttcaatggaaaaagtgaaggtaaagcgttatgtgtccggaaaaaggccagactatgcccctatggagtcctcagatgaggaggatgaagaatttcagttcattaagaaagccaaagaacaagaagcagagcctgaggaacaggaggaggattcatccagtgacccccggctacggcgtttacagaaccgtattagtgaagatgtggaagagagattggctcgacatcgaaaaatagtggaacctgaagtggtaggagagagtgactcagaagtagaaggagatgcttggcgcatggaacgagaagacagcagtgaagaagaggaggaggaaattgatgatgaggaaatagagcggcggcgtggcatgatgcgtcagcgagcacaggagagaaaaaatgaagagatggaagtcatggaagtggaagatgagggtcgttctggagaggagtcagaatcagagtctgagtatgaagagtacacagacagtgaagatgagatggagcctcgccttaagccagtcttcattcgaaagaaggaccgagtgacagttcaagaacgtgaagccgaagcattgaaacagaaggagctggagcaggaagcaaaacgcatggctgaggaaaggcgcaagtacacactcaagattgtcgaagaggaaaccaaaaaagagctggaagagaacaagcgatccctggctgcattggatgcactcaatactgatgatgaaaatgatgaggaggaatatgaggcatggaaagttcgagagctaaaaagaatcaagagggacagagaagatcgagaagcgcttgagaaggagaaagcagaaattgaacgcatgcgaaacctgactgaggaagagaggagagctgaacttcgggcaaacggcaaagtcattaccaacaaagctgttaagggcaaatacaagttcttacagaagtattatcaccggggtgccttcttcatggatgaggatgaagaagtatacaagagagatttcagcgctcctaccctggaggatcatttcaataaaaccattcttcctaaagtcatgcaggtcaagaactttggacgctcaggtcgcaccaaatacactcaccttgtggatcaagataccacctcctttgactcagcttggggccaagagagtgcccagaacacaaagttcttcaaacaaaaggcagctggggtacgagatgtatttgagcggccatctgccaagaagcggaaaactacctagggtccaactgcttattcttccaactgtggaacacaaggggagtctcagcatctggtccttgatttggttttttcattgtttccttggcccctgtatccagatattggacttactgctatacttgtgatactgggtagcccagactttgaaggtgctttgtgaggtttggactcatgctgagaaacccacaggaaagcactgtccaggtaggattagaggcttcccacttaaaactatttctgagaaatcttaggttttatcactgctatggtttcccatatttacttgggactgttctgactttctttttccagcccttagcttgggttagaaaagtggacatgtaagtgaacaatgcattacttctaccttaggtttaggagtaatatacccggaaatctaagctcatggaaacatgttttccatttttgcttggagtccgtttttctagttgtacatactttttgatccatatatgtgtgcatgtcaagaaataaaagaatcacacaacaaggagatttttagcatgatactggaaataaaatgtccaagctgacaagtattaattgcctattaaagtaaaagataacaattgtcaggcagaaggtgtttcacattttgataattccctttgatctcagaaacaagctcaggtactagcttggctttaggtagcatctggatttattccatgaccaaatacagatgtttttgagaagaccaaggtcttctcacatcctttaaatgtcccactggaagaatcaaatagtttagtgtcgtacgataaaaatgaatgcaaatgtcgctggccgt

SEQ ID NO: 421625 - DNA, 2016 bp, Homo sapiens
catcccacaatcctctcgtcacgtatttccggtttatctagctcagccgtaagtagtttctctatcagtcgcgcagctgtgttcgcggactcaggtggaaggaatttcttctcttcgttgacgttgctggtgttcactgtttggaattagtcaagtttcgggaatcaccgtcgctgccatcaacatgtcggtcccaagcgctctcatgaagcaaccgcccattcagtctacggctggggccgtcccagttcgcaatgagaaaggtgagatttcaatggaaaaagtgaaggtaaagcgttatgtgtccggaaaaaggccagactatgcccctatggagtcctcagatgaggaggatgaagaatttcagttcattaagaaagccaaagaacaagaagcagagcctgaggaacaggaggaggattcatccagtgacccccggctacggcgtttacagaaccgtattagtgaagatgtggaagagagattggctcgacatcgaaaaatagtggaacctgaagtggtaggagagagtgactcagaagtagaaggagatgcttggcgcatggaacgagaagacagcagtgaagaagaggaggaggaaattgatgatgaggaaatagagcggcggcgtggcatgatgcgtcagcgagcacaggagagaaaaaatgaagagatggaagtcatggaagtggaagatgagggtcgttctggagaggagtcagaatcagagtctgagtatgaagagtacacagacagtgaagatgagatggagcctcgccttaagccagtcttcattcgaaagaaggaccgagtgacagttcaagaacgtgaagccgaagcattgaaacagaaggagctggagcaggaagcaaaacgcatggctgaggaaaggcgcaagtacacactcaagattgtcgaagaggaaaccaaaaaagagctggaagagaacaagcgatccctggctgcattggatgcactcaatactgatgatgaaaatgatgaggaggaatatgaggcatggaaagttcgagagctaaaaagaatcaagagggacagagaagatcgagaagcgcttgagaaggagaaagcagaaattgaacgcatgcgaaacctgactgaggaagagaggagagctgaacttcgggcaaacggcaaagtcattaccaacaaagctgttaagggcaaatacaagttcttacagaagtattatcaccggggtgccttcttcatggatgaggatgaagaagtatacaagagagatttcagcgctcctaccctggaggatcatttcaataaaaccattcttcctaaagtcatgcaggtcaagaactttggacgctcaggtcgcaccaaatacactcaccttgtggatcaagataccacctcctttgactcagcttggggccaagagagtgcccagaacacaaagttcttcaaacaaaaggcagctggggtacgagatgtatttgagcggccatctgccaagaagcggaaaactacctagggtccaactgcttattcttccaactgtggaacacaaggggagtctcagcatctggtccttgatttggttttttcattgtttccttggcccctgtatccagatattggacttactgctatacttgtgatactgggtagcccagactttgaaggtgctttgtgaggtttggactcatgctgagaaacccacaggaaagcactgtccaggtaggattagaggcttcccacttaaaactatttctgagaaatcttaggttttatcactgctatggtttcccatatttacttgggactgttctgactttctttttccagcccttagcttgggttagaaaagtggacatgtaagtgaacaatgcattacttctaccttaggtttaggagtaatatacccggaaatctaagctcatggaaacatgttttccatttttgcttggagtccgtttttctagttgtacatactttttgatccatatatgtgtgcatgtcaagaaataaaagaatcacacaaca

SEQ ID NO: 421626 - DNA, 2060 bp, Homo sapiens
catcccacaatcctctcgtcacgtatttccggtttatctagctcagccgtaagtagtttctctatcagtcgcgcagctgtgttcgcggactcaggtggaaggaatttcttctcttcgttgacgttgctggtgttcactgtttggaattagtcaagtttcgggaatcaccgtcgctgccatcaacatgtcggtcccaagcgctctcatgaagcaaccgcccattcagtctacggctggggccgtcccagttcgcaatgagaaaggtgagatttcaatggaaaaagtgaaggtaaagcgttatgtgtccggaaaaaggccagactatgcccctatggagtcctcagatgaggaggatgaagaatttcagttcattaagaaagccaaagaacaagaagcagagcctgaggaacaggaggaggattcatccagtgacccccggctacggcgtttacagaaccgtattagtgaagatgtggaagagagattggctcgacatcgaaaaatagtggaacctgaagtggtaggagagagtgactcagaagtagaaggagatgcttggcgcatggaacgagaagacagcagtgaagaagaggaggaggaaattgatgatgaggaaatagagcggcggcgtggcatgatgcgtcagcgagcacaggagagaaaaaatgaagagatggaagtcatggaagtggaagatgagggtcgttctggagaggagtcagaatcagagtctgagtatgaagagtacacagacagtgaagatgagatggagcctcgccttaagccagtcttcattcgaaagaaggaccgagtgacagttcaagaacgtgaagccgaagcattgaaacagaaggagctggagcaggaagcaaaacgcatggctgaggaaaggcgcaagtacacactcaagattgtcgaagaggaaaccaaaaaagagctggaagagaacaagcgatccctggctgcattggatgcactcaatactgatgatgaaaatgatgaggaggaatatgaggcatggaaagttcgagagctaaaaagaatcaagagggacagagaagatcgagaagcgcttgagaaggagaaagcagaaattgaacgcatgcgaaacctgactgaggaagagaggagagctgaacttcgggcaaacggcaaagtcattaccaacaaagctgttaagggcaaatacaagttcttacagaagtattatcaccggggtgccttcttcatggatgaggatgaagaagtatacaagagagatttcagcgctcctaccctggaggatcatttcaataaaaccattcttcctaaagtcatgcaggtcaagaactttggacgctcaggtcgcaccaaatacactcaccttgtggatcaagataccacctcctttgactcagcttggggccaagagagtgcccagaacacaaagttcttcaaacaaaaggcagctggggtacgagatgtatttgagcggccatctgccaagaagcggaaaactacctagggtccaactgcttattcttccaactgtggaacacaaggggagtctcagcatctggtccttgatttggttttttcattgtttccttggcccctgtatccagatattggacttactgctatacttgtgatactgggtagcccagactttgaaggtgctttgtgaggtttggactcatgctgagaaacccacaggaaagcactgtccaggtaggattagaggcttcccacttaaaactatttctgagaaatcttaggttttatcactgctatggtttcccatatttacttgggactgttctgactttctttttccagcccttagcttgggttagaaaagtggacatgtaagtgaacaatgcattacttctaccttaggtttaggagtaatatacccggaaatctaagctcatggaaacatgttttccatttttgcttggagtccgtttttctagttgtacatactttttgatccatatatgtgtgcatgtcaagaaataaaagaatcacacaacacacgacaaagaggataaaagaacagagacataacctataaaaag

SEQ ID NO: 421627 - DNA, 1345 bp, Homo sapiens
cacgaggaagaatgtcatctcttcaactagatgtaagctcttgaagaaaggctcaataccctctgctttctctgtatcccttattgtagagtttaataaatttgtggtttgaatatataggaaataaagccacaagattgataagattttttttatacaggatgaggatgaagaagtatacaagagagatttcagcgctcctaccctggaggatcatttcaataaaaccattcttcctaaagtcatgcaggtatggggaaccttaataacatgacagagaaaagtgatgtattgatagctgaggcatggtttgtttggtggtataactcatcatccatccttccctcaggtcaagaactttggacgctcaggtcgcaccaaatacactcaccttgtggatcaagataccacctcctttgactcagcttggggccaagagagtgcccagaacacaaagttcttcaaacaaaaggcagctggggtacgagatgtatttgagcggccatctgccaagaagcggaaaactacctagggtccaactgcttattcttccaactgtggaacacaaggggagtctcagcatctggtccttgatttggttttttcattgtttccttggcccctgtatccagatattggacttactgctatacttgtgatactgggtagcccagactttgaaggtgctttgtgaggtttggactcatgctgagaaacccacaggaaagcactgtccaggtaggattagaggcttcccacttaaaactatttctgagaaatcttaggttttatcactgctatggtttcccatatttacttgggactgttctgactttctttttccagcccttagcttgggttagaaaagtggacatgtaagtgaacaatgcattacttctaccttaggtttaggagtaatatacccggaaatctaagctcatggaaacatgttttccatttttgcttggagtccgtttttctagttgtacatactttttgatccatatatgtgtgcatgtcaagaaataaaagaatcacacaacaaggagatttttagcatgatactggaaataaaatgtccaagctgacaagtattaattgcctattaaagtaaaagataacaattgtcaggcagaaggtgtttcacattttgataattccctttgatctcagaaacaagctcaggtactagcttggctttaggtagcatctggatttattccatgaccaaatacagatgtttttgagaagaccaaggtcttctcacatcctttaaatgtcccactggaagaatcaaatagtttagtgtcgtacgataaaaatgaatgcaaatgtcgctggccgt

SEQ ID NO: 421628 - DNA, 1466 bp, Homo sapiens
catcccacaatcctctcgtcacgtatttccggtttatctagctcagccgtaagtagtttctctatcagtcgcgcagctgtgttcgcggactcaggtggaaggaatttcttctcttcgttgacgttgctggtgttcactgtttggaattagtcaagtttcgggaatcaccgtcgctgccatcaacatgtcggtcccaagcgctctcatgaagcaaccgcccattcagtctacggctggggccgtcccagttcgcaatgagaaaggtgagatttcaatggaaaaagtgaaggtaaagcgttatgtgtccggaaaaaggccagactatgcccctatggagtcctcagatgaggaggatgaagaatttcagttcattaagaaagccaaagaacaagaagcagagcctgaggaacaggaggaggattcatccagtgacccccggctacggcgtttacagaaccgtattagtgaagatgtggaagagagattggctcgacatcgaaaaatagtggaacctgaagtggtaggagagagtgactcagaagtagaaggagatgcttggcgcatggaacgagaagacagcagtgaagaagaggaggaggaaattgatgatgaggaaatagagcggcggcgtggcatgatgcgtcagcgagcacaggagagaaaaaatgaagagatggaagtcatggaagtggaagatgagggtcgttctggagaggagtcagaatcagagtctgagtatgaagagtacacagacagtgaagatgagatggagcctcgccttaagccagtcttcattcgaaagaaggaccgagtgacagttcaagaacgtgaagccgaagcattgaaacagaaggagctggagcaggaagcaaaacgcatggctgaggaaaggcgcaagtacacactcaagattgtcgaagaggaaaccaaaaaagagctggaagagaacaagcgatccctggctgcattggatgcactcaatactgatgatgaaaatgatgaggaggaatatgaggcatggaaagttcgagagctaaaaagaatcaagagggacagagaagatcgagaagcgtgagtaaaaagatgagcctagagttaatgctgctaatggaacaggtttctagcaggatagctctgagactcattacctactgtgagttccattctagccaccttcagagttcttgttgctttgtgagtttcctataattggaatatgagtttcacttgctacagtgaaatcagggaagagaaaaacactttgtcgatgtgtgtccataatagagtgccagccagtgctccctttagtttcctagtagacacaaaaattagtaactgttagtagttatctcttcttgtgtacaacccaacccacaattgagtgacttgaaactataatttattacttttcacaactttggaggttggctgaacagttcctctactgatttcacctgggcttactt

SEQ ID NO: 421629 - DNA, 1113 bp, Homo sapiens
catcccacaatcctctcgtcacgtatttccggtttatctagctcagccgtaagtagtttctctatcagtcgcgcagctgtgttcgcggactcaggtggaaggaatttcttctcttcgttgacgttgctggtgttcactgtttggaattagtcaagtttcgggaatcaccgtcgctgccatcaacatgtcggtcccaagcgctctcatgaagcaaccgcccattcagtctacggctggggccgtcccagttcgcaatgagaaaggtgagatttcaatggaaaaagtgaaggtaaagcgttatgtgtccggaaaaaggccagactatgcccctatggagtcctcagatgaggaggatgaagaatttcagttcattaagaaagccaaagaacaagaagcagagcctgaggaacaggaggaggattcatccagtgacccccggctacggcgtttacagaaccgtattagtgaagatgtggaagagagattggctcgacatcgaaaaatagtggaacctgaagtggtaggagagagtgactcagaagtagaaggagatgcttggcgcatggaacgagaagacagcagtgaagaagaggaggaggaaattgatgatgaggaaatagagcggcggcgtggcatgatgcgtcagcgagcacaggagagaaaaaatgaagagatggaagtcatggaagtggaagatgagggtcgctttctggcagcaggcagctcagcacatcacgcagtctgcagctaatggaagcagctacaacagagcagctgcaagcatgcacgatggcaggccctcgccctttaaaggccaaggtcttccatgtcccggaacactaaagacacaagggaaacccccggcgaagccgttggaaccaaagggttctccccccacagggggaaaacccgcgtggcgaaccaaggggccccccggacaacaaggccccgcgacattctcgcgacataaaacaccacaggtaacccgccgggaaacgagcactcttgccgccaaggcgcacaaacgagggcgaaacaacggcccccaaccaacatcataccggtcacccacttggggcccccgttggacaacgtggcgcaaccacaaggggg

SEQ ID NO: 421630 - DNA, 611 bp, Homo sapiens
catcccacaatcctctcgtcacgtatttccggtttatctagctcagccgtaagtagtttctctatcagtcgcgcagctgtgttcgcggactcaggtggaaggaatttcttctcttcgttgacgttgctggtgttcactgtttggaattagtcaagtttcgggaatcaccgtcgctgccatcaacatgtcggtcccaagcgctctcatgaagcaaccgcccattcagtctacggctggggccgtcccagttcgcaatgagaaaggtgagatttcaatggaaaaagtgaaggtaaagcgttatgtgtccggaaaaaggccagactatgcccctatggagtcctcagatgaggaggatgaagaatttcagttcattaagaaagccaaagaacaagaagcagagcctgaggaacaggaggaggattcatccagtgacccccggctacggcgtttacagaaccgtattagtgaagatgtggaagagagattggctcgacatcgaaaaatagtggaacctgaagtggtaggagagagtgactcagaagtagaaggagatgcttggcgcatggaacgagaagacagcagtgaagagcgtgacatcatgtgtccggctc

SEQ ID NO: 421631 - DNA, 635 bp, Homo sapiens
agtttctctatcagtcgcgcagctgtgttcgcggactcaggtggaaggaatttcttctcttcgttgacgttgctggtgttcactgtttggaattagtcaagtttcgggaatcaccgtcgctgccatcaacatgtcggtcccaagcgctctcatgaagcaaccgcccattcagtctacggctggggccgtcccagttcgcaatgagaaaggtacggtgctaacaccctcttcccagtcgaattttaaccccttccggccccagcaacctccagacctctcccggacagaccactccaaccccgccagctcttgagatctggctgccagattcttcgatctttccacccccacccacttgcatccgatcttgttcctgtggcctgctctcgtattcagcaagcacctctcttctgttagcctccacaaattccttagactaatgttacatatatataatatatattacacatataaaaacattaggaacttaagtatatatcagaatatatatgtctaatatatatatgctagaatatatgtattagtctaatatatattatgattagaatataatatcactaattacatataattacaagaatttatgtattattagtgtaattacttaggaactt

SEQ ID NO: 421632 - DNA, 2326 bp, Homo sapiens
aaaattaggaaattgcgactaccttgagtgcctttctgtcactatgtcctctctccccgtagtagtttctctatcagtcgcgcagctgtgttcgcggactcaggtggaaggaatttcttctcttcgttgacgttgctggtgttcactgtttggaattagtcaagtttcgggaatcaccgtcgctgccatcaacatgtcggtcccaagcgctctcatgaagcaaccgcccattcagtctacggctggggccgtcccagttcgcaatgagaaaggtgagatttcaatggaaaaagtgaaggtaaagcgttatgtgtccggaaaaaggccagactatgcccctatggagtcctcagatgaggaggatgaagaatttcagttcattaagaaagccaaagaacaagaagcagagcctgaggaacaggaggaggattcatccagtgacccccggctacggcgtttacagaaccgtattagtgaagatgtggaagagagattggctcgacatcgaaaaatagtggaacctgaagtggtaggagagagtgactcagaagtagaaggagatgcttggcgcatggaacgagaagacagcagtgaagaagaggaggaggaaattgatgatgaggaaatagagcggcggcgtggcatgatgcgtcagcgagcacaggagagaaaaaatgaagagatggaagtcatggaagtggaagatgagggtcgttctggagaggagtcagaatcagagtctgagtatgaagagtacacagacagtgaagatgagatggagcctcgccttaagccagtcttcattcgaaagaaggaccgagtgacagttcaagaacgtgaagccgaagcattgaaacagaaggagctggagcaggaagcaaaacgcatggctgaggaaaggcgcaagtacacactcaagattgtcgaagaggaaaccaaaaaagagctggaagagaacaagcgatccctggctgcattggatgcactcaatactgatgatgaaaatgatgaggaggaatatgaggcatggaaagttcgagagctaaaaagaatcaagagggacagagaagatcgagaagcgcttgagaaggagaaagcagaaattgaacgcatgcgaaacctgactgaggaagagaggagagctgaacttcgggcaaacggcaaagtcattaccaacaaagctgttaagggcaaatacaagttcttacagaagtattatcaccggggtgccttcttcatggatgaggatgaagaagtatacaagagagatttcagcgctcctaccctggaggatcatttcaataaaaccattcttcctaaagtcatgcaggtcaagaactttggacgctcaggtcgcaccaaatacactcaccttgtggatcaagataccacctcctttgactcagcttggggccaagagagtgcccagaacacaaagttcttcaaacaaaaggcagctggggtacgagatgtatttgagcggccatctgccaagaagcggaaaactacctagggtccaactgcttattcttccaactgtggaacacaaggggagtctcagcatctggtccttgatttggttttttcattgtttccttggcccctgtatccagatattggacttactgctatacttgtgatactgggtagcccagactttgaaggtgctttgtgaggtttggactcatgctgagaaacccacaggaaagcactgtccaggtaggattagaggcttcccacttaaaactatttctgagaaatcttaggttttatcactgctatggtttcccatatttacttgggactgttctgactttctttttccagcccttagcttgggttagaaaagtggacatgtaagtgaacaatgcattacttctaccttaggtttaggagtaatatacccggaaatctaagctcatggaaacatgttttccatttttgcttggagtccgtttttctagttgtacatactttttgatccatatatgtgtgcatgtcaagaaataaaagaatcacacaacaaggagatttttagcatgatactggaaataaaatgtccaagctgacaagtattaattgcctattaaagtaaaagataacaattgtcaggcagaaggtgtttcacattttgataattccctttgatctcagaaacaagctcaggtactagcttggctttaggtagcatctggatttattccatgaccaaatacagatgtttttgagaagaccaaggtcttctcacatcctttaaatgtcccactggaagaatcaaatagtttagtgtcgtacgataaaaatgaatgcaaatgtcgctggccgt

SEQ ID NO: 421633 - DNA, 1555 bp, Homo sapiens
tttaaagctaagaagaccttttagggaaagagaatttgtaatgttggaaaacccagcagtaatagtatgtctgaacgtcagaagggctagaattaacttttgaaagttggcaatacctagtctagcaaacataatgaagactaactcacccatttgtttattgagctccttatcttgattcctaataggcaatgactagaattaaagaaggtgactaatacttgaaatgacatgggactgttattttcagataatttggtctttctgaagctgtaacagtaccaataaattgttttgctccctggacaggcttgagaaggagaaagcagaaattgaacgcatgcgaaacctgactgaggaagagaggagagctgaacttcgggcaaacggcaaagtcattaccaacaaagctgttaagggcaaatacaagttcttacagaagtattatcaccggggtgccttcttcatggatgaggatgaagaagtatacaagagagatttcagcgctcctaccctggaggatcatttcaataaaaccattcttcctaaagtcatgcaggtcaagaactttggacgctcaggtcgcaccaaatacactcaccttgtggatcaagataccacctcctttgactcagcttggggccaagagagtgcccagaacacaaagttcttcaaacaaaaggcagctggggtacgagatgtatttgagcggccatctgccaagaagcggaaaactacctagggtccaactgcttattcttccaactgtggaacacaaggggagtctcagcatctggtccttgatttggttttttcattgtttccttggcccctgtatccagatattggacttactgctatacttgtgatactgggtagcccagactttgaaggtgctttgtgaggtttggactcatgctgagaaacccacaggaaagcactgtccaggtaggattagaggcttcccacttaaaactatttctgagaaatcttaggttttatcactgctatggtttcccatatttacttgggactgttctgactttctttttccagcccttagcttgggttagaaaagtggacatgtaagtgaacaatgcattacttctaccttaggtttaggagtaatatacccggaaatctaagctcatggaaacatgttttccatttttgcttggagtccgtttttctagttgtacatactttttgatccatatatgtgtgcatgtcaagaaataaaagaatcacacaacaaggagatttttagcatgatactggaaataaaatgtccaagctgacaagtattaattgcctattaaagtaaaagataacaattgtcaggcagaaggtgtttcacattttgataattccctttgatctcagaaacaagctcaggtactagcttggctttaggtagcatctggatttattccatgaccaaatacagatgtttttgagaagaccaaggtcttctcacatcctttaaatgtcccactggaagaatcaaatagtttagtgtcgtacgataaaaatgaatgcaaatgtcgctggccgt

SEQ ID NO: 421634 - DNA, 1532 bp, Homo sapiens
catcccacaatcctctcgtcacgtatttccggtttatctagctcagccgtaagtagtttctctatcagtcgcgcagctgtgttcgcggactcaggtggaaggaatttcttctcttcgttgacgttgctggtgttcactgtttggaattagtcaagtttcgggaatcaccgtcgctgccatcaacatgtcggtcccaagcgctctcatgaagcaaccgcccattcagtctacggctggggccgtcccagttcgcaatgagaaaggtgagatttcaatggaaaaagtgaaggtaaagcgttatgtgtccggaaaaaggccagactatgcccctatggagtcctcagatgaggaggatgaagaatttcagttcattaagaaagccaaagaacaagaagcagagcctgaggaacaggaggaggattcatccagtgacccccggctacggcgtttacagaaccgtattagtgaagatgtggaagagagattggctcgacatcgaaaaatagtggaacctgaagtggtaggagagagtgactcagaagtagaaggagatgcttggcgcatggaacgagaagacagcagtgaagaagaggaggaggaaattgatgatgaggaaatagagcggcggcgtggcatgatgcgtcagcgagcacaggagagaaaaaatgaagagatggaagtcatggaagtggaagatgagggtcgttctggagaggagtcagaatcagagtctgagtatgaagagtacacagacagtgaagatgagatggagcctcgccttaagccagtcttcattcgaaagaaggaccgagtgacagttcaagaacgtgaagccgaagcattgaaacagaaggagctggagcaggaagcaaaacgcatggctgaggaaaggcgcaagtacacactcaagattgtcgaagaggaaaccaaaaaagagctggaagagaacaagcgatccctggctgcattggatgcactcaatactgatgatgaaaatgatgaggaggaatatgaggcatggaaagttcgagagctaaaaagaatcaagagggacagagaagatcgagaagcgcttgagaaggagaaagcagaaattgaacgcatgcgaaacctgactgaggaagagaggagagctgaacttcgggcaaacggcaaagtcattaccaacaaagctgttaagggcaaatacaagttcttacagaagtattatcaccggggtgccttcttcatggtaagaagtgaaaagagagtcagaaaattgggcagtaggaataactcagaaactttgaattatttttctcttcaagaatattctggaatgtaatttccacttgccagtggtcagctttctcatttgctttttccttctgaacaatataaactcagagaaaagcatcagcaattggatgacagaagtagcatcaactgttctctcttttggccccaactctcaaaaataggaaatgatgtaatagactttttttttttttttaagagacagagtctcgctgtcacccaggctggggtacggt

SEQ ID NO: 421635 - DNA, 635 bp, Homo sapiens
catcccacaatcctctcgtcacgtatttccggtttatctagctcagccgtaagtagtttctctatcagtcgcgcagctgtgttcgcggactcaggtggaaggaatttcttctcttcgttgacgttgctggtgttcactgtttggaattagtcaagtttcgggaatcaccgtcgctgccatcaacatgtcggtcccaagcgctctcatgaagcaaccgcccattcagtctacggctggggccgtcccagttcgcaatgagaaaggtgagatttcaatggaaaaagtgaaggtaaagcgttatgtgtccggaaaaaggccagactatgcccctatggagtcctcagatgaggaggatgaagaatttcagttcattaagaaagccaaagaacaagaagcagagcctgaggaacaggaggaggattcatccagtgacccccggctacggcgtttacagaaccgtattagtgaagatgtggaagagagattggctcgacatcgaaaaatagtggaacctgaagtggtaggagagagtgactcagaagtagaaggagatgcttggcgcatggaacgagaagacagcagtgaagaagaggaggaggaaattgatgatgagtcgcgctggaccgctcgatcac

SEQ ID NO: 421636 - DNA, 367 bp, Homo sapiens
ctaaattacggccgcgtcgacttttttttgagatggagtctcgctttgttgcccagactggagggcagtggcgcgatctcggctcactgcaacctctgcctcccgggttcaagcagttctgcctcagcctcccaagtagctgtgactaaaggtgcacgccgccatgcccagctaattttttgtattttagtagagacggggtttcaccgtgttgcccaggctgctctcagaactcctgagctcaggcagtccaccgcctcggcctaccgaagtgctaggattacagacgtaagccaccgagcctggtctagtttgcattttttttctatcagttttataagttaagaaataaaaggaattaatgtta

SEQ ID NO: 421637 - DNA, 1340 bp, Homo sapiens
ccttttcccggcgtccatttagtggcgggaaaagcgaccttttctgagcgcgtttgcctgttgagtggtagcctttcccctcaaccagcaatggaggagcagccccagatgcaagacgccgacgagcccgcggactccggaggggaaggccgggcaggcgggccaccgcaggtcgccggcgcccaggcggcgtgcagcgaggaccgcatgaccctgctcctcaggctgagagcacagacaaaacaacaactcttagaatataaatcaatggttgatgcaagtgaagaaaaaactccagaacaaattatgcaagaaaagcaaatcgaagctaaaattgaagacctggaaaatgaaattgaagaggtaaaagttgcttttgagataaaaaagcttgcattagacaggatgagactttcaactgcacttaaaaaaaacctggagaaaattagcagacagtctagtgtgctcatggataacatgaaacacctattagagctaaataaattaataatgaaatcacagcagaattaaaacaagcttcagaaagtaagcttttagaaatacagactgaaaagaacaaacagaagattgatttggacagtatggaaaactcagagaggataaagatcatacgacaaaacctacagatggagataaaaattactactgttattcaacatgtgttccagaaccttattttggggagtaaagtcaattgggcagaggatcctgcccttaaggaaattgttctgcagcttgagaagaatgttgacatgatgtaataagaattcatttctgacatattttacatttctggcaatctcaactcttatttggaatacttctgtgcatttgtctgtccaccgtaattttagaaaagcatatccataacgtttacagttgtagtacagttgtggttagttatttgtagtgggattgaaagtaatttttttctttttatatttctatatttagtttgtttttttgttgttgttgttttttgagatggagtctcgctttgttgcccagactggagggcagtggcgcgatctcggctcactgcaacctctgcctcccgggttcaagcagttctgcctcagcctcccaagtagctgtgactaaaggtgcacgccgccatgcccagctaattttttgtattttagtagagacggggtttcaccgtgttgcccaggctgctctcagaactcctgagctcaggcagtccaccgcctcggcctaccgaagtgctaggattacagacgtaagccaccgagcctggtctagtttgcattttttttctatcagttttataagttaagaaataaaaggaattaatgtta

SEQ ID NO: 421638 - DNA, 1392 bp, Homo sapiens
ccttttcccggcgtccatttagtggcgggaaaagcgaccttttctgagcgcgtttgcctgttgagtggtagcctttcccctcaaccagcaatggaggagcagccccagatgcaagacgccgacgagcccgcggactccggaggggaaggccgggcaggcgggccaccgcaggtcgccggcgcccaggcggcgtgcagcgaggaccgcatgaccctgctcctcaggctgagagcacagacaaaacaacaactcttagaatataaatcaatggttgatgcaagtgaagaaaaaactccagaacaaattatgcaagaaaagcaaatcgaagctaaaattgaagacctggaaaatgaaattgaagaggtaaaagttgcttttgagataaaaaagcttgcattagacaggatgagactttcaactgcacttaaaaaaaacctggagaaaattagcagacagtctagtgtgctcatggataacatgaaacacctattagagctaaataaattaataatgaaatcacagcaggaatcttgggatttagaggaaaaactgcttgatattagaaagaagagattgcaattaaaacaagcttcagaaagtaagcttttagaaatacagactgaaaagaacaaacagaagattgatttggacagtatggaaaactcagagaggataaagatcatacgacaaaacctacagatggagataaaaattactactgttattcaacatgtgttccagaaccttattttggggagtaaagtcaattgggcagaggatcctgcccttaaggaaattgttctgcagcttgagaagaatgttgacatgatgtaataagaattcatttctgacatattttacatttctggcaatctcaactcttatttggaatacttctgtgcatttgtctgtccaccgtaattttagaaaagcatatccataacgtttacagttgtagtacagttgtggttagttatttgtagtgggattgaaagtaatttttttctttttatatttctatatttagtttgtttttttgttgttgttgttttttgagatggagtctcgctttgttgcccagactggagggcagtggcgcgatctcggctcactgcaacctctgcctcccgggttcaagcagttctgcctcagcctcccaagtagctgtgactaaaggtgcacgccgccatgcccagctaattttttgtattttagtagagacggggtttcaccgtgttgcccaggctgctctcagaactcctgagctcaggcagtccaccgcctcggcctaccgaagtgctaggattacagacgtaagccaccgagcctggtctagtttgcattttttttctatcagttttataagttaagaaataaaaggaattaatgtta

SEQ ID NO: 421639 - DNA, 722 bp, Homo sapiens
ccttttcccggcgtccatttagtggcgggaaaagcgaccttttctgagcgcgtttgcctgttgagtggtagcctttcccctcaaccagcaatggaggagcagccccagatgcaagacgccgacgagcccgcggactccggaggggaaggccgggcaggcgggccaccgcaggtcgccggcgcccaggcggcgtgcagcgaggaccgcatgaccctgctcctcaggctgagagcacagacaaaacaacaactcttagaatataaatcaatggttgatgcaagtgaagaaaaaactccagaacaaattatgcaagaaaagcaaatcgaagctaaaattgaagacctggaaaatgaaattgaagaggtaaaagttgcttttgagataaaaaagcttgcattagacaggatgagactttcaactgcacttaaaaaaaacctggagaaaattagcagacagtctagtgtgctcatggataacatgaaacacctattagagctaaataaattaataatgaaatcacagcaggaatcttgggatttagaggaaaaactgcttgatattagaaagaagagattgcgtatgtagaacactttttttttggcagaacacattttgcttactttatagattgataaggccagatctcttagccactgagaaatttcctaatttccgacttccaaaattccttaaaatttttgacatggcaacttaaaaagtga

SEQ ID NO: 421640 - DNA, 584 bp, Homo sapiens
gcacccaccaccgtgcccagctaattgtttgtaattttagtagagatgggctttcaccatgttggccagactggtcttgaattcctgacctcaggtgatccgccctcctctgcctcccagagtgctaggattacaggcgtgagccaccatgcctggcccatgctccttctttgtaagaaaatttcaaacccgcatttatataaattggctagaatttaaattgcatagccacactttagccataagacaggttgcggaaataatggtcattactctaggtgttaatagctgttaaggaaaaaaaaaatcaacattctgtcagtagaaatgagaaagtagaaatacactttgggacacatctaattcagtcataattttggaacagagtctgctaaatagagcagaaatataattatcaacttttctgctaaataaaattcaagttttatttcttgcttagggagaacctctcagactgtgtttttcctctgctgtcacatcacaataatcatcaacaaagaagtctgtaagagcaaactgctggtttaaaaaaaaccatttttttcaataaaattaaaaaaaaa

SEQ ID NO: 421641 - DNA, 472 bp, Homo sapiens
tcttgccaagctgcactgcagctgggggtcggggtggggagggtcatatccccagactccttgaagctgttgtcactccactctcctaggcgctgtcctgggctggctgatgactccccgagtgcctatggagcgggagctaagcttctatgggttgactgcactggccctcatgctaggcaccagcctcatctattggaccctctttacactgggcctggatctttcttggtaagtcccgcccagaggttccagggagaagaccaggccaccgcccactgcccggcgtcggggaggaaagaggaggagcctctgtgtgcccacatctctggccgcccagggcagctcggctcggtctcgcaaccccagcccactggttcgggagacctcaaaggctccaccgccagcgcccccagcgctcactgtgtgcgccccaccccagccctgccgttatagatcgcgagcggccgct

SEQ ID NO: 421642 - DNA, 2556 bp, Homo sapiens
cgcaggaggaaacagtaccggctggaggccggtcttgcaggagcgggggactgctgggggcggggcttggtggtgaccgctggcggggcggggcctggggctcagaggggtgggctttggagatcagagggtcgacgctgcttcgttgcctggactctggtttccgccctggagcaagccggggcctggtcggcagctgggccgccatggagtccacgctgggcgcgggcatcgtgatagccgaggcgctacagaaccagctagcctggctggagaacgtgtggctctggatcacctttctgggcgatcccaagatcctctttctgttctacttccccgcggcctactacgcctcccgccgtgtgggcatcgcggtgctctggatcagcctcatcaccgagtggctcaacctcatcttcaagtggtttctttttggagacaggcccttttggtgggtccatgagtctggttactacagccaggctccagcccaggttcaccagttcccctcttcttgtgagactggtccaggcagcccttctggacactgcatgatcacaggagcagccctctggcccataatgacggccctgtcttcgcaggtggccactcgggcccgcagccgctgggtaagggtgatgcctagcctggcttattgcaccttccttttggcggttggcttgtcgcgaatcttcatcttagcacatttccctcaccaggtgctggctggcctaataactggcgctgtcctgggctggctgatgactccccgagtgcctatggagcgggagctaagcttctatgggttgactgcactggccctcatgctaggcaccagcctcatctattggaccctctttacactgggcctggatctttcttggtccatcagcctagccttcaagtggtgtgagcggcctgagtggatacacgtggatagccggccctttgcctccctgagccgtgactcaggggctgccctgggcctgggcattgccttgcactctccctgctatgcccaggtgcgtcgggcacagctgggaaatggccagaagatagcctgccttgtgctggccatggggctgctgggccccctggactggctgggccacccccctcagatcagcctcttctacattttcaatttcctcaagtacaccctctggccatgcctagtcctggccctcgtgccctgggcagtgcacatgttcagtgcccaggaagcaccgcccatccactcttcctgacttcttgtgtgcctccctttcctttccctcccacaaagccaacactctgtgaccaccacactccaggaggcagccccatccccttccagcccctaagtaggccctcccctccctaaatctgcttccgcaccacctggtcttagccccaaagatgggccttctctctcccagataagttggtcctccctctgcctttcctctcaagcccccaaagagcaaaggcaacagcaagaccagcgggttcttgcaacactgtgaggggcagccagggcggccccaataaagcccttgaatactttgaaaaaaaaaaaaaaaaaaaaaaaaaaaaaaaaaacaaaaaaaaagagggcggcgcgcgagcacaaagagaatccactccaggagggggccaaaaagaaaacgcgaacacacccacgcatcttggaccaaaaggggaccctataataagagacagcactataacgagacacagagagaccacccggccccgcaatacgcaaacgccgagcgcacagaacagcgagcgcgaccaacacccgccgacacccggaacaacaagcggcgacgagagaccaagacaacagagagggaggcacacaacagtcggcgacaaacacaccaacagcgagaactacacaaccacctcagagggcacacactaatcccaatgccaaacggggtgaacacggcgggtcaacaaccaaaaagaagaaaaagagacaagaagggaccaaaaacacagcgcacaccacgaggagaagacgaaacagcaaacagcatccaaccagcaggcaaccacaaaaatcaaacacacggaccaaacacaaaccacacccacacacacaacgcgaaaaacagaagaaagaaccataccgccacgacacagcgacaacgcagagcagacacacacaccaccaacagagaacgaagcacacacgcaccaccccagccgcacccaggagacaacaagacaaaaaaaagacaggagaggcagggaggcagacagcaaccgagccaccgcaccacgagcaagaccacacagcgaagaacaaaaacgacaacgcaaaaggcgaagacgaagagaccaaataaacgaaagaacaagagagtcaaaaagaaagcagaaagagcaccgaaaccacccaacgcgacagcgcgacacggccgacgaacaggagcgaaagaccaggaccccacgacgcaagcagacacacaaagcgagacacgagagacagacgagcccgacgcgaacgcaagacgagaaaggaagaacagaagcgacaaacacagaaaaacagagcaaaacacc

SEQ ID NO: 421643 - DNA, 1742 bp, Homo sapiens
cgcaggaggaaacagtaccggctggaggccggtcttgcaggagcgggggactgctgggggcggggcttggtggtgaccgctggcggggcggggcctggggctcagaggggtgggctttggagatcagagggtcgacgctgcttcgttgcctggactctggtttccgccctggagcaagccggggcctggtcggcagctgggccgccatggagtccacgctgggcgcgggcatcgtgatagccgaggcgctacagaaccagctagcctggctggagaacgtgtggctctggatcacctttctgggcgatcccaagatcctctttctgttctacttccccgcggcctactacgcctcccgccgtgtgggcatcgcggtgctctggatcagcctcatcaccgagtggctcaacctcatcttcaagtgaagcatgctttgtgctgggcatcacggtagctgctaaggacagagacaccttgcagattaaggtgtggtccctggaccatgcccaacggcataggcagcacttgaaaactggctaaaaacgcagactctcaggccccgggccagagctactgaatcaaaatctgcattttaacaaggttcccaggtgattccctgtttctttttggagacaggcccttttggtgggtccatgagtctggttactacagccaggctccagcccaggttcaccagttcccctcttcttgtgagactggtccaggcagcccttctggacactgcatgatcacaggagcagccctctggcccataatgacggccctgtcttcgcaggtggccactcgggcccgcagccgctgggtaagggtgatgcctagcctggcttattgcaccttccttttggcggttggcttgtcgcgaatcttcatcttagcacatttccctcaccaggtgctggctggcctaataactggcgctgtcctgggctggctgatgactccccgagtgcctatggagcgggagctaagcttctatgggttgactgcactggccctcatgctaggcaccagcctcatctattggaccctctttacactgggcctggatctttcttggtccatcagcctagccttcaagtggtgtgagcggcctgagtggatacacgtggatagccggccctttgcctccctgagccgtgactcaggggctgccctgggcctgggcattgccttgcactctccctgctatgcccaggtgcgtcgggcacagctgggaaatggccagaagatagcctgccttgtgctggccatggggctgctgggccccctggactggctgggccacccccctcagatcagcctcttctacattttcaatttcctcaagtacaccctctggccatgcctagtcctggccctcgtgccctgggcagtgcacatgttcagtgcccaggaagcaccgcccatccactcttcctgacttcttgtgtgcctccctttcctttccctcccacaaagccaacactctgtgaccaccacactccaggaggcagccccatccccttccagcccctaagtaggccctcccctccctaaatctgcttccgcaccacctggtcttagccccaaagatgggccttctctctcccagataagttggtcctccctctgcctttcctctcaagcccccaaagagcaaaggcaacagcaagaccagcgggttcttgcaacactgtgaggggcagccagggcggccccaataaagcccttgaatactttga

SEQ ID NO: 421644 - DNA, 1075 bp, Homo sapiens
cacattactcgacttcaaaccatactatgaggctacggtgaccaaaacaacatggtgctggtacaaaaacaggcacatagaacaatggaacaaagtagacagcccataatgacggccctgtcttcgcaggtggccactcgggcccgcagccgctgggtaagggtgatgcctagcctggcttattgcaccttccttttggcggttggcttgtcgcgaatcttcatcttagcacatttccctcaccaggtgctggctggcctaataactggcgctgtcctgggctggctgatgactccccgagtgcctatggagcgggagctaagcttctatgggttgactgcactggccctcatgctaggcaccagcctcatctattggaccctctttacactgggcctggatctttcttggtccatcagcctagccttcaagtggtgtgagcggcctgagtggatacacgtggatagccggccctttgcctccctgagccgtgactcaggggctgccctgggcctgggcattgccttgcactctccctgctatgcccaggtgcgtcgggcacagctgggaaatggccagaagatagcctgccttgtgctggccatggggctgctgggccccctggactggctgggccacccccctcagatcagcctcttctacattttcaatttcctcaagtacaccctctggccatgcctagtcctggccctcgtgccctgggcagtgcacatgttcagtgcccaggaagcaccgcccatccactcttcctgacttcttgtgtgcctccctttcctttccctcccacaaagccaacactctgtgaccaccacactccaggaggcagccccatccccttccagcccctaagtaggccctcccctccctaaatctgcttccgcaccacctggtcttagccccaaagatgggccttctctctcccagataagttggtcctccctctgcctttcctctcaagcccccaaagagcaaaggcaacagcaagaccagcgggttcttgcaacactgtgaggggcagccagggcggccccaataaagcccttgaatactttga

SEQ ID NO: 421645 - DNA, 1429 bp, Homo sapiens
cgcaggaggaaacagtaccggctggaggccggtcttgcaggagcgggggactgctgggggcggggcttggtggtgaccgctggcggggcggggcctggggctcagaggggtgggctttggagatcagagggtcgacgctgcttcgttgcctggactctggtttccgccctggagcaagccggggcctggtcggcagctgggccgccatggagtccacgctgggcgcgggcatcgtgatagccgaggcgctacagaaccagctagcctggctggagaacgtgtggctctggatcacctttctgggcgatcccaagatcctctttctgttctacttccccgcggcctactacgcctcccgccgtgtgggcatcgcggtgctctggatcagcctcatcaccgagtggctcaacctcatcttcaagtggtttctttttggagacaggcccttttggtgggtccatgagtctggttactacagccaggctccagcccaggttcaccagttcccctcttcttgtgagactggtccaggcagcccttctggacactgcatgatcacaggagcagccctctggcccataatgacggccctgtcttcgcaggtggccactcgggcccgcaggcgctgtcctgggctggctgatgactccccgagtgcctatggagcgggagctaagcttctatgggttgactgcactggccctcatgctaggcaccagcctcatctattggaccctctttacactgggcctggatctttcttggtccatcagcctagccttcaagtggtgtgagcggcctgagtggatacacgtggatagccggccctttgcctccctgagccgtgactcaggggctgccctgggcctgggcattgccttgcactctccctgctatgcccaggtgcgtcgggcacagctgggaaatggccagaagatagcctgccttgtgctggccatggggctgctgggccccctggactggctgggccacccccctcagatcagcctcttctacattttcaatttcctcaagtacaccctctggccatgcctagtcctggccctcgtgccctgggcagtgcacatgttcagtgcccaggaagcaccgcccatccactcttcctgacttcttgtgtgcctccctttcctttccctcccacaaagccaacactctgtgaccaccacactccaggaggcagccccatccccttccagcccctaagtaggccctcccctccctaaatctgcttccgcaccacctggtcttagccccaaagatgggccttctctctcccagataagttggtcctccctctgcctttcctctcaagcccccaaagagcaaaggcaacagcaagaccagcgggttcttgcaacactgtgaggggcagccagggcggccccaataaagcccttgaatactttga

SEQ ID NO: 421646 - DNA, 1098 bp, Homo sapiens
cgcaggaggaaacagtaccggctggaggccggtcttgcaggagcgggggactgctgggggcggggcttggtggtgaccgctggcggggcggggcctggggctcagaggggtgggctttggagatcagagggtcgacgctgcttcgttgcctggactctggtttccgccctggagcaagccggggcctggtcggcagctgggccgccatggagtccacgctgggcgcgggcatcgtgatagccgaggcgctacagaaccagctagcctggctggagaacgtgtggctctggatcacctttctgggcgatcccaagatcctctttctgttctacttccccgcggcctactacgcctcccgccgtgtgggcatcgcggtgctctggatcagcctcatctattggaccctctttacactgggcctggatctttcttggtccatcagcctagccttcaagtggtgtgagcggcctgagtggatacacgtggatagccggccctttgcctccctgagccgtgactcaggggctgccctgggcctgggcattgccttgcactctccctgctatgcccaggtgcgtcgggcacagctgggaaatggccagaagatagcctgccttgtgctggccatggggctgctgggccccctggactggctgggccacccccctcagatcagcctcttctacattttcaatttcctcaagtacaccctctggccatgcctagtcctggccctcgtgccctgggcagtgcacatgttcagtgcccaggaagcaccgcccatccactcttcctgacttcttgtgtgcctccctttcctttccctcccacaaagccaacactctgtgaccaccacactccaggaggcagccccatccccttccagcccctaagtaggccctcccctccctaaatctgcttccgcaccacctggtcttagccccaaagatgggccttctctctcccagataagttggtcctccctctgcctttcctctcaagcccccaaagagcaaaggcaacagcaagaccagcgggttcttgcaacactgtgaggggcagccagggcggccccaataaagcccttgaatactttga

SEQ ID NO: 421647 - DNA, 439 bp, Homo sapiens
cgcaggaggaaacagtaccggctggaggccggtcttgcaggagcgggggactgctgggggcggggcttggtggtgaccgctgcctgggcagtgcacatgttcagtgcccaggaagcaccgcccatccactcttcctgacttcttgtgtgcctccctttcctttccctcccacaaagccaacactctgtgaccaccacactccaggaggcagccccatccccttccagcccctaagtaggccctcccctccctaaatctgcttccgcaccacctggtcttagccccaaagatgggccttctctctcccagataagttggtcctccctctgcctttcctctcaagcccccaaagagcaaaggcaacagcaagaccagcgggttcttgcaacactgtgaggggcagccagggcggccccaataaagcccttgaatactttga

SEQ ID NO: 421648 - DNA, 1548 bp, Homo sapiens
cgcaggaggaaacagtaccggctggaggccggtcttgcaggagcgggggactgctgggggcggggcttggtggtgaccgctggcggggcggggcctggggctcagaggggtgggctttggagatcagagggtcgacgctgcttcgttgcctggactctggtttccgccctggagcaagccggggcctggtcggcagctgggccgccatggagtccacgctgggcgcgggcatcgtgatagccgaggcgctacagaaccagctagcctggctggagaacgtgtggctctggatcacctttctgggcgatcccaagatcctctttctgttctacttccccgcggcctactacgcctcccgccgtgtgggcatcgcggtgctctggatcagcctcatcaccgagtggctcaacctcatcttcaagtggtttctttttggagacaggcccttttggtgggtccatgagtctggttactacagccaggctccagcccaggttcaccagttcccctcttcttgtgagactggtccaggcagcccttctggacactgcatgatcacaggagcagccctctggcccataatgacggccctgtcttcgcaggtggccactcgggcccgcagccgctgggtaagggtgatgcctagcctggcttattgcaccttccttttggcggttggcttgtcgcgaatcttcatcttagcacatttccctcaccaggtgctggctggcctaataactggcgctgtcctgggctggctgatgactccccgagtgcctatggagcgggagctaagcttctatgggttgactgcactggccctcatgctaggcaccagcctcatctattggaccctctttacactgggcctggatctttcttggtccatcagcctagccttcaagtggtgtgagcggcctgagtggatacacgtggatagccggccctttgcctccctgagccgtgactcaggggctgccctgggcctgggcattgccttgcactctccctgctatgcccaggtgcgtcgggcacagctgggaaatggccagaagatagcctgccttgtgctggccatggggctgctgggccccctggactggctgggccacccccctcagatcagcctcttctacattttcaatttcctcaagtacaccctctggccatgcctagtcctggccctcgtgccctgggcagtgcacatgttcagtgcccaggaagcaccgcccatccactcttcctgacttcttgtgtgcctccctttcctttccctcccacaaagccaacactctgtgaccaccacactccaggaggcagccccatccccttccagcccctaagtaggccctcccctccctaaatctgcttccgcaccacctggtcttagccccaaagatgggccttctctctcccagataagttggtcctccctctgcctttcctctcaagcccccaaagagcaaaggcaacagcaagaccagcgggttcttgcaacactgtgaggggcagccagggcggccccaataaagcccttgaatactttga

SEQ ID NO: 421649 - DNA, 1607 bp, Homo sapiens
cgcaggaggaaacagtaccggctggaggccggtcttgcaggagcgggggactgctgggggcggggcttggtggtgaccgctggcggggcggggcctggggctcagaggggtgggctttggagatcagagggtcgacgctgcttcgttgcctggactctggtttccgccctggagcaagccggggcctggtcggcagctgggccgccatggagtccacgctgggcgcgggcatcgtgatagccgaggcgctacagaaccagctagcctggctggagaacgtgtggctctggatcacctttctgggcgatcccaagatcctctttctgttctacttccccgcggcctactacgcctcccgccgtgtgggcatcgcggtgctctggatcagcctcatcaccgagtggctcaacctcatcttcaagtggtgagacagagaagccctccggcatcctggtccccacccccgagggccctgagtcatgtgtttctttttggagacaggcccttttggtgggtccatgagtctggttactacagccaggctccagcccaggttcaccagttcccctcttcttgtgagactggtccaggcagcccttctggacactgcatgatcacaggagcagccctctggcccataatgacggccctgtcttcgcaggtggccactcgggcccgcagccgctgggtaagggtgatgcctagcctggcttattgcaccttccttttggcggttggcttgtcgcgaatcttcatcttagcacatttccctcaccaggtgctggctggcctaataactggcgctgtcctgggctggctgatgactccccgagtgcctatggagcgggagctaagcttctatgggttgactgcactggccctcatgctaggcaccagcctcatctattggaccctctttacactgggcctggatctttcttggtccatcagcctagccttcaagtggtgtgagcggcctgagtggatacacgtggatagccggccctttgcctccctgagccgtgactcaggggctgccctgggcctgggcattgccttgcactctccctgctatgcccaggtgcgtcgggcacagctgggaaatggccagaagatagcctgccttgtgctggccatggggctgctgggccccctggactggctgggccacccccctcagatcagcctcttctacattttcaatttcctcaagtacaccctctggccatgcctagtcctggccctcgtgccctgggcagtgcacatgttcagtgcccaggaagcaccgcccatccactcttcctgacttcttgtgtgcctccctttcctttccctcccacaaagccaacactctgtgaccaccacactccaggaggcagccccatccccttccagcccctaagtaggccctcccctccctaaatctgcttccgcaccacctggtcttagccccaaagatgggccttctctctcccagataagttggtcctccctctgcctttcctctcaagcccccaaagagcaaaggcaacagcaagaccagcgggttcttgcaacactgtgaggggcagccagggcggccccaataaagcccttgaatactttga

SEQ ID NO: 421650 - DNA, 1801 bp, Homo sapiens
cgcaggaggaaacagtaccggctggaggccggtcttgcaggagcgggggactgctgggggcggggcttggtggtgaccgctggcggggcggggcctggggctcagaggggtgggctttggagatcagagggtcgacgctgcttcgttgcctggactctggtttccgccctggagcaagccggggcctggtcggcagctgggccgccatggagtccacgctgggcgcgggcatcgtgatagccgaggcgctacagaaccagctagcctggctggagaacgtgtggctctggatcacctttctgggcgatcccaagatcctctttctgttctacttccccgcggcctactacgcctcccgccgtgtgggcatcgcggtgctctggatcagcctcatcaccgagtggctcaacctcatcttcaagtggtgagacagagaagccctccggcatcctggtccccacccccgagggccctgagtcatgtaagcatgctttgtgctgggcatcacggtagctgctaaggacagagacaccttgcagattaaggtgtggtccctggaccatgcccaacggcataggcagcacttgaaaactggctaaaaacgcagactctcaggccccgggccagagctactgaatcaaaatctgcattttaacaaggttcccaggtgattccctgtttctttttggagacaggcccttttggtgggtccatgagtctggttactacagccaggctccagcccaggttcaccagttcccctcttcttgtgagactggtccaggcagcccttctggacactgcatgatcacaggagcagccctctggcccataatgacggccctgtcttcgcaggtggccactcgggcccgcagccgctgggtaagggtgatgcctagcctggcttattgcaccttccttttggcggttggcttgtcgcgaatcttcatcttagcacatttccctcaccaggtgctggctggcctaataactggcgctgtcctgggctggctgatgactccccgagtgcctatggagcgggagctaagcttctatgggttgactgcactggccctcatgctaggcaccagcctcatctattggaccctctttacactgggcctggatctttcttggtccatcagcctagccttcaagtggtgtgagcggcctgagtggatacacgtggatagccggccctttgcctccctgagccgtgactcaggggctgccctgggcctgggcattgccttgcactctccctgctatgcccaggtgcgtcgggcacagctgggaaatggccagaagatagcctgccttgtgctggccatggggctgctgggccccctggactggctgggccacccccctcagatcagcctcttctacattttcaatttcctcaagtacaccctctggccatgcctagtcctggccctcgtgccctgggcagtgcacatgttcagtgcccaggaagcaccgcccatccactcttcctgacttcttgtgtgcctccctttcctttccctcccacaaagccaacactctgtgaccaccacactccaggaggcagccccatccccttccagcccctaagtaggccctcccctccctaaatctgcttccgcaccacctggtcttagccccaaagatgggccttctctctcccagataagttggtcctccctctgcctttcctctcaagcccccaaagagcaaaggcaacagcaagaccagcgggttcttgcaacactgtgaggggcagccagggcggccccaataaagcccttgaatactttga

SEQ ID NO: 421651 - DNA, 1582 bp, Homo sapiens
cgcaggaggaaacagtaccggctggaggccggtcttgcaggagcgggggactgctgggggcggggcttggtggtgaccgctggcggggcggggcctggggctcagaggggtgggctttggagatcagagggtcgacgctgcttcgttgcctggactctggtttccgccctggagcaagccggggcctggtcggcagctgggccgccatggagtccacgctgggcgcgggcatcgtgatagccgaggcgctacagaaccagctagcctggctggagaacgtgtggctctggatcacctttctgggcgatcccaagatcctctttctgttctacttccccgcggcctactacgcctcccgccgtgtgggcatcgcggtgctctggatcagcctcatcaccgagtggctcaacctcatcttcaagtggtttctttttggagacaggcccttttggtgggtccatgagtctggttactacagccaggctccagcccaggttcaccagttcccctcttcttgtgagactggtccaggcagcccttctggacactgcatgatcacaggagcagccctctggcccataatgacggccctgtcttcgcaggtggccactcgggcccgcagccgctgggtaagggtgatgcctagcctggcttattgcaccttccttttggcggttggcttgtcgcgaatcttcatcttagcacatttccctcaccaggtgctggctggcctaataactgactccttgaagctgttgtcactccactctcctaggcgctgtcctgggctggctgatgactccccgagtgcctatggagcgggagctaagcttctatgggttgactgcactggccctcatgctaggcaccagcctcatctattggaccctctttacactgggcctggatctttcttggtccatcagcctagccttcaagtggtgtgagcggcctgagtggatacacgtggatagccggccctttgcctccctgagccgtgactcaggggctgccctgggcctgggcattgccttgcactctccctgctatgcccaggtgcgtcgggcacagctgggaaatggccagaagatagcctgccttgtgctggccatggggctgctgggccccctggactggctgggccacccccctcagatcagcctcttctacattttcaatttcctcaagtacaccctctggccatgcctagtcctggccctcgtgccctgggcagtgcacatgttcagtgcccaggaagcaccgcccatccactcttcctgacttcttgtgtgcctccctttcctttccctcccacaaagccaacactctgtgaccaccacactccaggaggcagccccatccccttccagcccctaagtaggccctcccctccctaaatctgcttccgcaccacctggtcttagccccaaagatgggccttctctctcccagataagttggtcctccctctgcctttcctctcaagcccccaaagagcaaaggcaacagcaagaccagcgggttcttgcaacactgtgaggggcagccagggcggccccaataaagcccttgaatactttga

SEQ ID NO: 421652 - DNA, 524 bp, Homo sapiens
gatcatcatcggtgacatcagcaccagcactgagtgcacgcctgtacccttgcctgatgccaagcaaagactctttcccagaggccacccccctcagatcagcctcttctacattttcaatttcctcaagtacaccctctggccatgcctagtcctggccctcgtgccctgggcagtgcacatgttcagtgcccaggaagcaccgcccatccactcttcctgacttcttgtgtgcctccctttcctttccctcccacaaagccaacactctgtgaccaccacactccaggaggcagccccatccccttccagcccctaagtaggccctcccctccctaaatctgcttccgcaccacctggtcttagccccaaagatgggccttctctctcccagataagttggtcctccctctgcctttcctctcaagcccccaaagagcaaaggcaacagcaagaccagcgggttcttgcaacactgtgaggggcagccagggcggccccaataaagcccttgaatactttga

SEQ ID NO: 421653 - DNA, 2027 bp, Homo sapiens
ctcttaaagggggcagtgactgcggctgggcgggagtccgggtcggcttggctgagcgggggcggtgctgggcagggcggcggccgctccctcccggactcccggcctcccggcctccctggtcccgcctgggaagggatgcaaggaagccctccggcgctgcgctccgaggcgggagacagcgtccccctccgcccctcgggtcctggcgcctcagagcccggcccaggccgcggaacggtgatgctcgggccggacgggcgggcgcggatccctgcgtcccgctgaaaatgtgtgtctgacatgcaagctcagtggggcagagacccgtggattgctgtgccctgccctccggacctggatcatgaaggtgttgggaagaagcttcttctgggtgctgtttcccgtccttccctgggcggtgcaggctgtggagcacgaggaggtggcgcagcgtgtgatcaaactgcaccgcgggcgaggggtggctgccatgcagagccggcagtgggtccgggacagctgcaggaagctctcagggcttctccgccagaagaatgcagttctgaacaaactgaaaactgcaattggagcagtggagaaagacgtgggcctgtcggatgaagagaaactgtttcaggtgcacacgtttgaaattttccagaaagagctgaatgaaagtgaaaattccgttttccaagctgtctacggactgcagagagccctgcagggggattacaaagatgtcgtgaacatgaaggagagcagccggcagcgcctggaggccctgagagaggctgcaataaaggaagaaacagaatatatggaacttctggcagcagaaaaacatcaagttgaagcccttaaaaatatgcaacatcaaaaccaaagtttatccatgcttgacgagattcttgaagatgtaagaaaggcagcggatcgtctggaggaagagatagaggaacatgcttttgacgacaataaatcagtcaagggggtcaattttgaggcagttctgagggtggaggaagaagaggccaattctaagcaaaatataacaaaacgagaagtggaggatgacttgggtcttagcatgctgattgactcccagaacaaccagtatattttgaccaagcccagagattcaaccatcccacgtgcagatcaccactttataaaggacattgttaccataggaatgctgtccttgccttgtggctggctatgtacagccataggattgcctacaatgtttggttatattatttgtggtgtacttctgggaccttcaggactaaatagtattaagtctattgtgcaagtggagacattaggagaatttggggtgttttttactctttttcttgttggcttagaattttctccagaaaagctaagaaaggtgtggaagatttccttacaagggccgtgttacatgacactgttaatgattgcatttggcttgctgtgggggcatctcttgcggatcaaacccacgcagagcgtcttcatttccacgtgtctgtccttgtcaagcacacccctcgtgtccaggttcctcatgggcagtgctcggggtgacaaagaaggcgacattgactacagcaccgtgctcctcggcatgctggtgacgcaggacgtgcagctcgggctcttcatggccgtcatgccgactctcatacaggcgggcgccagtgcatcttctagcattgtcgtggaagttctccgaatcctggttttgattggtcagattcttttttcactagcggcggtttttcttttatgtcttgttataaagaagtatctcattggaccctattatcggaagctgcacatggaaagcaaggggaacaaagaaatcctgatcttgggaatatctgcctttatcttcttaatgttaacggtaattctcaaactatgtgttatttatgtaatctgatacataatctctttcactgaaatcttgtgatccattctttacctttccattttaataatggttaaaatatttgaaacatttactagta

SEQ ID NO: 421654 - DNA, 2185 bp, Homo sapiens
ctcttaaagggggcagtgactgcggctgggcgggagtccgggtcggcttggctgagcgggggcggtgctgggcagggcggcggccgctccctcccggactcccggcctcccggcctccctggtcccgcctgggaagggatgcaaggaagccctccggcgctgcgctccgaggcgggagacagcgtccccctccgcccctcgggtcctggcgcctcagagcccggcccaggccgcggaacggtgatgctcgggccggacgggcgggcgcggatccctgcgtcccgctgaaaatgtgtgtctgacatgcaagctcagtggggcagagacccgtggattgctgtgccctgccctccggacctggatcatgaaggtgttgggaagaagcttcttctgggtgctgtttcccgtccttccctgggcggtgcaggctgtggagcacgaggaggtggcgcagcgtgtgatcaaactgcaccgcgggcgaggggtggctgccatgcagagccggcagtgggtccgggacagctgcaggaagctctcagggcttctccgccagaagaatgcagttctgaacaaactgaaaactgcaattggagcagtggagaaagacgtgggcctgtcggatgaagagaaactgtttcaggtgcacacgtttgaaattttccagaaagagctgaatgaaagtgaaaattccgttttccaagctgtctacggactgcagagagccctgcagggggattacaaagatgtcgtgaacatgaaggagagcagccggcagcgcctggaggccctgagagaggctgcaataaaggaagaaacagaatatatggaacttctggcagcagaaaaacatcaagttgaagcccttaaaaatatgcaacatcaaaaccaaagtttatccatgcttgacgagattcttgaagatgtaagaaaggcagcggatcgtctggaggaagagatagaggaacatgcttttgacgacaataaatcagtcaagggggtcaattttgaggcagttctgagggtggaggaagaagaggccaattctaagcaaaatataacaaaacgagaagtggaggatgacttgggtcttagcatgctgattgactcccagaacaaccagtatattttgaccaagcccagagattcaaccatcccacgtgcagatcaccactttataaaggacattgttaccataggaatgctgtccttgccttgtggctggctatgtacagccataggattgcctacaatgtttggttatattatttgtggtgtacttctgggaccttcaggactaaatagtattaagtctattgtgcaagtggagacattaggagaatttggggtgttttttactctttttcttgttggcttagaattttctccagaaaagctaagaaaggtgtggaagatttccttacaagggccgtgttacatgacactgttaatgattgcatttggcttgctgtgggggcatctcttgcggatcaaacccacgcagagcgtcttcatttccacgtgtctgtccttgtcaagcacacccctcgtgtccaggttcctcatgggcagtgctcggggtgacaaagaaggcaacagaacagccctctagcagagcgtcagtgcagtcgtgttatcccggcttttacagaatattcttgtcctattttagaattttccggagtagtttatttgcagtctgttgattatgtgcagtagacccgggacactgcgttttaccgatcaccttgaatgtggtgcctggatgtgccttttttttttttccctgaaattattattaattttctattgtgagttcatcagttcatagtttttttagtaaagaagcaaaattaaaaggcttttaaaaatgtacaacttcagaattataatctgttagtcaaatatttgttattaaacatttctgtaatatgaagttgtaatcctggccgtgagcttggaagcttacttttgattcttaaagcctatgttttctaaaatgagacaaatacggatgtctatttgccttttattgtaacttttaaatgaaataatttcatgtcaatttctattagatatatcacttaaaatatttggttttaaatcacaagaatatgtattctttaataaagataatttatgatcatggtataattaattgaaatttattaaaatctgtttttattaa

SEQ ID NO: 421655 - DNA, 3089 bp, Homo sapiens
ctcttaaagggggcagtgactgcggctgggcgggagtccgggtcggcttggctgagcgggggcggtgctgggcagggcggcggccgctccctcccggactcccggcctcccggcctccctggtcccgcctgggaagggatgcaaggaagccctccggcgctgcgctccgaggcgggagacagcgtccccctccgcccctcgggtcctggcgcctcagagcccggcccaggccgcggaacggtgatgctcgggccggacgggcgggcgcggatccctgcgtcccgctgaaaatgtgtgtctgacatgcaagctcagtggggcagagacccgtggattgctgtgccctgccctccggacctggatcatgaaggtgttgggaagaagcttcttctgggtgctgtttcccgtccttccctgggcggtgcaggctgtggagcacgaggaggtggcgcagcgtgtgatcaaactgcaccgcgggcgaggggtggctgccatgcagagccggcagtgggtccgggacagctgcaggaagctctcagggcttctccgccagaagaatgcagttctgaacaaactgaaaactgcaattggagcagtggagaaagacgtgggcctgtcggatgaagagaaactgtttcaggtgcacacgtttgaaattttccagaaagagctgaatgaaagtgaaaattccgttttccaagctgtctacggactgcagagagccctgcagggggattacaaagatgtcgtgaacatgaaggagagcagccggcagcgcctggaggccctgagagaggctgcaataaaggaagaaacagaatatatggaacttctggcagcagaaaaacatcaagttgaagcccttaaaaatatgcaacatcaaaaccaaagtttatccatgcttgacgagattcttgaagatgtaagaaaggcagcggatcgtctggaggaagagatagaggaacatgcttttgacgacaataaatcagtcaagggggtcaattttgaggcagttctgagggtggaggaagaagaggccaattctaagcaaaatataacaaaacgagaagtggaggatgacttgggtcttagcatgctgattgactcccagaacaaccagtatattttgaccaagcccagagattcaaccatcccacgtgcagatcaccactttataaaggacattgttaccataggaatgctgtccttgccttgtggctggctatgtacagccataggattgcctacaatgtttggttatattatttgtggtgtacttctgggaccttcaggactaaatagtattaagtctattgtgcaagtggagacattaggagaatttggggtgttttttactctttttcttgttggcttagaattttctccagaaaagctaagaaaggtgtggaagatttccttacaagggccgtgttacatgacactgttaatgattgcatttggcttgctgtgggggcatctcttgcggatcaaacccacgcagagcgtcttcatttccacgtgtctgtccttgtcaagcacacccctcgtgtccaggttcctcatgggcagtgctcggggtgacaaagaaggcgacattgactacagcaccgtgctcctcggcatgctggtgacgcaggacgtgcagctcgggctcttcatggccgtcatgccgactctcatacaggcgggcgccagtgcatcttctagcattgtcgtggaagttctccgaatcctggttttgattggtcagattcttttttcactagcggcggtttttcttttatgtcttgttataaagaagtatctcattggaccctattatcggaagctgcacatggaaagcaaggggaacaaagaaatcctgatcttgggaatatctgcctttatcttcttaatgttaacggtcacggagctgctggacgtctccatggagctgggctgtttcctggctggagcgctcgtctcctctcagggccccgtggtcaccgaggagatcgccacctccatcgaacccatccgcgacttcctggccatcgttttcttcgcctccatagggctccacgtgttccccacgtttgtggcgtacgagctcacggtgctggtgttcctcaccttgtcagtggtggtgatgaagtttctcctggcggcgctggtcctgtctctcattctgccgaggagcagccagtacatcaagtggatcgtctctgcggggcttgcccaggtcagcgagttttcctttgtcctggggagccgggcgcgaagagcgggcgtcatctctcgggaggtgtacctccttatactgagtgtgaccacgctcagcctcttgctcgccccggtgctgtggagagctgcaatcacgaggtgtgtgcccagaccggagagacggtccagcctctgatggctcggagatgatggaccgtggaagggaagcgtctgtggggagtgagcgcttagatggccagcagctgctccttctgggaagctcgcaccttggcaacagaacagccctctagcagagcgtcagtgcagtcgtgttatcccggcttttacagaatattcttgtcctattttagaattttccggagtagtttatttgcagtctgttgattatgtgcagtagacccgggacactgcgttttaccgatcaccttgaatgtggtgcctggatgtgccttttttttttttccctgaaattattattaattttctattgtgagttcatcagttcatagtttttttagtaaagaagcaaaattaaaaggcttttaaaaatgtacaacttcagaattataatctgttagtcaaatatttgttattaaacatttctgtaatatgaagttgtaatcctggccgtgagcttggaagcttacttttgattcttaaagcctatgttttctaaaatgagacaaatacggatgtctatttgccttttattgtaacttttaaatgaaataatttcatgtcaatttctattagatatatcacttaaaatatttggttttaaatcacaagaatatgtattctttaataaagataatttatgatcatggtataattaattgaaatttattaaaatctgtttttattaa

SEQ ID NO: 421656 - DNA, 2996 bp, Homo sapiens
ctcttaaagggggcagtgactgcggctgggcgggagtccgggtcggcttggctgagcgggggcggtgctgggcagggcggcggccgctccctcccggactcccggcctcccggcctccctggtcccgcctgggaagggatgcaaggaagccctccggcgctgcgctccgaggcgggagacagcgtccccctccgcccctcgggtcctggcgcctcagagcccggcccaggccgcggaacggtgatgctcgggccggacgggcgggcgcggatccctgcgtcccgctgaaaatgtgtgtctgacatgcaagctcagtggggcagagacccgtggattgctgtgccctgccctccggacctggatcatgaaggtgttgggaagaagcttcttctgggtgctgtttcccgtccttccctgggcggtgcaggctgtggagcacgaggaggtggcgcagcgtgtgatcaaactgcaccgcgggcgaggggtggctgccatgcagagccggcagtgggtccgggacagctgcaggaagctctcagggcttctccgccagaagaatgcagttctgaacaaactgaaaactgcaattggagcagtggagaaagacgtgggcctgtcggatgaagagaaactgtttcaggtgcacacgtttgaaattttccagaaagagctgaatgaaagtgaaaattccgttttccaagctgtctacggactgcagagagccctgcagggggattacaaagatgtcgtgaacatgaaggagagcagccggcagcgcctggaggccctgagagaggctgcaataaaggaagaaacagaatatatggaacttctggcagcagaaaaacatcaagttgaagcccttaaaaatatgcaacatcaaaaccaaagtttatccatgcttgacgagattcttgaagatgtaagaaaggcagcggatcgtctggaggaagagatagaggaacatgcttttgacgacaataaatcagtcaagggggtcaattttgaggcagttctgagggtggaggaagaagaggccaattctaagcaaaatataacaaaacgagaagtggaggatgacttgggtcttagcatgctgattgactcccagaacaaccagtatattttgaccaagcccagagattcaaccatcccacgtgcagatcaccactttataaaggacattgttaccataggaatgctgtccttgccttgtggctggctatgtacagccataggattgcctacaatgtttggttatattatttgtggtgtacttctgggaccttcaggactaaatagtattaaggtgtggaagatttccttacaagggccgtgttacatgacactgttaatgattgcatttggcttgctgtgggggcatctcttgcggatcaaacccacgcagagcgtcttcatttccacgtgtctgtccttgtcaagcacacccctcgtgtccaggttcctcatgggcagtgctcggggtgacaaagaaggcgacattgactacagcaccgtgctcctcggcatgctggtgacgcaggacgtgcagctcgggctcttcatggccgtcatgccgactctcatacaggcgggcgccagtgcatcttctagcattgtcgtggaagttctccgaatcctggttttgattggtcagattcttttttcactagcggcggtttttcttttatgtcttgttataaagaagtatctcattggaccctattatcggaagctgcacatggaaagcaaggggaacaaagaaatcctgatcttgggaatatctgcctttatcttcttaatgttaacggtcacggagctgctggacgtctccatggagctgggctgtttcctggctggagcgctcgtctcctctcagggccccgtggtcaccgaggagatcgccacctccatcgaacccatccgcgacttcctggccatcgttttcttcgcctccatagggctccacgtgttccccacgtttgtggcgtacgagctcacggtgctggtgttcctcaccttgtcagtggtggtgatgaagtttctcctggcggcgctggtcctgtctctcattctgccgaggagcagccagtacatcaagtggatcgtctctgcggggcttgcccaggtcagcgagttttcctttgtcctggggagccgggcgcgaagagcgggcgtcatctctcgggaggtgtacctccttatactgagtgtgaccacgctcagcctcttgctcgccccggtgctgtggagagctgcaatcacgaggtgtgtgcccagaccggagagacggtccagcctctgatggctcggagatgatggaccgtggaagggaagcgtctgtggggagtgagcgcttagatggccagcagctgctccttctgggaagctcgcaccttggcaacagaacagccctctagcagagcgtcagtgcagtcgtgttatcccggcttttacagaatattcttgtcctattttagaattttccggagtagtttatttgcagtctgttgattatgtgcagtagacccgggacactgcgttttaccgatcaccttgaatgtggtgcctggatgtgccttttttttttttccctgaaattattattaattttctattgtgagttcatcagttcatagtttttttagtaaagaagcaaaattaaaaggcttttaaaaatgtacaacttcagaattataatctgttagtcaaatatttgttattaaacatttctgtaatatgaagttgtaatcctggccgtgagcttggaagcttacttttgattcttaaagcctatgttttctaaaatgagacaaatacggatgtctatttgccttttattgtaacttttaaatgaaataatttcatgtcaatttctattagatatatcacttaaaatatttggttttaaatcacaagaatatgtattctttaataaagataatttatgatcatggtataattaattgaaatttattaaaatctgtttttattaa

SEQ ID NO: 421657 - DNA, 3052 bp, Homo sapiens
ctcttaaagggggcagtgactgcggctgggcgggagtccgggtcggcttggctgagcgggggcggtgctgggcagggcggcggccgctccctcccggactcccggcctcccggcctccctggtcccgcctgggaagggatgcaaggaagccctccggcgctgcgctccgaggcgggagacagcgtccccctccgcccctcgggtcctggcgcctcagagcccggcccaggccgcggaacggtgatgctcgggccggacgggcgggcgcggatccctgcgtcccgctgaaaatgtgtgtctgacatgcaagctcagtggggcagagacccgtggattgctgtgccctgccctccggacctggatcatgaaggtgttgggaagaagcttcttctgggtgctgtttcccgtccttccctgggcggtgcaggctgtggagcacgaggaggtggcgcagcgtgtgatcaaactgcaccgcgggcgaggggtggctgccatgcagagccggcagtgggtccgggacagctgcaggaagctctcagggcttctccgccagaagaatgcagttctgaacaaactgaaaactgcaattggagcagtggagaaagacgtgggcctgtcggatgaagagaaactgtttcaggtgcacacgtttgaaattttccagaaagagctgaatgaaagtgaaaattccgttttccaagctgtctacggactgcagagagccctgcagggggattacaaagatgtcgtgaacatgaaggagagcagccggcagcgcctggaggccctgagagaggctgcaataaaggaagaaacagaatatatggaacttctggcagcagaaaaacatcaagttgaagcccttaaaaatatgcaacatcaaaaccaaagtttatccatgcttgacgagattcttgaagatgtaagaaaggcagcggatcgtctggaggaagagatagaggaacatgcttttgacgacaataaatcagtcaagggggtcaattttgaggcagttctgagggtggaggaagaagaggccaattctaagcaaaatataacaaaacgagaagtggaggatgacttgggtcttagcatgctgattgactcccagaacaaccagtatattttgaccaagcccagagattcaaccatcccacgtgcagatcaccactttataaaggacattgttaccataggaatgctgtccttgccttgtggctggctatgtacagccataggattgcctacaatgtttggttatattatttgtggtgtacttctgggaccttcaggactaaatagtattaagtctattgtgcaagtggagacattaggagaatttggggtgttttttactctttttcttgttggcttagaattttctccagaaaagctaagaaaggtgtggaagatttccttacaagggccgtgttacatgacactgttaatgattgcatttggcttgctgtgggggcatctcttgcggatcaaacccacgcagagcgtcttcatttccacgtgtctgtccttgtcaagcacacccctcgtgtccaggttcctcatgggcagtgctcggggtgacaaagaaggcgacattgactacagcaccgtgctcctcggcatgctggtgacgcaggacgtgcagctcgggctcttcatggccgtcatgccgactctcatacaggcgggcgccagtgcatcttctagcattgtcgtggaagttctccgaatcctggttttgattggtcagattcttttttcactagcggcggtttttcttttatgtcttgttataaagaagtatctcattggaccctattatcggaagctgcacatggaaagcaaggggaacaaagaaatcctgatcttgggaatatctgcctttatcttcttaatgttaacggtcacggagctgctggacgtctccatggagctgggctgtttcctggctggagcgctcgtctcctctcagggccccgtggtcaccgaggagatcgccacctccatcgaacccatccgcgacttcctggccatcgttttcttcgcctccatagggctccacgtgttccccacgtttgtggcgtacgagctcacggtgctggtgttcctcaccttgtcagtggtggtgatgaagtttctcctggcggcgctggtcctgtctctcattctgccgaggagcagccagtacatcaagtggatcgtctctgcggggcttgcccaggtcagcgagttttcctttgtcctggggagccgggcgcgaagagcgggcgtcatctctcgggaggtgtacctccttatactgagtgtgaccacgctcagcctcttgctcgccccggtgctgtggagagctgcaatcacgaggtgtgtgcccagaccggagagacggtccagcctctgatggctcggagatgatggaccgtggaagggaagcgtctgtggggagtgagcgcttagatggccagcagctgctccttctgggaagctcgcaccttggcaacagaacagccctctagcagagcgtcagtgcagtcgtgttatcccggcttttacagaatattcttgtcctattttagaattttccggagtagtttatttgcagtctgttgattatgtgcagtagacccgggacactgcgttttaccgatcaccttgaatgtggtgcctggatgtgccttttttttttttccctgaaattattattaattttctattgtgagttcatcagttcatagtttttttagtaaagaagcaaaattaaaaggcttttaaaaatgtacaacttcagaattataatctgttagtcaaatatttgttattaaacatttctgtaatatgaagttgtaatcctggccgtgagcttggaagcttacttttgattcttaaagcctatgttttctaaaatgagacaaatacggatgtctatttgccttttattgtaacttttaaatgaaataatttcatgtcaatttctattagatatatcacttaaaatatttggttttaaatcacaagaatatgtattctttaataaagataatttatgatcatggta

SEQ ID NO: 421658 - DNA, 3169 bp, Homo sapiens
ctcttaaagggggcagtgactgcggctgggcgggagtccgggtcggcttggctgagcgggggcggtgctgggcagggcggcggccgctccctcccggactcccggcctcccggcctccctggtcccgcctgggaagggatgcaaggaagccctccggcgctgcgctccgaggcgggagacagcgtccccctccgcccctcgggtcctggcgcctcagagcccggcccaggccgcggaacggtgatgctcgggccggacgggcgggcgcggatccctgcgtcccgctgaaaatgtgtgtctgacatgcaagctcagtggggcagagacccgtggattgctgtgccctgccctccggacctggatcatgaaggtgttgggaagaagcttcttctgggtgctgtttcccgtccttccctgggcggtgcaggctgtggagcacgaggaggtggcgcagcgtgtgatcaaactgcaccgcgggcgaggggtggctgccatgcagagccggcagtgggtccgggacagctgcaggaagctctcagggcttctccgccagaagaatgcagttctgaacaaactgaaaactgcaattggagcagtggagaaagacgtgggcctgtcggatgaagagaaactgtttcaggtgcacacgtttgaaattttccagaaagagctgaatgaaagtgaaaattccgttttccaagctgtctacggactgcagagagccctgcagggggattacaaagatgtcgtgaacatgaaggagagcagccggcagcgcctggaggccctgagagaggctgcaataaaggaagaaacagaatatatggaacttctggcagcagaaaaacatcaagttgaagcccttaaaaatatgcaacatcaaaaccaaagtttatccatgcttgacgagattcttgaagatgtaagaaaggcagcggatcgtctggaggaagagatagaggaacatgcttttgacgacaataaatcagtaagcgttccagaacagctgcttcttcacctcctgagccactcactaatcagaagacatgttgttgaaattgttcacgtgtcaagggggtcaattttgaggcagttctgagggtggaggaagaagaggccaattctaagcaaaatataacaaaacgagaagtggaggatgacttgggtcttagcatgctgattgactcccagaacaaccagtatattttgaccaagcccagagattcaaccatcccacgtgcagatcaccactttataaaggacattgttaccataggaatgctgtccttgccttgtggctggctatgtacagccataggattgcctacaatgtttggttatattatttgtggtgtacttctgggaccttcaggactaaatagtattaagtctattgtgcaagtggagacattaggagaatttggggtgttttttactctttttcttgttggcttagaattttctccagaaaagctaagaaaggtgtggaagatttccttacaagggccgtgttacatgacactgttaatgattgcatttggcttgctgtgggggcatctcttgcggatcaaacccacgcagagcgtcttcatttccacgtgtctgtccttgtcaagcacacccctcgtgtccaggttcctcatgggcagtgctcggggtgacaaagaaggcgacattgactacagcaccgtgctcctcggcatgctggtgacgcaggacgtgcagctcgggctcttcatggccgtcatgccgactctcatacaggcgggcgccagtgcatcttctagcattgtcgtggaagttctccgaatcctggttttgattggtcagattcttttttcactagcggcggtttttcttttatgtcttgttataaagaagtatctcattggaccctattatcggaagctgcacatggaaagcaaggggaacaaagaaatcctgatcttgggaatatctgcctttatcttcttaatgttaacggtcacggagctgctggacgtctccatggagctgggctgtttcctggctggagcgctcgtctcctctcagggccccgtggtcaccgaggagatcgccacctccatcgaacccatccgcgacttcctggccatcgttttcttcgcctccatagggctccacgtgttccccacgtttgtggcgtacgagctcacggtgctggtgttcctcaccttgtcagtggtggtgatgaagtttctcctggcggcgctggtcctgtctctcattctgccgaggagcagccagtacatcaagtggatcgtctctgcggggcttgcccaggtcagcgagttttcctttgtcctggggagccgggcgcgaagagcgggcgtcatctctcgggaggtgtacctccttatactgagtgtgaccacgctcagcctcttgctcgccccggtgctgtggagagctgcaatcacgaggtgtgtgcccagaccggagagacggtccagcctctgatggctcggagatgatggaccgtggaagggaagcgtctgtggggagtgagcgcttagatggccagcagctgctccttctgggaagctcgcaccttggcaacagaacagccctctagcagagcgtcagtgcagtcgtgttatcccggcttttacagaatattcttgtcctattttagaattttccggagtagtttatttgcagtctgttgattatgtgcagtagacccgggacactgcgttttaccgatcaccttgaatgtggtgcctggatgtgccttttttttttttccctgaaattattattaattttctattgtgagttcatcagttcatagtttttttagtaaagaagcaaaattaaaaggcttttaaaaatgtacaacttcagaattataatctgttagtcaaatatttgttattaaacatttctgtaatatgaagttgtaatcctggccgtgagcttggaagcttacttttgattcttaaagcctatgttttctaaaatgagacaaatacggatgtctatttgccttttattgtaacttttaaatgaaataatttcatgtcaatttctattagatatatcacttaaaatatttggttttaaatcacaagaatatgtattctttaataaagataatttatgatcatggtataattaattgaaatttattaaaatctgtttttattaa

SEQ ID NO: 421659 - DNA, 2784 bp, Homo sapiens
ctcttaaagggggcagtgactgcggctgggcgggagtccgggtcggcttggctgagcgggggcggtgctgggcagggcggcggccgctccctcccggactcccggcctcccggcctccctggtcccgcctgggaagggatgcaaggaagccctccggcgctgcgctccgaggcgggagacagcgtccccctccgcccctcgggtcctggcgcctcagagcccggcccaggccgcggaacggtgatgctcgggccggacgggcgggcgcggatccctgcgtcccgctgaaaatgtgtgtctgacatgcaagctcagtggggcagagacccgtggattgctgtgccctgccctccggacctggatcatgaaggtgttgggaagaagcttcttctgggtgctgtttcccgtccttccctgggcggtgcaggctgtggagcacgaggaggtggcgcagcgtgtgatcaaactgcaccgcgggcgaggggtggctgccatgcagagccggcagtgggtccgggacagctgcaggaagctctcagggcttctccgccagaagaatgcagttctgaacaaactgaaaactgcaattggagcagtggagaaagacgtgggcctgtcggatgaagagaaactgtttcaggtgcacacgtttgaaattttccagaaagagctgaatgaaagtgaaaattccgttttccaagctgtctacggactgcagagagccctgcagggggattacaaagatgtcgtgaacatgaaggagagcagccggcagcgcctggaggccctgagagaggctgcaataaaggaagaaacagaatatatggaacttctggcagcagaaaaacatcaagttgaagcccttaaaaatatgcaacatcaaaaccaaagtttatccatgcttgacgagattcttgaagatgtaagaaaggcagcggatcgtctggaggaagagatagaggaacatgcttttgacgacaataaatcagtcaagggggtcaattttgaggcagttctgagggtggaggaagaagaggccaattctaagcaaaatataacaaaacgagaagtggaggatgacttgggtcttagcatgctgattgactcccagaacaaccagtatattttgaccaagcccagagattcaaccatcccacgtgcagatcaccactttataaaggacattgttaccataggaatgctgtccttgccttgtggctggctatgtacagccataggattgcctacaatgtttggttatattatttgtggtgtacttctgggaccttcaggactaaatagtattaagtctattgtgcaagtggagacattaggagaatttggggtgttttttactctttttcttgttggcttagaattttctccagaaaagctaagaaagcattgtcgtggaagttctccgaatcctggttttgattggtcagattcttttttcactagcggcggtttttcttttatgtcttgttataaagaagtatctcattggaccctattatcggaagctgcacatggaaagcaaggggaacaaagaaatcctgatcttgggaatatctgcctttatcttcttaatgttaacggtcacggagctgctggacgtctccatggagctgggctgtttcctggctggagcgctcgtctcctctcagggccccgtggtcaccgaggagatcgccacctccatcgaacccatccgcgacttcctggccatcgttttcttcgcctccatagggctccacgtgttccccacgtttgtggcgtacgagctcacggtgctggtgttcctcaccttgtcagtggtggtgatgaagtttctcctggcggcgctggtcctgtctctcattctgccgaggagcagccagtacatcaagtggatcgtctctgcggggcttgcccaggtcagcgagttttcctttgtcctggggagccgggcgcgaagagcgggcgtcatctctcgggaggtgtacctccttatactgagtgtgaccacgctcagcctcttgctcgccccggtgctgtggagagctgcaatcacgaggtgtgtgcccagaccggagagacggtccagcctctgatggctcggagatgatggaccgtggaagggaagcgtctgtggggagtgagcgcttagatggccagcagctgctccttctgggaagctcgcaccttggcaacagaacagccctctagcagagcgtcagtgcagtcgtgttatcccggcttttacagaatattcttgtcctattttagaattttccggagtagtttatttgcagtctgttgattatgtgcagtagacccgggacactgcgttttaccgatcaccttgaatgtggtgcctggatgtgccttttttttttttccctgaaattattattaattttctattgtgagttcatcagttcatagtttttttagtaaagaagcaaaattaaaaggcttttaaaaatgtacaacttcagaattataatctgttagtcaaatatttgttattaaacatttctgtaatatgaagttgtaatcctggccgtgagcttggaagcttacttttgattcttaaagcctatgttttctaaaatgagacaaatacggatgtctatttgccttttattgtaacttttaaatgaaataatttcatgtcaatttctattagatatatcacttaaaatatttggttttaaatcacaagaatatgtattctttaataaagataatttatgatcatggtataattaattgaaatttattaaaatctgtttttattaa

SEQ ID NO: 421660 - DNA, 2813 bp, Homo sapiens
ctcttaaagggggcagtgactgcggctgggcgggagtccgggtcggcttggctgagcgggggcggtgctgggcagggcggcggccgctccctcccggactcccggcctcccggcctccctggtcccgcctgggaagggatgcaaggaagccctccggcgctgcgctccgaggcgggagacagcgtccccctccgcccctcgggtcctggcgcctcagagcccggcccaggccgcggaacggtgatgctcgggccggacgggcgggcgcggatccctgcgtcccgctgaaaatgtgtgtctgacatgcaagctcagtggggcagagacccgtggattgctgtgccctgccctccggacctggatcatgaaggtgttgggaagaagcttcttctgggtgctgtttcccgtccttccctgggcggtgcaggctgtggagcacgaggaggtggcgcagcgtgtgatcaaactgcaccgcgggcgaggggtggctgccatgcagagccggcagtgggtccgggacagctgcaggaagctctcagggcttctccgccagaagaatgcagttctgaacaaactgaaaactgcaattggagcagtggagaaagacgtgggcctgtcggatgaagagaaactgtttcaggtgcacacgtttgaaattttccagaaagagctgaatgaaagtgaaaattccgttttccaagctgtctacggactgcagagagccctgcagggggattacaaagatgtcgtgaacatgaaggagagcagccggcagcgcctggaggccctgagagaggctgcaataaaggaagaaacagaatatatggaacttctggcagcagaaaaacatcaagttgaagcccttaaaaatatgcaacatcaaaaccaaagtttatccatgcttgacgagattcttgaagatgtaagaaaggcagcggatcgtctggaggaagagatagaggaacatgcttttgacgacaataaatcagtcaagggggtcaattttgaggcagttctgagggtggaggaagaagaggccaattctaagcaaaatataacaaaacgagaagtggaggatgacttgggtcttagcatgctgattgactcccagaacaaccagtatattttgaccaagcccagagattcaaccatcccacgtgcagatcaccactttataaaggacattgttaccataggaatgctgtccttgccttgtggctggctatgtacagccataggattgcctacaatgtttggttatattatttgtggtgtacttctgggaccttcaggactaaatagtattaagtctattgtgcaagtggagacattaggagaatttggggtgttttttactctttttcttgttggcttagaattttctccagaaaagctaagaaaggtgtggaagatttccttacaagggccgtgttacatgacactgttaatgattgcatttggcttgctgtgggggcatctcttgcggatcaaacccacgcagagcgtcttcatttccacgtgtctgtccttgtcaagcacacccctcgtgtccaggttcctcatgggcagtgctcggggtgacaaagaaggcgacattgactacagcaccgtgctcctcggcatgctggtgacgcaggacgtgcagctcgggctcttcatggccgtcatgccgactctcatacaggcgggcgccagtgcatcttctaggtcacggagctgctggacgtctccatggagctgggctgtttcctggctggagcgctcgtctcctctcagggccccgtggtcaccgaggagatcgccacctccatcgaacccatccgcgacttcctggccatcgttttcttcgcctccatagtttctcctggcggcgctggtcctgtctctcattctgccgaggagcagccagtacatcaagtggatcgtctctgcggggcttgcccaggtcagcgagttttcctttgtcctggggagccgggcgcgaagagcgggcgtcatctctcgggaggtgtacctccttatactgagtgtgaccacgctcagcctcttgctcgccccggtgctgtggagagctgcaatcacgaggtgtgtgcccagaccggagagacggtccagcctctgatggctcggagatgatggaccgtggaagggaagcgtctgtggggagtgagcgcttagatggccagcagctgctccttctgggaagctcgcaccttggcaacagaacagccctctagcagagcgtcagtgcagtcgtgttatcccggcttttacagaatattcttgtcctattttagaattttccggagtagtttatttgcagtctgttgattatgtgcagtagacccgggacactgcgttttaccgatcaccttgaatgtggtgcctggatgtgccttttttttttttccctgaaattattattaattttctattgtgagttcatcagttcatagtttttttagtaaagaagcaaaattaaaaggcttttaaaaatgtacaacttcagaattataatctgttagtcaaatatttgttattaaacatttctgtaatatgaagttgtaatcctggccgtgagcttggaagcttacttttgattcttaaagcctatgttttctaaaatgagacaaatacggatgtctatttgccttttattgtaacttttaaatgaaataatttcatgtcaatttctattagatatatcacttaaaatatttggttttaaatcacaagaatatgtattctttaataaagataatttatgatcatggtataattaattgaaatttattaaaatctgtttttattaa

SEQ ID NO: 421661 - DNA, 3186 bp, Homo sapiens
ctcttaaagggggcagtgactgcggctgggcgggagtccgggtcggcttggctgagcgggggcggtgctgggcagggcggcggccgctccctcccggactcccggcctcccggcctccctggtcccgcctgggaagggatgcaaggaagccctccggcgctgcgctccgaggcgggagacagcgtccccctccgcccctcgggtcctggcgcctcagagcccggcccaggccgcggaacggtgatgctcgggccggacgggcgggcgcggatccctgcgtcccgctgaaaatgtgtgtctgacatgcaagctcagtggggcagagacccgtggattgctgtgccctgccctccggacctggatcatgaaggtgttgggaagaagcttcttctgggtgctgtttcccgtccttccctgggcggtgcaggctgtggagcacgaggaggtggcgcagcgtgtgatcaaactgcaccgcgggcgaggggtggctgccatgcagagccggcagtgggtccgggacagctgcaggaagctctcagggcttctccgccagaagaatgcagttctgaacaaactgaaaactgcaattggagcagtggagaaagacgtgggcctgtcggatgaagagaaactgtttcaggtgcacacgtttgaaattttccagaaagagctgaatgaaagtgaaaattccgttttccaagctgtctacggactgcagagagccctgcagggggattacaaagatgtcgtgaacatgaaggagagcagccggcagcgcctggaggccctgagagaggctgcaataaaggaagaaacagaatatatggaacttctggcagcagaaaaacatcaagttgaagcccttaaaaatatgcaacatcaaaaccaaagtttatccatgcttgacgagattcttgaagatgtaagaaaggcagcggatcgtctggaggaagagatagaggaacatgcttttgacgacaataaatcagtcaagggggtcaattttgaggcagttctgagggtggaggaagaagaggccaattctaagcaaaatataacaaaacgagaagtggaggatgacttgggtcttagcatgctgattgactcccagaacaaccagtatattttgaccaagcccagagattcaaccatcccacgtgcagatcaccactttataaaggacattgttaccataggaatgctgtccttgccttgtggctggctatgtacagccataggattgcctacaatgtttggttatattatttgtggtgtacttctgggaccttcaggactaaatagtattaagtctattgtgcaagtggagacattaggagaatttggggtgttttttactctttttcttgttggcttagaattttctccagaaaagctaagaaaggtgtggaagatttccttacaagggccgtgttacatgacactgttaatgattgcatttggcttgctgtgggggcatctcttgcggatcaaacccacgcagagcgtcttcatttccacgtgtctgtccttgtcaagcacacccctcgtgtccaggttcctcatgggcagtgctcggggtgacaaagaaggcgacattgactacagcaccgtgctcctcggcatgctggtgacgcaggacgtgcagctcgggctcttcatggccgtcatgccgactctcatacaggcgggcgccagtgcatcttctagcattgtcgtggaagttctccgaatcctggttttgattggtcagattcttttttcactagcggcggtttttcttttatgtcttgttataaagaagtatctcattggaccctattatcggaagctgcacatggaaagcaaggggaacaaagaaatcctgatcttgggaatatctgcctttatcttcttaatgttaacggtcacggagctgctggacgtctccatggagctgggctgtttcctggctggagcgctcgtctcctctcagggccccgtggtcaccgaggagatcgccacctccatcgaacccatccgcgacttcctggccatcgttttcttcgcctccatagggctccacgtgttccccacgtttgtggcgtacgagctcacggtgctggtgttcctcaccttgtcagtggtggtgatgaagtttctcctggcggcgctggtcctgtctctcattctgccgaggagcagccagtacatcaagtggatcgtctctgcggggcttgcccaggtcagcgagttttcctttgtcctggggagccgggcgcgaagagcgggcgtcatctctcgggaggtgtacctccttatactgagtgtgaccacgctcagcctcttgctcgccccggtgctgtggagagctgcaatcacgaggtgtgtgcccagaccggagagacggtccagcctctgatggctcggagatgatggaccgtggaagggaagcgtctgtggggagtgagcgcttagatggccagcagctgctccttctgggaagctcgcaccttggcaacagaacagccctctagcagagcgtcagtgcagtcgtgttatcccggcttttacagaatattcttgtcctattttagaattttccggagtagtttatttgcagtctgttgattatgtgcagtagacccgggacactgcgttttaccgatcaccttgaatgtggtgcctggatgtgccttttttttttttccctgaaattattattaattttctattgtgagttcatcagttcatagtttttttagtaaagaagcaaaattaaaaggcttttaaaaatgtacaacttcagaattataatctgttagtcaaatatttgttattaaacatttctgtaatatgaagttgtaatcctggccgtgagcttggaagcttacttttgattcttaaagcctatgttttctaaaatgagacaaatacggatgtctatttgccttttattgtaacttttaaatgaaataatttcatgtcaatttctattagatatatcacttaaaatatttggttttaaatcacaagaatatgtattctttaataaagataatttatgatcatggtataattaattgaaatttattaaaatctgtttttattaaaaaaaaaaaaaaaaaaaaaaaaaaaaaaaaaaaaaaaaaaaaaaaaaaaaaaaaaaaaaaaaaaaaaaaaaaaattaaaaaaaaaaaagaaaaaaaa

SEQ ID NO: 421662 - DNA, 2476 bp, Homo sapiens
cgagctcggtaccccgtccttcatcatacctacccagggggattacaaagatgtcgtgaacatgaaggagagcagccggcagcgcctggaggccctgagagaggctgcaataaaggaagaaacagaatatatggaacttctggcagcagaaaaacatcaagttgaagcccttaaaaatatgcaacatcaaaaccaaagtttatccatgcttgacgagattcttgaagatgtaagaaaggcagcggatcgtctggaggaagagatagaggaacatgcttttgacgacaataaatcagtaagcgttccagaacagctgcttcttcacctcctgagccactcactaatcagaagacatgttgttgaaattgttcacgtgtcaagggggtcaattttgaggcagttctgagggtggaggaagaagaggccaattctaagcaaaatataacaaaacgagaagtggaggatgacttgggtcttagcatgctgattgactcccagaacaaccagtatattttgaccaagcccagagattcaaccatcccacgtgcagatcaccactttataaaggacattgttaccataggaatgctgtccttgccttgtggctggctatgtacagccataggattgcctacaatgtttggttatattatttgtggtgtacttctgggaccttcaggactaaatagtattaagtctattgtgcaagtggagacattaggagaatttggggtgttttttactctttttcttgttggcttagaattttctccagaaaagctaagaaaggtgtggaagatttccttacaagggccgtgttacatgacactgttaatgattgcatttggcttgctgtgggggcatctcttgcggatcaaacccacgcagagcgtcttcatttccacgtgtctgtccttgtcaagcacacccctcgtgtccaggttcctcatgggcagtgctcggggtgacaaagaaggcgacattgactacagcaccgtgctcctcggcatgctggtgacgcaggacgtgcagctcgggctcttcatggccgtcatgccgactctcatacaggcgggcgccagtgcatcttctagcattgtcgtggaagttctccgaatcctggttttgattggtcagattcttttttcactagcggcggtttttcttttatgtcttgttataaagaagtatctcattggaccctattatcggaagctgcacatggaaagcaaggggaacaaagaaatcctgatcttgggaatatctgcctttatcttcttaatgttaacggtcacggagctgctggacgtctccatggagctgggctgtttcctggctggagcgctcgtctcctctcagggccccgtggtcaccgaggagatcgccacctccatcgaacccatccgcgacttcctggccatcgttttcttcgcctccatagggctccacgtgttccccacgtttgtggcgtacgagctcacggtgctggtgttcctcaccttgtcagtggtggtgatgaagtttctcctggcggcgctggtcctgtctctcattctgccgaggagcagccagtacatcaagtggatcgtctctgcggggcttgcccaggtcagcgagttttcctttgtcctggggagccgggcgcgaagagcgggcgtcatctctcgggaggtgtacctccttatactgagtgtgaccacgctcagcctcttgctcgccccggtgctgtggagagctgcaatcacgaggtgtgtgcccagaccggagagacggtccagcctctgatggctcggagatgatggaccgtggaagggaagcgtctgtggggagtgagcgcttagatggccagcagctgctccttctgggaagctcgcaccttggcaacagaacagccctctagcagagcgtcagtgcagtcgtgttatcccggcttttacagaatattcttgtcctattttagaattttccggagtagtttatttgcagtctgttgattatgtgcagtagacccgggacactgcgttttaccgatcaccttgaatgtggtgcctggatgtgccttttttttttttccctgaaattattattaattttctattgtgagttcatcagttcatagtttttttagtaaagaagcaaaattaaaaggcttttaaaaatgtacaacttcagaattataatctgttagtcaaatatttgttattaaacatttctgtaatatgaagttgtaatcctggccgtgagcttggaagcttacttttgattcttaaagcctatgttttctaaaatgagacaaatacggatgtctatttgccttttattgtaacttttaaatgaaataatttcatgtcaatttctattagatatatcacttaaaatatttggttttaaatcacaagaatatgtattctttaataaagataatttatgatcatggtataattaattgaaatttattaaaatctgtttttattaa

SEQ ID NO: 421663 - DNA, 1178 bp, Homo sapiens
gggacacagctgtccagctcagctgagagcacaggagcctccggggcatcagcgactggccggggtgagggatgccaccaggtgcagaggtggaggctcagggcgtgctggggaggaagagaggcttgtggaaaagtccagagggctccacgtgttccccacgtttgtggcgtacgagctcacggtgctggtgttcctcaccttgtcagtggtggtgatgaagtttctcctggcggcgctggtcctgtctctcattctgccgaggagcagccagtacatcaagtggatcgtctctgcggggcttgcccaggtcagcgagttttcctttgtcctggggagccgggcgcgaagagcgggcgtcatctctcgggaggtgtacctccttatactgagtgtgaccacgctcagcctcttgctcgccccggtgctgtggagagctgcaatcacgaggtgtgtgcccagaccggagagacggtccagcctctgatggctcggagatgatggaccgtggaagggaagcgtctgtggggagtgagcgcttagatggccagcagctgctccttctgggaagctcgcaccttggcaacagaacagccctctagcagagcgtcagtgcagtcgtgttatcccggcttttacagaatattcttgtcctattttagaattttccggagtagtttatttgcagtctgttgattatgtgcagtagacccgggacactgcgttttaccgatcaccttgaatgtggtgcctggatgtgccttttttttttttccctgaaattattattaattttctattgtgagttcatcagttcatagtttttttagtaaagaagcaaaattaaaaggcttttaaaaatgtacaacttcagaattataatctgttagtcaaatatttgttattaaacatttctgtaatatgaagttgtaatcctggccgtgagcttggaagcttacttttgattcttaaagcctatgttttctaaaatgagacaaatacggatgtctatttgccttttattgtaacttttaaatgaaataatttcatgtcaatttctattagatatatcacttaaaatatttggttttaaatcacaagaatatgtattctttaataaagataatttatgatcatggtataattaattgaaatttattaaaatctgtttttattaa

SEQ ID NO: 421664 - DNA, 1374 bp, Homo sapiens
atggcaatattttgactttggatacttttgagttgtcgtagacctgtcttcaatgcctttccccccacaggcgacattgactacagcaccgtgctcctcggcatgctggtgacgcaggacgtgcagctcgggctcttcatggccgtcatgccgactctcatacaggcgggcgccagtgcatcttctaggtcacggagctgctggacgtctccatggagctgggctgtttcctggctggagcgctcgtctcctctcagggccccgtggtcaccgaggagatcgccacctccatcgaacccatccgcgacttcctggccatcgttttcttcgcctccatagggctccacgtgttccccacgtttgtggcgtacgagctcacggtgctggtgttcctcaccttgtcagtggtggtgatgaagtttctcctggcggcgctggtcctgtctctcattctgccgaggagcagccagtacatcaagtggatcgtctctgcggggcttgcccaggtcagcgagttttcctttgtcctggggagccgggcgcgaagagcgggcgtcatctctcgggaggtgtacctccttatactgagtgtgaccacgctcagcctcttgctcgccccggtgctgtggagagctgcaatcacgaggtgtgtgcccagaccggagagacggtccagcctctgatggctcggagatgatggaccgtggaagggaagcgtctgtggggagtgagcgcttagatggccagcagctgctccttctgggaagctcgcaccttggcaacagaacagccctctagcagagcgtcagtgcagtcgtgttatcccggcttttacagaatattcttgtcctattttagaattttccggagtagtttatttgcagtctgttgattatgtgcagtagacccgggacactgcgttttaccgatcaccttgaatgtggtgcctggatgtgccttttttttttttccctgaaattattattaattttctattgtgagttcatcagttcatagtttttttagtaaagaagcaaaattaaaaggcttttaaaaatgtacaacttcagaattataatctgttagtcaaatatttgttattaaacatttctgtaatatgaagttgtaatcctggccgtgagcttggaagcttacttttgattcttaaagcctatgttttctaaaatgagacaaatacggatgtctatttgccttttattgtaacttttaaatgaaataatttcatgtcaatttctattagatatatcacttaaaatatttggttttaaatcacaagaatatgtattctttaataaagataatttatgatcatggtataattaattgaaatttattaaaatctgtttttattaa

SEQ ID NO: 421665 - DNA, 1105 bp, Homo sapiens
gagatgggaaggaagcctggaatctctggaacaggacattcccaagcaggaaggaagccagtggggctggagatgaaggggaggctttccaccgggcagcagcggggagaaaacgcagcccggaacgcccaagggctccacgtgttccccacgtttgtggcgtacgagctcacggtgctggtgttcctcaccttgtcagtggtggtgatgaagtttctcctggcggcgctggtcctgtctctcattctgccgaggagcagccagtacatcaagtggatcgtctctgcggggcttgcccaggtgtacctccttatactgagtgtgaccacgctcagcctcttgctcgccccggtgctgtggagagctgcaatcacgaggtgtgtgcccagaccggagagacggtccagcctctgatggctcggagatgatggaccgtggaagggaagcgtctgtggggagtgagcgcttagatggccagcagctgctccttctgggaagctcgcaccttggcaacagaacagccctctagcagagcgtcagtgcagtcgtgttatcccggcttttacagaatattcttgtcctattttagaattttccggagtagtttatttgcagtctgttgattatgtgcagtagacccgggacactgcgttttaccgatcaccttgaatgtggtgcctggatgtgccttttttttttttccctgaaattattattaattttctattgtgagttcatcagttcatagtttttttagtaaagaagcaaaattaaaaggcttttaaaaatgtacaacttcagaattataatctgttagtcaaatatttgttattaaacatttctgtaatatgaagttgtaatcctggccgtgagcttggaagcttacttttgattcttaaagcctatgttttctaaaatgagacaaatacggatgtctatttgccttttattgtaacttttaaatgaaataatttcatgtcaatttctattagatatatcacttaaaatatttggttttaaatcacaagaatatgtattctttaataaagataatttatgatcatggtataattaattgaaatttattaaaatctgtttttattaa

SEQ ID NO: 421666 - DNA, 1118 bp, Homo sapiens
ctcttaaagggggcagtgactgcggctgggcgggagtccgggtcggcttggctgagcgggggcggtgctgggcagggcggcggccgctccctcccggactcccggcctcccggcctccctggtcccgcctgggaagggatgcaaggaagccctccggcgctgcgctccgaggcgggagacagcgtccccctccgcccctcgggtcctggcgcctcagagcccggcccaggccgcggaacggtgatgctcgggccggacgggcgggcgcggatccctgcgtcccgctgaaaatgtgtgtctgacatgcaagctcagtggggcagagacccgtggattgctgtgccctgccctccggacctggatcatgaaggtgttgggaagaagcttcttctgggtgctgtttcccgtccttccctgggcggtgcaggctgtggagcacgaggaggtggcgcagcgtgtgatcaaactgcaccgcgggcgaggggtggctgccatgcagagccggcagtgggtccgggacagctgcaggaagctctcagggcttctccgccagaagaatgcagttctgaacaaactgaaaactgcaattggagcagtggagaaagacgtgggcctgtcggatgaagagaaactgtttcaggtgcacacgtttgaaattttccagaaagagctgaatgaaagtgaaaattccgttttccaagctgtctacggactgcagagagccctgcagggggattacaaagatgtcgtgaacatgaaggagagcagccggcagcgcctggaggccctgagagaggctgcaataaaggaagaaacagaatatatggaacttctggcagcagaaaaacatcaagttgaagcccttaaaaatatgcaacatcaaaaccaaagtttatccatgcttgacgagattcttgaagatgtaagaaaggcagcggatcgtctggaggaagagatagaggaacatgcttttgacgacaataaatcagtaagcgttccagaacagctgcttcttcacctcctgagccactcactaatcagaagacatgttgttgaaattgttcacgtgtatgtttttaatgtagattgaaaatgaagacaaactaaaatgcttctct

SEQ ID NO: 421667 - DNA, 569 bp, Homo sapiens
ataaagatgtagctgacctttaatcatctcagcccttcacaaagcaccatacaaggtacatcaacattcagtatttgattttaatctcagtgaaataaatagtttagatgttgatatttatctaggaaaaatgagaatttcttcagaaaggtgtcagtttttcagatctgattatttaatactctgatcaatagtaatgaatcattgtttaactatgtgtgacaataactctttttcagctgaaaatgtgtgtctgacatgcaagctcagtggggcagagacccgtggattgctgtgccctgccctccggacctggatcatgaaggtgttgggaagaagcttcttctgggtgctgtttcccgtccttccctgggcggtgcaggctgtggagcacgaggaggtggcgcagcgtgtgatcaaactgcaccgcgggcgaggggtggctgccatgcagagccggcagtgggtccgggacagctgcaggaagctctcagggcttctccgccagaagaatgcagttctgaacaaactgaaaactgcaattggagcagtggagaaagacgtgggcc

SEQ ID NO: 421668 - DNA, 432 bp, Homo sapiens
gcgacattgactacagcaccgtgctcctcggcatgctggtgacgcaggacgtgcagctcgggctcttcatggccgtcatgccgactctcatacaggcgggcgccagtgcatcttctaggtaaacgctttgtgtacgcaatttgtttttatagtttaaaatcacttgtgcataaaaatactacttaataccttttccaaagagatgttctgagctcagatggctcaggattccgtgcacagtccctggagcaacactgccttgctcacgccctggctctgtgcttagcagctcctcaccacgggcaggtgacttatcctcacagttcctcagtcctgtcttccatcaagtaggggtggtagtagtacccactgatggagtagtcaggaggaatgaatgagttccgatagaaacatgcttagaacaatgtccag

SEQ ID NO: 421669 - DNA, 3063 bp, Homo sapiens
tgccgggaggcggggcgcagggatccggaaacacctgatcatctataggtttagtgcctaatgggtgttgttcctggctggacttgatgtccagggcctgaggggttttctcgccgagtctcctggggcggtccggaggctcgtgccctgttgtggggcccccatttgccgccgccatgcccacggccgccgcccccatcatcagctcggtccagaagctggttctgtatgagactagagctagatactttctagttgggagcaataatgcagaaacgaaatatcgtgtcttgaagattgatagaacagaaccaaaagatttggtcataattgatgacaggcatgtctatactcaacaagaagtaagggaacttcttggccgcttggatcttggaaatagaacaaagatgggacagaaaggatcctcgggcttatttcgagcggtttcagcttttggtgttgtgggttttgtcaggttcttagaaggctattatattgtgttaataactaaaaggaggaagatggcggatattggaggtcatgcaatctataaggtcgaagatacaaatatgatctatatacccaatgattctgtacgggttactcatcctgatgaagctaggtatctacgaatatttcaaaatgtggacctatctagcaatttttactttagttacagctatgatttgtcccactcacttcaatataatctcactgtcttgcgaatgcccctggagatgttaaagtcagaaatgacccagaatcgccaagagagctttgacatctttgaagatgaaggattaattacacaaggtggaagcggggtatttgggatctgtagtgagccttatatgaaatatgtatggaatggtgaacttctggatataattaaaagtactgtgcatcgtgactggcttttgtatattattcatgggttctgtgggcagtcaaagctgttgatctatggacgaccagtgtatgtcactctaatagctagaagatccagtaaatttgctggcacccgttttcttaaaagaggtgcaaactgtgagggtgatgttgcaaatgaagtggagactgaacaaatactctgcgatgcttctgtgatgtctttcactgcaggaagttattcttcatatgtacaagttagaggatctgtgcccttatactggtctcaggacatttcaactatgatgcctaaaccacctattacattggatcaggcagatccatttgcacatgtggctgcccttcactttgaccagatgttccagaggtttggctctcccatcatcatcttgaatttagtgaaggaacgagagaaaagaaagcatgaaagaattctgagtgaagaacttgttgctgctgtgacctatctcaaccaatttttgcctcctgagcacactattgtttatattccctgggacatggccaagtataccaaaagcaagctgtgtaatgttcttgatcgactaaatgtgattgcagaaagtgtggtgaagaaaacaggtttctttgtaaaccgccctgattcttactgtagcattttgcggccagatgaaaagtggaatgaactaggaggatgtgtgattcccactggtcgcctgcagactggcatccttcgaaccaactgtgtggactgtttagatcgcaccaacacagcacagtttatggtgggaaaatgtgctctggcctatcagctgtattcactgggactgattgacaaacctaatctacagtttgatacagatgcagttaggttatttgaggaactctatgaagatcatggtgataccctatcccttcagtatggtggttctcaacttgttcatcgtgtgaaaacctacagaaagatagcaccatggacccagcactccaaagacatcatgcaaaccctgtctagatattacagcaatgctttttcagatgccgatagacaagattccattaatctcttcctgggagttttccatcccactgaagggaaacctcatctctgggagctcccaacagatttttatttgcatcacaaaaataccatgagacttttgccaacaagaagaagttatacttactggtggacaccagaggtgataaagcatttaccattgccctatgatgaagttatctgtgctgtgaacttaaagaagttgatagtgaagaaattccacaaatatgaagaagagattgatatccacaatgagttctttcggccatatgagttgagcagctttgatgataccttttgcttggctatgacaagctcagcacgtgactttatgcctaagaccgttggaattgatccaagtccatttactgtgcgtaaaccagatgaaactggaaaatcagtattgggaaacaaaagcaatagagaagaagctgtattacagcggaaaacggcagccagcgccccgccgccccccagcgaggaggctgtgtccagcagctctgaggatgactctgggactgatcgggaagaagagggctctgtgtctcagcgctccactcccgtgaagatgactgatgcaggagacagtgccaaagtgaccgagaatgtggtccaacccatgaaggagctatatggaattaacctctcagatggcctctcagaagaagatttctccatttattcaagatttgttcagctggggcagagtcaacataaacaagacaagaatagccagcagccctgttctaggtgctcagatggagttataaaactaacacccatctcggctttctcgcaagataacatctatgaagttcagcccccaagagtagacagaaaatctacagagatcttccaagcccacatccaggccagccaaggtatcatgcagcccctaggaaaagaggactcctccatgtaccgagagtacatcaggaaccgctacctgtgaaaagagcgcaggtccacctggtggacacgtctgattagcttagaacctgtcttgtctcatcttcaaaaggtaacttattaaaagtcctttgcgtctgaagcctttctccttttctgtcacttgcaaattccaaattatagctaataaagatgactagataatt

SEQ ID NO: 421670 - DNA, 453 bp, Homo sapiens
agtcagcctgcttattcaatgccagcgactctcaagtgcttctgagactgctccctgtggtccttccttatattttctttaatgcagccctctctttattcatcttttatagaacacccatctcggctttctcgcaagataacatctatgaagttcagcccccaagagtagacagaaaatctacagagatcttccaagcccacatccaggccagccaaggtatcatgcagcccctaggaaaagaggactcctccatgtaccgagagtacatcaggaaccgctacctgtgaaaagagcgcaggtccacctggtggacacgtctgattagcttagaacctgtcttgtctcatcttcaaaaggtaacttattaaaagtcctttgcgtctgaagcctttctccttttctgtcacttgcaaattccaaattatagctaataaagatgactagataatt

SEQ ID NO: 421671 - DNA, 886 bp, Homo sapiens
gggagatgaaagttgttaggataatttttactcttacttgttcaagattgttagcatatatgtatgcatttattgcctgccttgttccaaaaggatttaaggaagctccctcccacccccatcacagaaagtagaataaaacaagaaccacatgagatactttctagttgggagcaataatgcagaaacgaaatatcgtgtcttgaagattgatagaacagaaccaaaagatttggtcataattgatgacaggcatgtctatactcaacaagaagtaagggaacttcttggccgcttggatcttggaaatagaacaaagatgggacagaaaggatcctcgggcttatttcgagcggtttcagcttttggtgttgtgggttttgtcaggttcttagaaggctattatattgtgttaataactaaaaggaggaagatggcggatattggaggtcatgcaatctataaggtcgaagatacaaatatgatctatatacccaatgattctgtacgggttactcatcctgatgaagctaggtatctacgaatatttcaaaatgtggacctatctagcaatttttactttagttacagctatgatttgtcccactcacttcaatataatctcactgtcttgcgaatgcccctggagatgttaaagtcagaaatgacccagaatcgccaagagagctttgacatctttgaagatgaaggattaattacacaaggtggaagcggggtatttgggatctgtagtgagccttatatgaaatatgtatggaatggtgaacttctggatataattaaaagtactgtgcatcgtgactggcttttgtatattattcatgggttctgtgggcagtcaagtatcctttctgaagaaaaagta

SEQ ID NO: 421672 - DNA, 432 bp, Homo sapiens
caaccgctacttcctgccacctcttgactttatttatatatttgtaacatgtcctcaatttccttgtcattttcttttctctcaagaactctcacaagtcagaaaagggatttctttgactttttacagaatcaacacaatgttctggacatgaaaggaatgatatccactgaaaatggcaatgctattaaccaagcatgttactttgaagttaaaaacagaagttaacttaaaaatgagttgaatgtcagccaatttccatatctttctgataccaaccttttttttaattgatacaaaatattttgtgtatttatggactgatacagacttttatttttcaggggtatttgggatctgtagtgagccttatatgaaatatgtatggaatggtgaacttctggatataattaaaagtactgtgcatcgtga

SEQ ID NO: 421673 - DNA, 506 bp, Homo sapiens
caacgtctggctatcagcgtatcactgggacgatgaactatcacagtttgatacagaatgcagttaggttatttgaggaactctatgaagatcatggtgataccctatcccttcagtatggtggttctcaacttgttcatcgtgtgaaaacctacagaaagatagcaccatggacccagcactccaaagacatcatgcaaaccctgtctagatattacagcaatgctttttcagatgccgatagacaagattccattaatctcttcctgggagttttccatcccactgaagggaaacctcatctctgggagctcccaacagatttttatttgcatcacaaaaataccatgagacttttgccaacaagaagaagttatacttactggtggacaccagaggtgataaagcatttaccattgccctatgatgaagggttcctagcaagatctcctgcgaatctggaatgctccaattgaggactccatctagtcatgcttcagcatccc

SEQ ID NO: 421674 - DNA, 2585 bp, Homo sapiens
caaccgctacttcctgccacctcttgactttatttatatatttgtaacatgtcctcaatttccttgtcattttcttttctctcaagaactctcacaagtcagaaaagggatttctttgactttttacagaatcaacacaatgttctggacatgaaaggaatgatatccactgaaaatggcaatgctattaaccaagcatgttactttgaagttaaaaacagaagttaacttaaaaatgagttgaatgtcagccaatttccatatctttctgataccaaccttttttttaattgatacaaaatattttgtgtatttatggactgatacagacttttatttttcaggggtatttgggatctgtagtgagccttatatgaaatatgtatggaatggtgaacttctggatataattaaaagtactgtgcatcgtgactggcttttgtatattattcatgggttctgtgggcagtcaaagctgttgatctatggacgaccagtgtatgtcactctaatagctagaagatccagtaaatttgctggcacccgttttcttaaaagaggtgcaaactgtgagggtgatgttgcaaatgaagtggagactgaacaaatactctgcgatgcttctgtgatgtctttcactgcaggaagttattcttcatatgtacaagttagaggatctgtgcccttatactggtctcaggacatttcaactatgatgcctaaaccacctattacattggatcaggcagatccatttgcacatgtggctgcccttcactttgaccagatgttccagaggtttggctctcccatcatcatcttgaatttagtgaaggaacgagagaaaagaaagcatgaaagaattctgagtgaagaacttgttgctgctgtgacctatctcaaccaatttttgcctcctgagcacactattgtttatattccctgggacatggccaagtataccaaaagcaagctgtgtaatgttcttgatcgactaaatgtgattgcagaaagtgtggtgaagaaaacaggtttctttgtaaaccgccctgattcttactgtagcattttgcggccagatgaaaagtggaatgaactaggaggatgtgtgattcccactggtcgcctgcagactggcatccttcgaaccaactgtgtggactgtttagatcgcaccaacacagcacagtttatggtgggaaaatgtgctctggcctatcagctgtattcactgggactgattgacaaacctaatctacagtttgatacagatgcagttaggttatttgaggaactctatgaagatcatggtgataccctatcccttcagtatggtggttctcaacttgttcatcgtgtgaaaacctacagaaagatagcaccatggacccagcactccaaagacatcatgcaaaccctgtctagatattacagcaatgctttttcagatgccgatagacaagattccattaatctcttcctgggagttttccatcccactgaagggaaacctcatctctgggagctcccaacagatttttatttgcatcacaaaaataccatgagacttttgccaacaagaagaagttatacttactggtggacaccagaggtgataaagcatttaccattgccctatgatgaagttatctgtgctgtgaacttaaagaagttgatagtgaagaaattccacaaatatgaagaagagattgatatccacaatgagttctttcggccatatgagttgagcagctttgatgataccttttgcttggctatgacaagctcagcacgtgactttatgcctaagaccgttggaattgatccaagtccatttactgtgcgtaaaccagatgaaactggaaaatcagtattgggaaacaaaagcaatagagaagaagctgtattacagcggaaaacggcagccagcgccccgccgccccccagcgaggaggctgtgtccagcagctctgaggatgactctgggactgatcgggaagaagagggctctgtgtctcagcgctccactcccgtgaagatgactgatgcaggagacagtgccaaagtgaccgagaatgtggtccaacccatgaaggagctatatggaattaacctctcagatggcctctcagaagaagatttctccatttattcaagatttgttcagctggggcagagtcaacataaacaagacaagaatagccagcagccctgttctaggtgctcagatggagttataaaactaacacccatctcggctttctcgcaagataacatctatgaagttcagcccccaagagtagacagaaaatctacagagatcttccaagcccacatccaggccagccaaggtatcatgcagcccctaggaaaagaggactcctccatgtaccgagagtacatcaggaaccgctacctgtgaaaagagcgcaggtccacctggtggacacgtctgattagcttagaacctgtcttgtctcatcttcaaaaggtaacttattaaaagtcctttgcgtctgaagcctttctccttttctgtcacttgcaaattccaaattatagctaataaagatgactagataatt

SEQ ID NO: 421675 - DNA, 1235 bp, Homo sapiens
gagcaaaaaggaatttaaagaacctcctctaaataactgcctgctcccattggacttcctgaggccctcctggctccttagagcttgttgaactcagctttgcattgtattttctatgcatctatctcatctcctttctaactgtgtaagtgttggaggcaggagcttaccctcggtcagggctgtatcccccacagagcttatcacagtgctgtctgtgaacacagttaatattatggaaatgtttgcttgctataatctcagacttttagagtaacatgcagtatctctcttagttatctgtgctgtgaacttaaagaagttgatagtgaagaaattccacaaatatgaagaagagattgatatccacaatgagttctttcggccatatgagttgagcagctttgatgataccttttgcttggctatgacaagctcagcacgtgactttatgcctaagaccgttggaattgatccaagtccatttactgtgcgtaaaccagatgaaactggaaaatcagtattgggaaacaaaagcaatagagaagaagctgtattacagcggaaaacggcagccagcgccccgccgccccccagcgaggaggctgtgtccagcagctctgaggatgactctgggactgatcgggaagaagagggctctgtgtctcagcgctccactcccgtgaagatgactgatgcaggagacagtgccaaagtgaccgagaatgtggtccaacccatgaaggagctatatggaattaacctctcagatggcctctcagaagaagatttctccatttattcaagatttgttcagctggggcagagtcaacataaacaagacaagaatagccagcagccctgttctaggtgctcagatggagttataaaactaacacccatctcggctttctcgcaagataacatctatgaagttcagcccccaagagtagacagaaaatctacagagatcttccaagcccacatccaggccagccaaggtatcatgcagcccctaggaaaagaggactcctccatgtaccgagagtacatcaggaaccgctacctgtgaaaagagcgcaggtccacctggtggacacgtctgattagcttagaacctgtcttgtctcatcttcaaaaggtaacttattaaaagtcctttgcgtctgaagcctttctccttttctgtcacttgcaaattccaaattatagctaataaagatgactagataatt

SEQ ID NO: 421676 - DNA, 777 bp, Homo sapiens
cagagtgatagacagtgggtgttgagggttagtttaaagatgcttcacttccatattattcttttaaaagaaacaaaagcaatagagaagaagctgtattacagcggaaaacggcagccagcgccccgccgccccccagcgaggaggctgtgtccagcagctctgaggatgactctgggactgatcgggaagaagagggctctgtgtctcagcgctccactcccgtgaagatgactgatgcaggagacagtgccaaagtgaccgagaatgtggtccaacccatgaaggagctatatggaattaacctctcagatggcctctcagaagaagatttctccatttattcaagatttgttcagctggggcagagtcaacataaacaagacaagaatagccagcagccctgttctaggtgctcagatggagttataaaactaacacccatctcggctttctcgcaagataacatctatgaagttcagcccccaagagtagacagaaaatctacagagatcttccaagcccacatccaggccagccaaggtatcatgcagcccctaggaaaagaggactcctccatgtaccgagagtacatcaggaaccgctacctgtgaaaagagcgcaggtccacctggtggacacgtctgattagcttagaacctgtcttgtctcatcttcaaaaggtaacttattaaaagtcctttgcgtctgaagcctttctccttttctgtcacttgcaaattccaaattatagctaataaagatgactagataatt

SEQ ID NO: 421677 - DNA, 1429 bp, Homo sapiens
tgccgggaggcggggcgcagggatccggaaacacctgatcatctataggtttagtgcctaatgggtgttgttcctggctggacttgatgtccagggcctgaggggttttctcgccgagtctcctggggcggtccggaggctcgtgccctgttgtggggcccccatttgccgccgccatgcccacggccgccgcccccatcatcagctcggtccagaagctggttctgtatgagactagagctagatactttctagttgggagcaataatgcagaaacgaaatatcgtgtcttgaagattgatagaacagaaccaaaagatttggtcataattgatgacaggcatgtctatactcaacaagaagtaagggaacttcttggccgcttggatcttggaaatagaacaaagatgggacagaaaggatcctcgggcttatttcgagcggtttcagcttttggtgttgtgggttttgtcaggttcttagaaggctattatattgtgttaataactaaaaggaggaagatggcggatattggaggtcatgcaatctataaggtcgaagatacaaatatgatctatatacccaatgattctgtacgggttactcatcctgatgaagctaggtatctacgaatatttcaaaatgtggacctatctagcaatttttactttagttacagctatgatttgtcccactcacttcaatataatctcactgtcttgcgaatgcccctggagatgttaaagtcagaaatgacccagaatcgccaagagagctttgacatctttgaagatgaaggattaattacacaaggtggaagcggggtatttgggatctgtagtgagccttatatgaaatatgtatggaatggtgaacttctggatataattaaaagtactgtgcatcgtgactggcttttgtatattattcatgggttctgtgggcagtcaaagctgttgatctatggacgaccagtgtatgtcactctaatagctagaagatccagtaaatttgctggcacccgttttcttaaaagaggtgcaaactgtgagggtgatgttgcaaatgaagtggagactgaacaaatactctgcgatgcttctgtgatgtctttcactgcaggaagttattcttcatatgtacaagttagaggatctgtgcccttatactggtctcaggacatttcaactatgatgcctaaaccacctattacatgtgtgtggagccatgtttttaataataactcctgtcctcacatttagagataatgaactgttgtcacagaaatctcataaatgcttaggttttcaggaggttttagtcctggaaggtagataatttagaagaggaatttccgttattcttatgtaataaatttatgtttaattttgactgttaaataaattatttttattttgctcagaaatgt

SEQ ID NO: 421678 - DNA, 1199 bp, Homo sapiens
tgccgggaggcggggcgcagggatccggaaacacctgatcatctataggtttagtgcctaatgggtgttgttcctggctggacttgatgtccagggcctgaggggttttctcgccgagtctcctggggcggtccggaggctcgtgccctgttgtggggcccccatttgccgccgccatgcccacggccgccgcccccatcatcagctcggtccagaagctggttctgtatgagactagagctagatactttctagttgggagcaataatgcagaaacgaaatatcgtgtcttgaagattgatagaacagaaccaaaagatttggtcataattgatgacaggcatgtctatactcaacaagaagtaagggaacttcttggccgcttggatcttggaaatagaacaaagatgggacagaaaggatcctcgggcttatttcgagcggtttcagcttttggtgttgtgggttttgtcaggttcttagaaggctattatattgtgttaataactaaaaggaggaagatggcggatattggaggtcatgcaatctataaggtcgaagatacaaatatgatctatatacccaatgattctgtacgggttactcatcctgatgaagctaggtatctacgaatatttcaaaatgtggacctatctagcaatttttactttagttacagctatgatttgtcccactcacttcaatataatctcactgtcttgcgaatgcccctggagatgttaaagtcagaaatgacccagaatcgccaagagagctttgacatctttgaagatgaaggattaattacacaaggtggaagcgggtgatgttgcaaatgaagtggagactgaacaaatactctgcgatgcttctgtgatgtctttcactgcaggaagttattcttcatatgtacaagttagaggatctgtgcccttatactggtctcaggacatttcaactatgatgcctaaaccacctattacatgtgtgtggagccatgtttttaataataactcctgtcctcacatttagagataatgaactgttgtcacagaaatctcataaatgcttaggttttcaggaggttttagtcctggaaggtagataatttagaagaggaatttccgttattcttatgtaataaatttatgtttaattttgactgttaaataaattatttttattttgctcagaaatgt

SEQ ID NO: 421679 - DNA, 2150 bp, Homo sapiens
  misc_feature (816)..(816): n is a, c, g, or t
gctaaacccctgtgaatgttcttctaaccttcctgttccccaccccttttctcagatttgacctagaattcccagcccaaatccataatttcttagctctaatacgaattttcatgttggacaaaaacctagctacaaatgggtttctatggaacttctaattaatgtgcaaaatacatattttctccaggttaagaaattttaagtcagatcatgctgacacaataagaaaatttgtttgtgtaattcattgacctcttccttccaaaataacatcaagtagccacctcagtgtgacaatatccagtcaatagtagagaatttaatccttggtcctataaaagaataaaattcattgtcgtatttatagcacgtaagccttgagtaacaggtcttaatgttagtgttggtgttgtggtttctgcggaacgtttacaagtgaagttggattctcctgggctttaaatccaaaaagtcttaatgaccgcttcatgtagttcccctcttattcccctgtggtctcctcagagccagcgtgtgctgggaaagagtattagtcatagcctggctttatagaatccaggaggtccttttagctgaaacaagtggcttcaaaagggaacatgaaacagtgaaaagatagccaaaggtcagtgaaaccacagcatttctttctaatctggctgaggccatgggggggaatgaggggaaaatatgcttccgggccaaggtcaccgagggggaccttgggatttgtgtcctccccagtgcttagagtagagatacctgcaaattcatggcaaacagttggaaganttacttgactgaaacaacccaatcttactttctttcgtaagttgaacctctgatttattgtggggttcaggctctcctcaatagaaggccagagttggacaggtggactaaggtcaaggatgaggagtctgcagtggggactaccacagcaaactgccttccttccgtggagtcctaactcagccatgtggtccactcacccaggggcccgggggctcagacaaaccccatggggaacatgctgccatgctctgtctttcttgtaaacgtagttgggtagggatcccaagggtatttgctctctccaaatgcagaacttccatccactttatctggtgatctgatgaacagcatggggacgtggaggtgaaataagcatctttcagaataaggtttttttttttttcctcttccagaaccaaaggctttagacatttgtagaactttctggattccttctgaatcgggttttaacataaaaaaccatcaacacatcatgggaaaggagctctttcatgatatacatcacatgtttcttgctctcactgaggaaatgtgttgtacaaaagcaccaaataagggcaccctggaagtgacatgtgtgtttcttctaagtcgtttttagtgcatcccctgcgattgcatgatgctcatgtggcttttagggaaaggcagaatgtgctagaagtcgaagtcattcaatattcagtgcttactgttactttgaaccaggtaatctcagttctttattcagtccttcccaaagaccttacaaaggagatgtgtaaactgatagattttgagcctaataagtcacagaaatggaaaattttagagcagtttgtttcacttaggtgagaactgattactttaaattaccaacatgtgcaaattctacttagtattcattattagatgctaagctggaaaagatgagaaacccaaggagaactattgaattaccacataattgtaatattatgctttaattttgtatgggcagtgttctatcagactaagcttctagcctttgaaatgatttacatgaggagagagcctgtatatctgacttgggaaacattaagcagaccctattttcactggcgcggtaataactatttatttgctatcctagaggtgctgggaatgagcctacgtgcgactttgatgagatatattcacatttggtgttggaacgaccacatagcaacgtgttggtttttttttattgtaacactctgtgtaaacgttgacaccttattaaatattaaatgtctgaactctatttttaaaaataaaacaagcacagagtctgcaacaaacatgtaaatgga

SEQ ID NO: 421680 - DNA, 713 bp, Homo sapiens
ccaaacaagctactgaggctatcagtaaaattatactcatggagagtcacacatcgggtaagggcaattttaaaagtaggactgtgattaaacattcaggctttagacttccatgatggactcagaccacaggcctcaaaaaaacatccactgttttctcctcccaatgttagaaagaagaaaagggagaaggaaatgtaccaggataagggggtaaaataaccaattaagtgtcaaaggaaagctgctgggttccttaatctcactgaagtcaagtcttctgactgggcttctttccatgtgttgtctgaaaaaactaaagtaccttgaaaggttacacattcagcaaaccatgaagataatagctattctttattaaacactgtgtgccaagcaatagactaggcaatttttagatacgttacctgcaacctgtacaacatttctacactttatggatgggaaacggagacatgggaagtgtggctgagttgttcatggatgtagaaatagtaaacggcaaagtaggaaagtgaaaccgcctatctctgacctgggaggtctgcctgtattctttcccactccaccacactgcacgtggggtgttcccgaaaccaccttcccagatttcctgattctcagtaattttatttatgggacaacatgcatgagtagtcatcatatttttcaagtgaaatatcgggacatgatat

SEQ ID NO: 421681 - DNA, 637 bp, Homo sapiens
ggatgctcttcttttccagtgccttcagtttgttggaggatgcttgattctcacagtgaaacacagggaggaatttctggcccatgtgggtatgtggccaacctttgaaggaactggaaaccaacttaagctcctcagattcaggtctccttcagtagacctaatcagcatctgaagcttgttagcagattcatggttccttaggagccctcactaccctgtcttttgtactctgggcaggctgatctggttgaggaggttaagaagaaaccctggtttgaatagaattaaatgaggtcagcaatgtgggtttgacacgaagcctttgaaagataggctatataaagtcaagatatttctgtcccagaggaaacatatgccaatatatagccacctcccagccccacccaagcttcccctttgtaaaccttcagcaggtaagcactcctgctccccctgttccaagaaactaacgtttaagtacaaagatcacgctttgttgtgtgtgggggtgtttctttttgttgctgtttggaagaattgtgatgtggcataaagactgttgttattgaacccatctctaaataaacagctaaacttaaaatatgctactttttttctggcctttaaagatctt

SEQ ID NO: 421682 - DNA, 1002 bp, Homo sapiens
  misc_feature (22)..(22): n is a, c, g, or t
  misc_feature (32)..(32): n is a, c, g, or t
  misc_feature (941)..(941): n is a, c, g, or t
  misc_feature (943)..(943): n is a, c, g, or t
  misc_feature (951)..(951): n is a, c, g, or t
  misc_feature (954)..(954): n is a, c, g, or t
gcccctaccgcagaagtccggngttaatcggncgagggtgcattctcgcttccgtagcggtctccgccggttgggggaaagtaattccggctgttgcaccatggcgtccatggggaccctcgccttcgatgaatatgggcgccctttcctcatcatcaaggatcaggaccgcaagtcccgtcttatgggacttgaggccctcaagtctcatataatggcagcaaaggctgtagcaaatacaatgagaacatcacttggaccaaatgggcttgataagatgatggtggataaggatggggatgtgactgtaactaatgatggggccaccatcttaagcatgatggatgttgatcatcagattgccaagctgatggtggaactgtccaagtctcaggatgatgaaattggagatggaaccacaggagtggttgtcctggctggtgccttgttagaagaagcggagcaattgctagaccgaggcattcacccaatcagaatagccgatggctatgagcaggctgctcgcgttgctattgaacacctggacaagatcagcgatagcgtccttgttgacataaaggacaccgaacccctgattcagacagcaaaaaccacgctgggctccaaagtggtcaacagttgtcaccgacagatggctgagattgctgtgaatgccgtcctcactgtagcagatatggagcggagagacgttgactttgagcttatcaaagtagaaggcaaagtgggcggcaggctggaggacactaaactgattaagggcgtgattgtggacaaggatttcagtcacccacagatgccaaaaaaggtggagatgcgaagattgcattctccactgtcctttgaaccaccaaacaaaaaaaggtagtgggttgactcgtgaaaatttaagcttgaattaaagggattggggatgtttccantnaaaggggnccncatggggggtgggtaaaaactttttaaatgggggcgcgggggcaagtc

SEQ ID NO: 421683 - DNA, 1046 bp, Homo sapiens
  misc_feature (7)..(7): n is a, c, g, or t
  misc_feature (18)..(18): n is a, c, g, or t
  misc_feature (919)..(919): n is a, c, g, or t
tggaagnagacaaactanggctaggtacgaggctgggtttgaatcggccgaggtccggctgttgcaccatggcgtccatggggaccctcgccttcgatgaatatgggcgccctttcctcatcatcaaggatcaggaccgcaagtcccgtcttatgggacttgaggccctcaagtctcatataatggcagcaaaggctgtagcaaatacaatgagaacatcacttggaccaaatgggcttgataagatgatggtggataaggatggggatgtgactgtaactaatgatggggccaccatcttaagcatgatggatgttgatcatcagattgccaagctgatggtggaactgtccaagtctcaggatgatgaaattggagatggaaccacaggagtggttgtcctggctggtgccttgttagaagaagcggagcaattgctagaccgaggcattcacccaatcagaatagccgatggctatgagcaggctgctcgcgttgctattgaacacctggacaagatcagcgatagcgtccttgttgacataaaggacaccgaacccctgattcagacagcaaaaaccacgctgggctccaaagtggtcaacagttgtcaccgacagatggctgagattgctgtgaatgccgtcctcactgtagcagatatggagcggagagacgttgactttgagcttatcaaagtagaaggcaaagtgggcggcaggctggaggacactaaactgattaagggcgtgattgtggacaaggatttcagtcacccacagatgccaaaaaaagtggaagatgcgaagattgcaattctcacatgtccatttgaaccacccaaaccaaaaacaaagcataagctggatgtgacctctgtgaaatttaagccttcgaatccaaagggaattggagaagnccccattagagggctccagcatgcggtggaaacacacctctcaaatgcgggctggagcaaaagatctcaggggcacggaacgacgggggggactgaactgccaccataagagcacgctggggcctag

SEQ ID NO: 421684 - DNA, 946 bp, Homo sapiens
  misc_feature (885)..(885): n is a, c, g, or t
  misc_feature (887)..(887): n is a, c, g, or t
  misc_feature (895)..(895): n is a, c, g, or t
  misc_feature (898)..(898): n is a, c, g, or t
cggacgcgtgggtcgacccacgcgtccggtccggctgttgcaccatggcgtccatggggaccctcgccttcgatgaatatgggcgccctttcctcatcatcaaggatcaggaccgcaagtcccgtcttatgggacttgaggccctcaagtctcatataatggcagcaaaggctgtagcaaatacaatgagaacatcacttggaccaaatgggcttgataagatgatggtggataaggatggggatgtgactgtaactaatgatggggccaccatcttaagcatgatggatgttgatcatcagattgccaagctgatggtggaactgtccaagtctcaggatgatgaaattggagatggaaccacaggagtggttgtcctggctggtgccttgttagaagaagcggagcaattgctagaccgaggcattcacccaatcagaatagccgatggctatgagcaggctgctcgcgttgctattgaacacctggacaagatcagcgatagcgtccttgttgacataaaggacaccgaacccctgattcagacagcaaaaaccacgctgggctccaaagtggtcaacagttgtcaccgacagatggctgagattgctgtgaatgccgtcctcactgtagcagatatggagcggagagacgttgactttgagcttatcaaagtagaaggcaaagtgggcggcaggctggaggacactaaactgattaagggcgtgattgtggacaaggatttcagtcacccacagatgccaaaaaaggtggagatgcgaagattgcattctccactgtcctttgaaccaccaaacaaaaaaaggtagtgggttgactcgtgaaaatttaagcttgaattaaagggattggggatgtttccantnaaaggggnccncatggggggtgggtaaaaactttttaaatgggggcgcgggggcaagtc

SEQ ID NO: 421685 - DNA, 800 bp, Homo sapiens
  misc_feature (1)..(2): n is a, c, g, or t
  misc_feature (28)..(29): n is a, c, g, or t
  misc_feature (31)..(31): n is a, c, g, or t
nnaggctaggtacgaggctgggtggcgnncntatgggcgccctttcctcatcatcaaggatcaggaccgcaagtcccgtcttatgggacttgaggccctcaagtctcatataatggcagcaaaggctgtagcaaatacaatgagaacatcacttggaccaaatgggcttgataagatgatggtggataaggatggggatgtgactgtaactaatgatggggccaccatcttaagcatgatggatgttgatcatcagattgccaagctgatggtggaactgtccaagtctcaggatgatgaaattggagatggaaccacaggagtggttgtcctggctggtgccttgttagaagaagcggagcaattgctagaccgaggcattcacccaatcagaatagccgatggctatgagcaggctgctcgcgttgctattgaacacctggacaagatcagcgatagcgtccttgttgacataaaggacaccgaacccctgattcagacagcaaaaaccacgctgggctccaaagtggtcaacagttgtcaccgacagatggctgagattgctgtgaatgccgtcctcactgtagcagatatggagcggagagacgttgactttgagcttatcaaagtagaaggcaaagtgggcggcaggctggaggacactaaactgattaagggcgtgattgtggacaaggatttcagtcacccacagatgccaaaaaaggggagagcgagatgcgatctccactgtcatttgaccaccaacaaaaaaagatagcgatggaccgggaaataagcct

SEQ ID NO: 421686 - DNA, 638 bp, Homo sapiens
cagaacaagaaccaaaaacaacaagaggaggaaataacgatgatcattgaggaggcgaaacgatcccttcacgatgctttgtgtgtcatccggaacctcatccgcgataatcgtgtggtgtatggaggaggggctgctgagatatcctgtgccctggcagttagccaagaggcggataagtgccccaccttagaacagtatgccatgagagcgtttgccgacgcactggaggtcatccccatggccctctctgaaaacagtggcatgaatcccatccagactatgaccgaagtccgagccagacaggtgaaggagatgaaccctgctcttggcatcgactgtttgcacaaggggacaaatgatatgaagcaacagcatgtcatagaaaccttgattggcaaaaagcaacagatatctcttgcaacacaaatggttagaatgattttgaagattgatgacattcgtaagcctggagaatctgaagaatgaagacattgagaaaactatgtagcaagatccacttctgtgattaagtaaatggatgtctcgtgatgcgtctacagttatttattgttacatccttttcctgtctcttgtgttgtttttgtttttttgcttgtttggttctctgtgttttt

SEQ ID NO: 421687 - DNA, 2221 bp, Homo sapiens
aataaagaaatagtgctttaagtcaatgaattcctccttgggacccactatcgagaaactatcagtggtaacgttttaaaaaatgacaaattcaatctgctcttgacttgtgtgtcctaagatttccactaagtgtcttcaaacctccccctccccggcttcctggataatagaagttcccgaaggccgccgattccagaagatactgtctggcgtgaaattagtctcagtagaaacataagtcccgcgcgtcttgtgctgcgcgtgcgcaagcttttgggccctcccgagaaagggaagtgcattctcgcttccgtagcggtctccgccggttgggggaaagtaattccggctgttgcaccatggcgtccatggggaccctcgccttcgatgaatatgggcgccctttcctcatcatcaaggatcaggaccgcaagtcccgtcttatgggacttgaggccctcaagtctcatataatggcagcaaaggctgtagcaaatacaatgagaacatcacttggaccaaatgggcttgataagatgatggtggataaggatggggatgtgactgtaactaatgatggggccaccatcttaagcatgatggatgttgatcatcagattgccaagctgatggtggaactgtccaagtctcaggatgatgaaattggagatggaaccacaggagtggttgtcctggctggtgccttgttagaagaagcggagcaattgctagaccgaggcattcacccaatcagaatagccgatggctatgagcaggctgctcgcgttgctattgaacacctggacaagatcagcgatagcgtccttgttgacataaaggacaccgaacccctgattcagacagcaaaaaccacgctgggctccaaagtggtcaacagttgtcaccgacagatggctgagattgctgtgaatgccgtcctcactgtagcagatatggagcggagagacgttgactttgagcttatcaaagtagaaggcaaagtgggcggcaggctggaggacactaaactgattaagggcgtgattgtggacaaggatttcagtcacccacagatgccaaaaaaagtggaagatgcgaagattgcaattctcacatgtccatttgaaccacccaaaccaaaaacaaagcataagctggatgtgacctctgtcgaagattataaagcccttcagaaatacgaaaaggagaaatttgaagagatgattcaacaaattaaagagactggtgctaacctagcaatttgtcagtggggctttgatgatgaagcaaatcacttacttcttcagaacaacttgcctgcggttcgctgggtaggaggacctgaaattgagctgattgccatcgcaacaggagggcggatcgtccccaggttctcagagctcacagccgagaagctgggctttgctggtcttgtacaggagatctcatttgggacaactaaggataaaatgctggtcatcgagcagtgtaagaactccagagctgtaaccatttttattagaggaggaaataagatgatcattgaggaggcgaaacgatcccttcacgatgctttgtgtgtcatccggaacctcatccgcgataatcgtgtggtgtatggaggaggggctgctgagatatcctgtgccctggcagttagccaagaggcggataagtgccccaccttagaacagtatgccatgagagcgtttgccgacgcactggaggtcatccccatggccctctctgaaaacagtggcatgaatcccatccagactatgaccgaagtccgagccagacaggtgaaggagatgaaccctgctcttggcatcgactgtttgcacaaggggacaaatgatatgaagcaacagcatgtcatagaaaccttgattggcaaaaagcaacagatatctcttgcaacacaaatggttagaatgattttgaagattgatgacattcgtaagcctggagaatctgaagaatgaagacattgagaaaactatgtagcaagatccacttctgtgattaagtaaatggatgtctcgtgatgcgtctacagttatttattgttacatccttttccagacactgtagatgctataataaaaatagctgtttggtaaccatagtttcacttgttcaaagctgtgtaatcgtgggggtactatctcaactgcttttgtattcattgtattaaaagaatctgtttaaacaacct

SEQ ID NO: 421688 - DNA, 2046 bp, Homo sapiens
  misc_feature (5)..(5): n is a, c, g, or t
  misc_feature (16)..(17): n is a, c, g, or t
  misc_feature (43)..(43): n is a, c, g, or t
taccncacgcgtcctnncacgctgcagctttcacgaggcatcntggcctactcattagaaacataagtcccgcgcgtcttgtgctgcgcgtgcgcaagcttttgggccctcccgagaaagggaagtgcattctcgcttccgtagcggtctccgccggttgggggaaagtaattccggctgttgcaccatggcgtccatggggaccctcgccttcgatgaatatgggcgccctttcctcatcatcaaggatcaggaccgcaagtcccgtcttatgggacttgaggccctcaagtctcatataatggcagcaaaggctgtagcaaatacaatgagaacatcacttggaccaaatgggcttgataagatgatggtggataaggatggggatgtgactgtaactaatgatggggccaccatcttaagcatgatggatgttgatcatcagattgccaagctgatggtggaactgtccaagtctcaggatgatgaaattggagatggaaccacaggagtggttgtcctggctggtgccttgttagaagaagcggagcaattgctagaccgaggcattcacccaatcagaatagccgatggctatgagcaggctgctcgcgttgctattgaacacctggacaagatcagcgatagcgtccttgttgacataaaggacaccgaacccctgattcagacagcaaaaaccacgctgggctccaaagtggtcaacagttgtcaccgacagatggctgagattgctgtgaatgccgtcctcactgtagcagatatggagcggagagacgttgactttgagcttatcaaagtagaaggcaaagtgggcggcaggctggaggacactaaactgattaagggcgtgattgtggacaaggatttcagtcacccacagatgccaaaaaaagtggaagatgcgaagattgcaattctcacatgtccatttgaaccacccaaaccaaaaacaaagcataagctggatgtgacctctgtcgaagattataaagcccttcagaaatacgaaaaggagaaatttgaagagatgattcaacaaattaaagagactggtgctaacctagcaatttgtcagtggggctttgatgatgaagcaaatcacttacttcttcagaacaacttgcctgcggttcgctgggtaggaggacctgaaattgagctgattgccatcgcaacaggagggcggatcgtccccaggttctcagagctcacagccgagaagctgggctttgctggtcttgtacaggagatctcatttgggacaactaaggataaaatgctggtcatcgagcagtgtaagaactccagagctgtaaccatttttattagaggaggaaataagatgatcattgaggaggcgaaacgatcccttcacgatgctttgtgtgtcatccggaacctcatccgcgataatcgtgtggtgtatggaggaggggctgctgagatatcctgtgccctggcagttagccaagaggcggataagtgccccaccttagaacagtatgccatgagagcgtttgccgacgcactggaggtcatccccatggccctctctgaaaacagtggcatgaatcccatccagactatgaccgaagtccgagccagacaggtgaaggagatgaaccctgctcttggcatcgactgtttgcacaaggggacaaatgatatgaagcaacagcatgtcatagaaaccttgattggcaaaaagcaacagatatctcttgcaacacaaatggttagaatgattttgaagattgatgacattcgtaagcctggagaatctgaagaatgaagacattgagaaaactatgtagcaagatccacttctgtgattaagtaaatggatgtctcgtgatgcgtctacagttatttattgttacatccttttccagacactgtagatgctataataaaaatagctgtttggtaaccatagtttcacttgttcaaagctgtgtaatcgtgggggtactatctcaactgcttttgtattcattgtattaaaagaatctgtttaaacaacct

SEQ ID NO: 421689 - DNA, 2285 bp, Homo sapiens
aataaagaaatagtgctttaagtcaatgaattcctccttgggacccactatcgagaaactatcagtggtaacgttttaaaaaatgacaaattcaatctgctcttgacttgtgtgtcctaagatttccactaagtgtcttcaaacctccccctccccggcttcctggataatagaagttcccgaaggccgccgattccagaagatactgtctggcgtgaaattagtctcagtagaaacataagtcccgcgcgtcttgtgctgcgcgtgcgcaagcttttgggccctcccgagaaagggaagtgcattctcgcttccgtagcggtctccgccggttgggggaaagtaattccggctgttgcaccatggcgtccatggggaccctcgccttcgatgaatatgggcgccctttcctcatcatcaaggatcaggaccgcaagtcccgtcttatgggacttgaggccctcaagtctcatataatggcagcaaaggctgtagcaaatacaatgagaacatcacttggaccaaatgggcttgataagatgatggtggataaggatggggatgtgactgtaactaatgatggggccaccatcttaagcatgatggatgttgatcatcagattgccaagctgatggtggaactgtccaagtctcaggatgatgaaattggagatggaaccacaggagtggttgtcctggctggtgccttgttagaagaagcggagcaattgctagaccgaggcattcacccaatcagaatagccgatggctatgagcaggctgctcgcgttgctattgaacacctggacaagatcagcgatagcgtccttgttgacataaaggacaccgaacccctgattcagacagcaaaaaccacgctgggctccaaagtggtcaacagttgtcaccgacagatggctgagattgctgtgaatgccgtcctcactgtagcagatatggagcggagagacgttgactttgagcttatcaaagtagaaggcaaagtgggcggcaggctggaggacactaaactgattaagggcgtgattgtggacaaggatttcagtcacccacagatgccaaaaaaagtggaagatgcgaagattgcaattctcacatgtccatttgaaccacccaaaccaaaaacaaagcataagctggatgtgacctctgtcgaagattataaagcccttcagaaatacgaaaaggagaaatttgaagagatgattcaacaaattaaagagactggtgctaacctagcaatttgtcagtggggctttgatgatgaagcaaatcacttacttcttcagaacaacttgcctgcggttcgctgggtaggaggacctgaaattgagctgattgccatcgcaacaggagggcggatcgtccccaggttctcagagctcacagccgagaagctgggctttgctggtcttgtacaggagatctcatttgggacaactaaggataaaatgctggtcatcgagcagtgtaagaactccagagctgtaaccatttttattagaggaggaaataagatgatcattgaggaggcgaaacgatcccttcacgatgctttgtgtgtcatccggaacctcatccgcgataatcgtgtggtgtatggaggaggggctgctgagatatcctgtgccctggcagttagccaagaggcggataagtgccccaccttagaacagtatgccatgagagcgtttgccgacgcactggaggtcatccccatggccctctctgaaaacagtggcatgaatcccatccagactatgaccgaagtccgagccagacaggtgaaggagatgaaccctgctcttggcatcgactgtttgcacaaggggacaaatgatatgaagcaacagcatgtcatagaaaccttgattggcaaaaagcaacagatatctcttgcaacacaaatggttagaatgattttgaagattgatgacattcgtaagcctggagaatctgaagaatgaagacattgagaaaactatgtagcaagatccacttctgtgattaagtaaatggatgtctcgtgatgcgtctacagttatttattgttacatccttttccagacactgtagatgctataataaaaatagctgtttggtaaccatagtttcacttgttcaaagctgtgtaatcgtgggggtactatctcaactgcttttgtattcattgtattaaaagaatctgtttaaacaacctttatcttctcttcgggtttaagaaacgtttattgtaacagtaattaaatgctgccttaattgaa

SEQ ID NO: 421690 - DNA, 3593 bp, Homo sapiens
aataaagaaatagtgctttaagtcaatgaattcctccttgggacccactatcgagaaactatcagtggtaacgttttaaaaaatgacaaattcaatctgctcttgacttgtgtgtcctaagatttccactaagtgtcttcaaacctccccctccccggcttcctggataatagaagttcccgaaggccgccgattccagaagatactgtctggcgtgaaattagtctcagtagaaacataagtcccgcgcgtcttgtgctgcgcgtgcgcaagcttttgggccctcccgagaaagggaagtgcattctcgcttccgtagcggtctccgccggttgggggaaagtaattccggctgttgcaccatggcgtccatggggaccctcgccttcgatgaatatgggcgccctttcctcatcatcaaggatcaggaccgcaagtcccgtcttatgggacttgaggccctcaagtctcatataatggcagcaaaggctgtagcaaatacaatgagaacatcacttggaccaaatgggcttgataagatgatggtggataaggatggggatgtgactgtaactaatgatggggccaccatcttaagcatgatggatgttgatcatcagattgccaagctgatggtggaactgtccaagtctcaggatgatgaaattggagatggaaccacaggagtggttgtcctggctggtgccttgttagaagaagcggagcaattgctagaccgaggcattcacccaatcagaatagccgatggctatgagcaggctgctcgcgttgctattgaacacctggacaagatcagcgatagcgtccttgttgacataaaggacaccgaacccctgattcagacagcaaaaaccacgctgggctccaaagtggtcaacagttgtcaccgacagatggctgagattgctgtgaatgccgtcctcactgtagcagatatggagcggagagacgttgactttgagcttatcaaagtagaaggcaaagtgggcggcaggctggaggacactaaactgattaagggcgtgattgtggacaaggatttcagtcacccacagatgccaaaaaaagtggaagatgcgaagattgcaattctcacatgtccatttgaaccacccaaaccaaaaacaaagcataagctggatgtgacctctgtcgaagattataaagcccttcagaaatacgaaaaggagaaatttgaagagatgattcaacaaattaaagagactggtgctaacctagcaatttgtcagtggggctttgatgatgaagcaaatcacttacttcttcagaacaacttgcctgcggttcgctgggtaggaggacctgaaattgagctgattgccatcgcaacaggagggcggatcgtccccaggttctcagagctcacagccgagaagctgggctttgctggtcttgtacaggagatctcatttgggacaactaaggataaaatgctggtcatcgagcagtgtaagaactccagagctgtaaccatttttattagaggaggaaataagatgatcattgaggaggcgaaacgatcccttcacgatgctttgtgtgtcatccggaacctcatccgcgataatcgtgtggtgtatggaggaggggctgctgagatatcctgtgccctggcagttagccaagaggcggataagtgccccaccttagaacagtatgccatgagagcgtttgccgacgcactggaggtcatccccatggccctctctgaaaacagtggcatgaatcccatccagactatgaccgaagtccgagccagacaggtgaaggagatgaaccctgctcttggcatcgactgtttgcacaaggggacaaatgatatgaagcaacagcatgtcatagaaaccttgattggcaaaaagcaacagatatctcttgcaacacaaatggttagaatgattttgaagattgatgacattcgtaagcctggagaatctgaagaatgaagacattgagaaaactatgtagcaagatccacttctgtgattaagtaaatggatgtctcgtgatgcgtctacagttatttattgttacatccttttccagacactgtagatgctataataaaaatagctgtttggtaaccatagtttcacttgttcaaagctgtgtaatcgtgggggtactatctcaactgcttttgtattcattgtattaaaagaatctgtttaaacaacctttatcttctcttcgggtttaagaaacgtttattgtaacagtaattaaatgctgccttaattgaaggggttgggtggatttttttttctcaaaataagctgtagggactattttaacagcttaaacaggagctctcaagatgcactttcgtattgagaggaatatgggcttgatcctcttcctatctaaatgggtgggccatttgattgtagagggtccaccacagaattatgggatgccttaagtgctgttactaggttgctcacagcctaacctggcgtgttgtttagggctgatggagacccatgtgagcctttgctttcctctggccccagccccaccctgaacacagctcatacgcagaatcaggaccagcatgtgcagagctggccaccagcacaggcttagggcagttcagaacccacttgtttccctatcagagggacacagtgaagtggaggttaaagtaaattacaggaaataagggagaaatcttgcagttaccatgttcagatagagtgactgaaattaattgtacttactaaagtattaactagctaacagtgatgggccaagacgctccgagaactgtaccgggattgtctgttctgacaacccagtgaggcagatacactttcttactgctcacatcttacaggtgagtactcataattggccagcatctcaccaccagcaagtagtagggccaggtcaatcccaggcagtctgaccccagagtggcccagctcatcccctactctgttatttgcttgttaatgattctctagattttctaaaataatgtttcttagcattgtgatgataaagctcatgatgaactttatcactagttatgccaccttaactagtcagatttcctagaattaggaaatggtgactcttgtctaaatttggttaagtgatgaatttgggttaccttctcatgtgaacctggagattcaccagtcttaacttttgggtcattgtgttttctctacattcatgcattggatgttttgctaaataactcctgtggatttaggaatgtgtgctaatagcaatcttcctaattttcatgtttatatggaactatgcagttgagtattgaaagctttaaactgagtttatttacaaggactgagtctagcctacagagaacatacagcagccttctttggaccacagtcttatccgaggggtctgtggttgtatcagaagagccactaaaccaatccccctttccaaaattgaacctcacagacgttcctgttttttgtgattgagaaactggtcaatgaacaggaagacttagagatgtttcacaagcctttgatttttgtttcatttatttgtaataaacctcttccacgtga

SEQ ID NO: 421691 - DNA, 4010 bp, Homo sapiens
aataaagaaatagtgctttaagtcaatgaattcctccttgggacccactatcgagaaactatcagtggtaacgttttaaaaaatgacaaattcaatctgctcttgacttgtgtgtcctaagatttccactaagtgtcttcaaacctccccctccccggcttcctggataatagaagttcccgaaggccgccgattccagaagatactgtctggcgtgaaattagtctcagtagaaacataagtcccgcgcgtcttgtgctgcgcgtgcgcaagcttttgggccctcccgagaaagggaagtgcattctcgcttccgtagcggtctccgccggttgggggaaagtaattccggctgttgcaccatggcgtccatggggaccctcgccttcgatgaatatgggcgccctttcctcatcatcaaggatcaggaccgcaagtcccgtcttatgggacttgaggccctcaagtctcatataatggcagcaaaggctgtagcaaatacaatgagaacatcacttggaccaaatgggcttgataagatgatggtggataaggatggggatgtgactgtaactaatgatggggccaccatcttaagcatgatggatgttgatcatcagattgccaagctgatggtggaactgtccaagtctcaggatgatgaaattggagatggaaccacaggagtggttgtcctggctggtgccttgttagaagaagcggagcaattgctagaccgaggcattcacccaatcagaatagccgatggctatgagcaggctgctcgcgttgctattgaacacctggacaagatcagcgatagcgtccttgttgacataaaggacaccgaacccctgattcagacagcaaaaaccacgctgggctccaaagtggtcaacagttgtcaccgacagatggctgagattgctgtgaatgccgtcctcactgtagcagatatggagcggagagacgttgactttgagcttatcaaagtagaaggcaaagtgggcggcaggctggaggacactaaactgattaagggcgtgattgtggacaaggatttcagtcacccacagatgccaaaaaaagtggaagatgcgaagattgcaattctcacatgtccatttgaaccacccaaaccaaaaacaaagcataagctggatgtgacctctgtcgaagattataaagcccttcagaaatacgaaaaggagaaatttgaagagatgattcaacaaattaaagagactggtgctaacctagcaatttgtcagtggggctttgatgatgaagcaaatcacttacttcttcagaacaacttgcctgcggttcgctgggtaggaggacctgaaattgagctgattgccatcgcaacaggagggcggatcgtccccaggttctcagagctcacagccgagaagctgggctttgctggtcttgtacaggagatctcatttgggacaactaaggataaaatgctggtcatcgagcagtgtaagaactccagagctgtaaccatttttattagaggaggaaataagatgatcattgaggaggcgaaacgatcccttcacgatgctttgtgtgtcatccggaacctcatccgcgataatcgtgtggtgtatggaggaggggctgctgagatatcctgtgccctggcagttagccaagaggcggataagtgccccaccttagaacagtatgccatgagagcgtttgccgacgcactggaggtcatccccatggccctctctgaaaacagtggcatgaatcccatccagactatgaccgaagtccgagccagacaggtgaaggagatgaaccctgctcttggcatcgactgtttgcacaaggggacaaatgatatgaagcaacagcatgtcatagaaaccttgattggcaaaaagcaacagatatctcttgcaacacaaatggttagaatgattttgaagattgatgacattcgtaagcctggagaatctgaagaatgaagacattgagaaaactatgtagcaagatccacttctgtgattaagtaaatggatgtctcgtgatgcgtctacagttatttattgttacatccttttccagacactgtagatgctataataaaaatagctgtttggtaaccatagtttcacttgttcaaagctgtgtaatcgtgggggtactatctcaactgcttttgtattcattgtattaaaagaatctgtttaaacaacctttatcttctcttcgggtttaagaaacgtttattgtaacagtaattaaatgctgccttaattgaaggggttgggtggatttttttttctcaaaataagctgtagggactattttaacagcttaaacaggagctctcaagatgcactttcgtattgagaggaatatgggcttgatcctcttcctatctaaatgggtgggccatttgattgtagagggtccaccacagaattatgggatgccttaagtgctgttactaggttgctcacagcctaacctggcgtgttgtttagggctgatggagacccatgtgagcctttgctttcctctggccccagccccaccctgaacacagctcatacgcagaatcaggaccagcatgtgcagagctggccaccagcacaggcttagggcagttcagaacccacttgtttccctatcagagggacacagtgaagtggaggttaaagtaaattacaggaaataagggagaaatcttgcagttaccatgttcagatagagtgactgaaattaattgtacttactaaagtattaactagctaacagtgatgggccaagacgctccgagaactgtaccgggattgtctgttctgacaacccagtgaggcagatacactttcttactgctcacatcttacaggtgagtactcataattggccagcatctcaccaccagcaagtagtagggccaggtcaatcccaggcagtctgaccccagagtggcccagctcatcccctactctgttatttgcttgttaatgattctctagattttctaaaataatgtttcttagcattgtgatgataaagctcatgatgaactttatcactagttatgccaccttaactagtcagatttcctagaattaggaaatggtgactcttgtctaaatttggttaagtgatgaatttgggttaccttctcatgtgaacctggagattcaccagtcttaacttttgggtcattgtgttttctctacattcatgcattggatgttttgctaaataactcctgtggatttaggaatgtgtgctaatagcaatcttcctaattttcatgtttatatggaactatgcagttgagtattgaaagctttaaactgagtttatttacaaggactgagtctagcctacagagaacatacagcagccttctttggaccacagtcttatccgaggggtctgtggttgtatcagaagagccactaaaccaatccccctttccaaaattgaacctcacagacgttcctgttttttgtgattgagaaactggtcaatgaacaggaagacttagagatgtttcacaagcctttgatttttgtttcatttatttgtaataaacctcttccacgtgatgtcttttatttttcacgttccagatcactcaagttttattttgctggtactttggccacaccctctccttccccatgtggagcaaaagcaacttagggtgcttgacccaaaggctagattcccatgtaagtccccatgtattactgctggttcccgatttctacacctgctggattcattggaggtttgttaaatgtcctgtttttaatttcagcctactcaatttctatgtgggggcagttccaggatgtcctgtaggtgccagatttcatggacactcaagtccctgataaaaaatcgtggtatttgcatataacatacatcctcctgtatactttaaatcatctctatttttcataatatctaatataaatgatatgtaagtgtcatactgtatttagggagtaatgacaaga

SEQ ID NO: 421692 - DNA, 2884 bp, Homo sapiens
  misc_feature (2327)..(2327): n is a, c, g, or t
  misc_feature (2649)..(2649): n is a, c, g, or t
  misc_feature (2884)..(2884): n is a, c, g, or t
aataaagaaatagtgctttaagtcaatgaattcctccttgggacccactatcgagaaactatcagtggtaacgttttaaaaaatgacaaattcaatctgctcttgacttgtgtgtcctaagatttccactaagtgtcttcaaacctccccctccccggcttcctggataatagaagttcccgaaggccgccgattccagaagatactgtctggcgtgaaattagtctcagtagaaacataagtcccgcgcgtcttgtgctgcgcgtgcgcaagcttttgggccctcccgagaaagggaagtgcattctcgcttccgtagcggtctccgccggttgggggaaagtaattccggctgttgcaccatggcgtccatggggaccctcgccttcgatgaatatgggcgccctttcctcatcatcaaggatcaggaccgcaagtcccgtcttatgggacttgaggccctcaagtctcatataatggcagcaaaggctgtagcaaatacaatgagaacatcacttggaccaaatgggcttgataagatgatggtggataaggatggggatgtgactgtaactaatgatggggccaccatcttaagcatgatggatgttgatcatcagattgccaagctgatggtggaactgtccaagtctcaggatgatgaaattggagatggaaccacaggagtggttgtcctggctggtgccttgttagaagaagcggagcaattgctagaccgaggcattcacccaatcagaatagccgatggctatgagcaggctgctcgcgttgctattgaacacctggacaagatcagcgatagcgtccttgttgacataaaggacaccgaacccctgattcagacagcaaaaaccacgctgggctccaaagtggtcaacagttgtcaccgacagatggctgagattgctgtgaatgccgtcctcactgtagcagatatggagcggagagacgttgactttgagcttatcaaagtagaaggcaaagtgggcggcaggctggaggacactaaactgattaagggcgtgattgtggacaaggatttcagtcacccacagatgccaaaaaaagtggaagatgcgaagattgcaattctcacatgtccatttgaaccacccaaaccaaaaacaaagcataagctggatgtgacctctgtcgaagattataaagcccttcagaaatacgaaaaggagaaatttgaagagatgattcaacaaattaaagagactggtgctaacctagcaatttgtcagtggggctttgatgatgaagcaaatcacttacttcttcagaacaacttgcctgcggttcgctgggtaggaggacctgaaattgagctgattgccatcgcaacaggagggcggatcgtccccaggttctcagagctcacagccgagaagctgggctttgctggtcttgtacaggagatctcatttgggacaactaaggataaaatgctggtcatcgagcagtgtaagaactccagagctgtaaccatttttattagaggaggaaataagatgatcattgaggaggcgaaacgatcccttcacgatgctttgtgtgtcatccggaacctcatccgcgataatcgtgtggtgtatggaggaggggctgctgagatatcctgtgccctggcagttagccaagaggcggataagtgccccaccttagaacagtatgccatgagagcgtttgccgacgcactggaggtcatccccatggccctctctgaaaacagtggcatgaatcccatccagactatgaccgaagtccgagccagacaggtgaaggagatgaaccctgctcttggcatcgactgtttgcacaaggggacaaatgatatgaagcaacagcatgtcatagaaaccttgattggcaaaaagcaacagatatctcttgcaacacaaatggttagaatgattttgaagattgatgacattcgtaagcctggagaatctgaagaatgaagacattgagaaaactatgtagcaagatccacttctgtgattaagtaaatggatgtctcgtgatgcgtctacagttatttattgttacatccttttccagacactgtagatgctataataaaaatagctgtttggtaaccatagtttcacttgttcaaagctgtgtaatcgtgggggtactatctcaactgcttttgtattcattgtattaaaagaatctgtttaaacaacctttatcttctcttcgggtttaagaaacgtttattgtaacagtaattaaatgctgccttaattgaaaaaaaaaaaaaaaaaaaaaaaaaaaaaaaaaaaaaaaaaaanaaaaaaaaaaaaaaaaaaaagaaaaaaaaaagaaacacaacagaaacaaaacacaacaaaaacagagagggggggcgcgggcgacaaagaaatcccagcgggagcgggaacaacatttgacaccaccccagtttttttttaaagagggggcaccacaatagaggagggggctaaaaaagagcgaggggacgggggagtaaaacaacgcggcggggagagacacacacgcgtgggggcggttgtgagggagaacccccttctgcgggggcgccagtggaaccccccccaggaagataaaagagggcggagggaaaaacaaacnggggggtgtggaggggccaccaggactttttgggtgctgggaatattctctccttctttctttcattgacggcccgtctgcctatccaaaataccacgggtagagagaacgagagaagtgggacagcagagtagaagcagcgaaccatcgcacaaaaacacgagagcacaaacacaacgaccggacgacaaagacgacacagagggaggaaggagaaagacacaatcattaagcn

SEQ ID NO: 421693 - DNA, 2820 bp, Homo sapiens
  misc_feature (2263)..(2263): n is a, c, g, or t
  misc_feature (2585)..(2585): n is a, c, g, or t
  misc_feature (2820)..(2820): n is a, c, g, or t
aataaagaaatagtgctttaagtcaatgaattcctccttgggacccactatcgagaaactatcagtggtaacgttttaaaaaatgacaaattcaatctgctcttgacttgtgtgtcctaagatttccactaagtgtcttcaaacctccccctccccggcttcctggataatagaagttcccgaaggccgccgattccagaagatactgtctggcgtgaaattagtctcagtagaaacataagtcccgcgcgtcttgtgctgcgcgtgcgcaagcttttgggccctcccgagaaagggaagtgcattctcgcttccgtagcggtctccgccggttgggggaaagtaattccggctgttgcaccatggcgtccatggggaccctcgccttcgatgaatatgggcgccctttcctcatcatcaaggatcaggaccgcaagtcccgtcttatgggacttgaggccctcaagtctcatataatggcagcaaaggctgtagcaaatacaatgagaacatcacttggaccaaatgggcttgataagatgatggtggataaggatggggatgtgactgtaactaatgatggggccaccatcttaagcatgatggatgttgatcatcagattgccaagctgatggtggaactgtccaagtctcaggatgatgaaattggagatggaaccacaggagtggttgtcctggctggtgccttgttagaagaagcggagcaattgctagaccgaggcattcacccaatcagaatagccgatggctatgagcaggctgctcgcgttgctattgaacacctggacaagatcagcgatagcgtccttgttgacataaaggacaccgaacccctgattcagacagcaaaaaccacgctgggctccaaagtggtcaacagttgtcaccgacagatggctgagattgctgtgaatgccgtcctcactgtagcagatatggagcggagagacgttgactttgagcttatcaaagtagaaggcaaagtgggcggcaggctggaggacactaaactgattaagggcgtgattgtggacaaggatttcagtcacccacagatgccaaaaaaagtggaagatgcgaagattgcaattctcacatgtccatttgaaccacccaaaccaaaaacaaagcataagctggatgtgacctctgtcgaagattataaagcccttcagaaatacgaaaaggagaaatttgaagagatgattcaacaaattaaagagactggtgctaacctagcaatttgtcagtggggctttgatgatgaagcaaatcacttacttcttcagaacaacttgcctgcggttcgctgggtaggaggacctgaaattgagctgattgccatcgcaacaggagggcggatcgtccccaggttctcagagctcacagccgagaagctgggctttgctggtcttgtacaggagatctcatttgggacaactaaggataaaatgctggtcatcgagcagtgtaagaactccagagctgtaaccatttttattagaggaggaaataagatgatcattgaggaggcgaaacgatcccttcacgatgctttgtgtgtcatccggaacctcatccgcgataatcgtgtggtgtatggaggaggggctgctgagatatcctgtgccctggcagttagccaagaggcggataagtgccccaccttagaacagtatgccatgagagcgtttgccgacgcactggaggtcatccccatggccctctctgaaaacagtggcatgaatcccatccagactatgaccgaagtccgagccagacaggtgaaggagatgaaccctgctcttggcatcgactgtttgcacaaggggacaaatgatatgaagcaacagcatgtcatagaaaccttgattggcaaaaagcaacagatatctcttgcaacacaaatggttagaatgattttgaagattgatgacattcgtaagcctggagaatctgaagaatgaagacattgagaaaactatgtagcaagatccacttctgtgattaagtaaatggatgtctcgtgatgcgtctacagttatttattgttacatccttttccagacactgtagatgctataataaaaatagctgtttggtaaccatagtttcacttgttcaaagctgtgtaatcgtgggggtactatctcaactgcttttgtattcattgtattaaaagaatctgtttaaacaacctaaaaaaaaaaaaaaaaaaaaaaaaaaaaaaaaaaaaaaaaanaaaaaaaaaaaaaaaaaaaagaaaaaaaaaagaaacacaacagaaacaaaacacaacaaaaacagagagggggggcgcgggcgacaaagaaatcccagcgggagcgggaacaacatttgacaccaccccagtttttttttaaagagggggcaccacaatagaggagggggctaaaaaagagcgaggggacgggggagtaaaacaacgcggcggggagagacacacacgcgtgggggcggttgtgagggagaacccccttctgcgggggcgccagtggaaccccccccaggaagataaaagagggcggagggaaaaacaaacnggggggtgtggaggggccaccaggactttttgggtgctgggaatattctctccttctttctttcattgacggcccgtctgcctatccaaaataccacgggtagagagaacgagagaagtgggacagcagagtagaagcagcgaaccatcgcacaaaaacacgagagcacaaacacaacgaccggacgacaaagacgacacagagggaggaaggagaaagacacaatcattaagcn

SEQ ID NO: 421694 - DNA, 2283 bp, Homo sapiens
aataaagaaatagtgctttaagtcaatgaattcctccttgggacccactatcgagaaactatcagtggtaacgttttaaaaaatgacaaattcaatctgctcttgacttgtgtgtcctaagatttccactaagtgtcttcaaacctccccctccccggcttcctggataatagaagttcccgaaggccgccgattccagaagatactgtctggcgtgaaattagtctcagtagaaacataagtcccgcgcgtcttgtgctgcgcgtgcgcaagcttttgggccctcccgagaaagggaagtgcattctcgcttccgtagcggtctccgccggttgggggaaagtaattccggctgttgcaccatggcgtccatggggaccctcgccttcgatgaatatgggcgccctttcctcatcatcaaggatcaggaccgcaagtcccgtcttatgggacttgaggccctcaagtctcatataatggcagcaaaggctgtagcaaatacaatgagaacatcacttggaccaaatgggcttgataagatgatggtggataaggatggggatgtgactgtaactaatgatggggccaccatcttaagcatgatggatgttgatcatcagattgccaagctgatggtggaactgtccaagtctcaggatgatgaaattggagatggaaccacaggagtggttgtcctggctggtgccttgttagaagaagcggagcaattgctagaccgaggcattcacccaatcagaatagccgatggctatgagcaggctgctcgcgttgctattgaacacctggacaagatcagcgatagcgtccttgttgacataaaggacaccgaacccctgattcagacagcaaaaaccacgctgggctccaaagtggtcaacagttgtcaccgacagatggctgagattgctgtgaatgccgtcctcactgtagcagatatggagcggagagacgttgactttgagcttatcaaagtagaaggcaaagtgggcggcaggctggaggacactaaactgattaagggcgtgattgtggacaaggatttcagtcacccacagatgccaaaaaaagtggaagatgcgaagattgcaattctcacatgtccatttgaaccacccaaaccaaaaacaaagcataagctggatgtgacctctgtcgaagattataaagcccttcagaaatacgaaaaggagaaatttgaagagatgattcaacaaattaaagagactggtgctaacctagcaatttgtcagtggggctttgatgatgaagcaaatcacttacttcttcagaacaacttgcctgcggttcgctgggtaggaggacctgaaattgagctgattgccatcgcaacaggagggcggatcgtccccaggttctcagagctcacagccgagaagctgggctttgctggtcttgtacaggagatctcatttgggacaactaaggataaaatgctggtcatcgagcagtgtaagaactccagagctgtaaccatttttattagaggaggaaataagatgatcattgaggaggcgaaacgatcccttcacgatgctttgtgtgtcatccggaacctcatccgcgataatcgtgtggtgtatggaggaggggctgctgagatatcctgtgccctggcagttagccaagaggcggataagtgccccaccttagaacagtatgccatgagagcgtttgccgacgcactggaggtcatccccatggccctctctgaaaacagtggcatgaatcccatccagactatgaccgaagtccgagccagacaggtgaaggagatgaaccctgctcttggcatcgactgtttgcacaaggggacaaatgatatgaagcaacagcatgtcatagaaaccttgattggcaaaaagcaacagatatctcttgcaacacaaatggttagaatgattttgaagattgatgacattcgtaagcctggagaatctgaagaatgaagacattgagaaaactatgtagcaagatccacttctgtgattaagtaaatggatgtctcgtgatgcgtctacagttatttattgttacatccttttccagacactgtagatgctataataaaaatagctgtttggtaaccatagtttcacttgttcaaagctgtgtaatcgtgggggtactatctcaactgcttttgtattcattgtattaaaagaatctgtttaaacaacctttaaatacgcctgtttacagtatatgcctttctcctgcggtcgtgcggcgtggtgcggcggc

SEQ ID NO: 421695 - DNA, 1955 bp, Homo sapiens
  misc_feature (7)..(7): n is a, c, g, or t
  misc_feature (18)..(18): n is a, c, g, or t
tggaagnagacaaactanggctaggtacgaggctgggtttgaatcggccgaggcggtctccgccggttgggggaaagtaattccggctgttgcaccatggcgtccatggggaccctcgccttcgatgaatatgggcgccctttcctcatcatcaaggatcaggaccgcaagtcccgtcttatgggacttgaggccctcaagtctcatataatggcagcaaaggctgtagcaaatacaatgagaacatcacttggaccaaatgggcttgataagatgatggtggataaggatggggatgtgactgtaactaatgatggggccaccatcttaagcatgatggatgttgatcatcagattgccaagctgatggtggaactgtccaagtctcaggatgatgaaattggagatggaaccacaggagtggttgtcctggctggtgccttgttagaagaagcggagcaattgctagaccgaggcattcacccaatcagaatagccgatggctatgagcaggctgctcgcgttgctattgaacacctggacaagatcagcgatagcgtccttgttgacataaaggacaccgaacccctgattcagacagcaaaaaccacgctgggctccaaagtggtcaacagttgtcaccgacagatggctgagattgctgtgaatgccgtcctcactgtagcagatatggagcggagagacgttgactttgagcttatcaaagtagaaggcaaagtgggcggcaggctggaggacactaaactgattaagggcgtgattgtggacaaggatttcagtcacccacagatgccaaaaaaagtggaagatgcgaagattgcaattctcacatgtccatttgaaccacccaaaccaaaaacaaagcataagctggatgtgacctctgtcgaagattataaagcccttcagaaatacgaaaaggagaaatttgaagagatgattcaacaaattaaagagactggtgctaacctagcaatttgtcagtggggctttgatgatgaagcaaatcacttacttcttcagaacaacttgcctgcggttcgctgggtaggaggacctgaaattgagctgattgccatcgcaacaggagggcggatcgtccccaggttctcagagctcacagccgagaagctgggctttgctggtcttgtacaggagatctcatttgggacaactaaggataaaatgctggtcatcgagcagtgtaagaactccagagctgtaaccatttttattagaggaggaaataagatgatcattgaggaggcgaaacgatcccttcacgatgctttgtgtgtcatccggaacctcatccgcgataatcgtgtggtgtatggaggaggggctgctgagatatcctgtgccctggcagttagccaagaggcggataagtgccccaccttagaacagtatgccatgagagcgtttgccgacgcactggaggtcatccccatggccctctctgaaaacagtggcatgaatcccatccagactatgaccgaagtccgagccagacaggtgaaggagatgaaccctgctcttggcatcgactgtttgcacaaggggacaaatgatatgaagcaacagcatgtcatagaaaccttgattggcaaaaagcaacagatatctcttgcaacacaaatggttagaatgattttgaagattgatgacattcgtaagcctggagaatctgaagaatgaagacattgagaaaactatgtagcaagatccacttctgtgattaagtaaatggatgtctcgtgatgcgtctacagttatttattgttacatccttttccagacactgtagatgctataataaaaatagctgtttggtaaccatagtttcacttgttcaaagctgtgtaatcgtgggggtactatctcaactgcttttgtattcattgtattaaaagaatctgtttaaacaacct

SEQ ID NO: 421696 - DNA, 2248 bp, Homo sapiens
aataaagaaatagtgctttaagtcaatgaattcctccttgggacccactatcgagaaactatcagtggtaacgttttaaaaaatgacaaattcaatctgctcttgacttgtgtgtcctaagatttccactaagtgtcttcaaacctccccctccccggcttcctggataatagaagttcccgaaggccgccgattccagaagatactgtctggcgtgaaattagtctcagtagaaacataagtcccgcgcgtcttgtgctgcgcgtgcgcaagcttttgggccctcccgagaaagggaagtgcattctcgcttccgtagcggtctccgccggttgggggaaagtaattccggctgttgcaccatggcgtccatggggaccctcgccttcgatgaatatgggcgccctttcctcatcatcaaggatcaggaccgcaagtcccgtcttatgggacttgaggccctcaagtctcatataatggcagcaaaggctgtagcaaatacaatgagaacatcacttggaccaaatgggcttgataagatgatggtggataaggatggggatgtgactgtaactaatgatggggccaccatcttaagcatgatggatgttgatcatcagattgccaagctgatggtggaactgtccaagtctcaggatgatgaaattggagatggaaccacaggagtggttgtcctggctggtgccttgttagaagaagcggagcaattgctagaccgaggcattcacccaatcagaatagccgatggctatgagcaggctgctcgcgttgctattgaacacctggacaagatcagcgatagcgtccttgttgacataaaggacaccgaacccctgattcagacagcaaaaaccacgctgggctccaaagtggtcaacagttgtcaccgacagatggctgagattgctgtgaatgccgtcctcactgtagcagatatggagcggagagacgttgactttgagcttatcaaagtagaaggcaaagtgggcggcaggctggaggacactaaactgattaagggcgtgattgtggacaaggatttcagtcacccacagatgccaaaaaaagtggaagatgcgaagattgcaattctcacatgtccatttgaaccacccaaaccaaaaacaaagcataagctggatgtgacctctgtcgaagattataaagcccttcagaaatacgaaaaggagaaatttgaagagatgattcaacaaattaaagagactggtgctaacctagcaatttgtcagtggggctttgatgatgaagcaaatcacttacttcttcagaacaacttgcctgcggttcgctgggtaggaggacctgaaattgagctgattgccatcgcaacaggagggcggatcgtccccaggttctcagagctcacagccgagaagctgggctttgctggtcttgtacaggagatctcatttgggacaactaaggataaaatgctggtcatcgagcagtgtaagaactccagagctgtaaccatttttattagaggaggaaataagatgatcattgaggaggcgaaacgatcccttcacgatgctttgtgtgtcatccggaacctcatccgcgataatcgtgtggtgtatggaggaggggctgctgagatatcctgtgccctggcagttagccaagaggcggataagtgccccaccttagaacagtatgccatgagagcgtttgccgacgcactggaggtcatccccatggccctctctgaaaacagtggcatgaatcccatccagactatgaccgaagtccgagccagacaggtgaaggagatgaaccctgctcttggcatcgactgtttgcacaaggggacaaatgatatgaagcaacagcatgtcatagaaaccttgattggcaaaaagcaacagatatctcttgcaacacaaatggttagaatgattttgaagattgatgacattcgtaagcctggagaatctgaagaatgaagacattgagaaaactatgtagcaagatccacttctgtgattaagtaaatggatgtctcgtgatgcgtctacagttatttattgttacatccttttccagacactgtagatgctataataaaaatagctgtttggtaaccatagtttcacttgttcaaagctgtgtaatcgtgggttgtaattacaaccccacgatcacgtaggactttaatcgttgaacaaacgaccttaatagcggctgcaccatcgggatgtcctga

SEQ ID NO: 421697 - DNA, 2275 bp, Homo sapiens
aataaagaaatagtgctttaagtcaatgaattcctccttgggacccactatcgagaaactatcagtggtaacgttttaaaaaatgacaaattcaatctgctcttgacttgtgtgtcctaagatttccactaagtgtcttcaaacctccccctccccggcttcctggataatagaagttcccgaaggccgccgattccagaagatactgtctggcgtgaaattagtctcagtagaaacataagtcccgcgcgtcttgtgctgcgcgtgcgcaagcttttgggccctcccgagaaagggaagtgcattctcgcttccgtagcggtctccgccggttgggggaaagtaattccggctgttgcaccatggcgtccatggggaccctcgccttcgatgaatatgggcgccctttcctcatcatcaaggatcaggaccgcaagtcccgtcttatgggacttgaggccctcaagtctcatataatggcagcaaaggctgtagcaaatacaatgagaacatcacttggaccaaatgggcttgataagatgatggtggataaggatggggatgtgactgtaactaatgatggggccaccatcttaagcatgatggatgttgatcatcagattgccaagctgatggtggaactgtccaagtctcaggatgatgaaattggagatggaaccacaggagtggttgtcctggctggtgccttgttagaagaagcggagcaattgctagaccgaggcattcacccaatcagaatagccgatggctatgagcaggctgctcgcgttgctattgaacacctggacaagatcagcgatagcgtccttgttgacataaaggacaccgaacccctgattcagacagcaaaaaccacgctgggctccaaagtggtcaacagttgtcaccgacagatggctgagattgctgtgaatgccgtcctcactgtagcagatatggagcggagagacgttgactttgagcttatcaaagtagaaggcaaagtgggcggcaggctggaggacactaaactgattaagggcgtgattgtggacaaggatttcagtcacccacagatgccaaaaaaagtggaagatgcgaagattgcaattctcacatgtccatttgaaccacccaaaccaaaaacaaagcataagctggatgtgacctctgtcgaagattataaagcccttcagaaatacgaaaaggagaaatttgaagagatgattcaacaaattaaagagactggtgctaacctagcaatttgtcagtggggctttgatgatgaagcaaatcacttacttcttcagaacaacttgcctgcggttcgctgggtaggaggacctgaaattgagctgattgccatcgcaacaggagggcggatcgtccccaggttctcagagctcacagccgagaagctgggctttgctggtcttgtacaggagatctcatttgggacaactaaggataaaatgctggtcatcgagcagtgtaagaactccagagctgtaaccatttttattagaggaggaaataagatgatcattgaggaggcgaaacgatcccttcacgatgctttgtgtgtcatccggaacctcatccgcgataatcgtgtggtgtatggaggaggggctgctgagatatcctgtgccctggcagttagccaagaggcggataagtgccccaccttagaacagtatgccatgagagcgtttgccgacgcactggaggtcatccccatggccctctctgaaaacagtggcatgaatcccatccagactatgaccgaagtccgagccagacaggtgaaggagatgaaccctgctcttggcatcgactgtttgcacaaggggacaaatgatatgaagcaacagcatgtcatagaaaccttgattggcaaaaagcaacagatatctcttgcaacacaaatggttagaatgattttgaagattgatgacattcgtaagcctggagaatctgaagaatgaagacattgagaaaactatgtagcaagatccacttctgtgattaagtaaatggatgtctcgtgatgcgtctacagttatttattgttacatccttttccagacactgtagatgctataataaaaatagctgtttggtaacaaacccaaaaacacgaaaaaaaaaggggggggggaaaaattcctcaggggccagttgggtcccgttttggtaaaggggcccaatgggggggatataaagagggggggcgggttaacgcggacgggaacacgggccgggttttgaagac

SEQ ID NO: 421698 - DNA, 2243 bp, Homo sapiens
  misc_feature (2043)..(2043): n is a, c, g, or t
  misc_feature (2111)..(2111): n is a, c, g, or t
  misc_feature (2119)..(2120): n is a, c, g, or t
  misc_feature (2123)..(2123): n is a, c, g, or t
  misc_feature (2125)..(2125): n is a, c, g, or t
  misc_feature (2131)..(2131): n is a, c, g, or t
  misc_feature (2151)..(2151): n is a, c, g, or t
  misc_feature (2159)..(2159): n is a, c, g, or t
  misc_feature (2215)..(2215): n is a, c, g, or t
aataaagaaatagtgctttaagtcaatgaattcctccttgggacccactatcgagaaactatcagtggtaacgttttaaaaaatgacaaattcaatctgctcttgacttgtgtgtcctaagatttccactaagtgtcttcaaacctccccctccccggcttcctggataatagaagttcccgaaggccgccgattccagaagatactgtctggcgtgaaattagtctcagtagaaacataagtcccgcgcgtcttgtgctgcgcgtgcgcaagcttttgggccctcccgagaaagggaagtgcattctcgcttccgtagcggtctccgccggttgggggaaagtaattccggctgttgcaccatggcgtccatggggaccctcgccttcgatgaatatgggcgccctttcctcatcatcaaggatcaggaccgcaagtcccgtcttatgggacttgaggccctcaagtctcatataatggcagcaaaggctgtagcaaatacaatgagaacatcacttggaccaaatgggcttgataagatgatggtggataaggatggggatgtgactgtaactaatgatggggccaccatcttaagcatgatggatgttgatcatcagattgccaagctgatggtggaactgtccaagtctcaggatgatgaaattggagatggaaccacaggagtggttgtcctggctggtgccttgttagaagaagcggagcaattgctagaccgaggcattcacccaatcagaatagccgatggctatgagcaggctgctcgcgttgctattgaacacctggacaagatcagcgatagcgtccttgttgacataaaggacaccgaacccctgattcagacagcaaaaaccacgctgggctccaaagtggtcaacagttgtcaccgacagatggctgagattgctgtgaatgccgtcctcactgtagcagatatggagcggagagacgttgactttgagcttatcaaagtagaaggcaaagtgggcggcaggctggaggacactaaactgattaagggcgtgattgtggacaaggatttcagtcacccacagatgccaaaaaaagtggaagatgcgaagattgcaattctcacatgtccatttgaaccacccaaaccaaaaacaaagcataagctggatgtgacctctgtcgaagattataaagcccttcagaaatacgaaaaggagaaatttgaagagatgattcaacaaattaaagagactggtgctaacctagcaatttgtcagtggggctttgatgatgaagcaaatcacttacttcttcagaacaacttgcctgcggttcgctgggtaggaggacctgaaattgagctgattgccatcgcaacaggagggcggatcgtccccaggttctcagagctcacagccgagaagctgggctttgctggtcttgtacaggagatctcatttgggacaactaaggataaaatgctggtcatcgagcagtgtaagaactccagagctgtaaccatttttattagaggaggaaataagatgatcattgaggaggcgaaacgatcccttcacgatgctttgtgtgtcatccggaacctcatccgcgataatcgtgtggtgtatggaggaggggctgctgagatatcctgtgccctggcagttagccaagaggcggataagtgccccaccttagaacagtatgccatgagagcgtttgccgacgcactggaggtcatccccatggccctctctgaaaacagtggcatgaatcccatccagactatgaccgaagtccgagccagacaggtgaaggagatgaaccctgctcttggcatcgactgtttgcacaaggggacaaatgatatgaagcaacagcatgtcatagaaaccttgattggcaaaaagcaacagatatctcttgcaacacaaatggttagaatgattttgaagattgatgacattcgtaagcctggagaatctgaagaatgaagacattgagaaaactatgtagcaagatccacttctgtgattaagtaaatggacngtcctccgtgactgccgtcctccaccttttttacttgttccactccctttctccacacacctttagantgcctttnnctntnaaattntgcgtgtttcggtaccactngtttcacnttcttcaaatgcttttttattccgtggggcttcttttttctacttttttttttttnatttttttttttttttttttttttactt

SEQ ID NO: 421699 - DNA, 2196 bp, Homo sapiens
aataaagaaatagtgctttaagtcaatgaattcctccttgggacccactatcgagaaactatcagtggtaacgttttaaaaaatgacaaattcaatctgctcttgacttgtgtgtcctaagatttccactaagtgtcttcaaacctccccctccccggcttcctggataatagaagttcccgaaggccgccgattccagaagatactgtctggcgtgaaattagtctcagtagaaacataagtcccgcgcgtcttgtgctgcgcgtgcgcaagcttttgggccctcccgagaaagggaagtgcattctcgcttccgtagcggtctccgccggttgggggaaagtaattccggctgttgcaccatggcgtccatggggaccctcgccttcgatgaatatgggcgccctttcctcatcatcaaggatcaggaccgcaagtcccgtcttatgggacttgaggccctcaagtctcatataatggcagcaaaggctgtagcaaatacaatgagaacatcacttggaccaaatgggcttgataagatgatggtggataaggatggggatgtgactgtaactaatgatggggccaccatcttaagcatgatggatgttgatcatcagattgccaagctgatggtggaactgtccaagtctcaggatgatgaaattggagatggaaccacaggagtggttgtcctggctggtgccttgttagaagaagcggagcaattgctagaccgaggcattcacccaatcagaatagccgatggctatgagcaggctgctcgcgttgctattgaacacctggacaagatcagcgatagcgtccttgttgacataaaggacaccgaacccctgattcagacagcaaaaaccacgctgggctccaaagtggtcaacagttgtcaccgacagatggctgagattgctgtgaatgccgtcctcactgtagcagatatggagcggagagacgttgactttgagcttatcaaagtagaaggcaaagtgggcggcaggctggaggacactaaactgattaagggcgtgattgtggacaaggatttcagtcacccacagatgccaaaaaaagtggaagatgcgaagattgcaattctcacatgtccatttgaaccacccaaaccaaaaacaaagcataagctggatgtgacctctgtcgaagattataaagcccttcagaaatacgaaaaggagaaatttgaagagatgattcaacaacaatttgtcagtggggctttgatgatgaagcaaatcacttacttcttcagaacaacttgcctgcggttcgctgggtaggaggacctgaaattgagctgattgccatcgcaacaggagggcggatcgtccccaggttctcagagctcacagccgagaagctgggctttgctggtcttgtacaggagatctcatttgggacaactaaggataaaatgctggtcatcgagcagtgtaagaactccagagctgtaaccatttttattagaggaggaaataagatgatcattgaggaggcgaaacgatcccttcacgatgctttgtgtgtcatccggaacctcatccgcgataatcgtgtggtgtatggaggaggggctgctgagatatcctgtgccctggcagttagccaagaggcggataagtgccccaccttagaacagtatgccatgagagcgtttgccgacgcactggaggtcatccccatggccctctctgaaaacagtggcatgaatcccatccagactatgaccgaagtccgagccagacaggtgaaggagatgaaccctgctcttggcatcgactgtttgcacaaggggacaaatgatatgaagcaacagcatgtcatagaaaccttgattggcaaaaagcaacagatatctcttgcaacacaaatggttagaatgattttgaagattgatgacattcgtaagcctggagaatctgaagaatgaagacattgagaaaactatgtagcaagatccacttctgtgattaagtaaatggatgtctcgtgatgcgtctacagttatttattgttacatccttttccagacactgtagatgctataataaaaatagctgtttggtaaccatagtttcacttgttcaaagctgtgtaatcgtgggggtactatctcaactgcttttgtattcattgtattaaaagaatctgtttaaacaacct

SEQ ID NO: 421700 - DNA, 2230 bp, Homo sapiens
aataaagaaatagtgctttaagtcaatgaattcctccttgggacccactatcgagaaactatcagtggtaacgttttaaaaaatgacaaattcaatctgctcttgacttgtgtgtcctaagatttccactaagtgtcttcaaacctccccctccccggcttcctggataatagaagttcccgaaggccgccgattccagaagatactgtctggcgtgaaattagtctcagtagaaacataagtcccgcgcgtcttgtgctgcgcgtgcgcaagcttttgggccctcccgagaaagggaagtgcattctcgcttccgtagcggtctccgccggttgggggaaagtaattccggctgttgcaccatggcgtccatggggaccctcgccttcgatgaatatgggcgccctttcctcatcatcaaggatcaggaccgcaagtcccgtcttatgggacttgaggccctcaagtctcatataatggcagcaaaggctgtagcaaatacaatgagaacatcacttggaccaaatgggcttgataagatgatggtggataaggatggggatgtgactgtaactaatgatggggccaccatcttaagcatgatggatgttgatcatcagattgccaagctgatggtggaactgtccaagtctcaggatgatgaaattggagatggaaccacaggagtggttgtcctggctggtgccttgttagaagaagcggagcaattgctagaccgaggcattcacccaatcagaatagccgatggctatgagcaggctgctcgcgttgctattgaacacctggacaagatcagcgatagcgtccttgttgacataaaggacaccgaacccctgattcagacagcaaaaaccacgctgggctccaaagtggtcaacagttgtcaccgacagatggctgagattgctgtgaatgccgtcctcactgtagcagatatggagcggagagacgttgactttgagcttatcaaagtagaaggcaaagtgggcggcaggctggaggacactaaactgattaagggcgtgattgtggacaaggatttcagtcacccacagatgccaaaaaaagtggaagatgcgaagattgcaattctcacatgtccatttgaaccacccaaaccaaaaacaaagcataagctggatgtgacctctgtcgaagattataaagcccttcagaaatacgaaaaggagaaatttgaagagatgattcaacaaattaaagagactggtgctaacctagcaatttgtcagtggggctttgatgatgaagcaaatcacttacttcttcagaacaacttgcctgcggttcgctgggtaggaggacctgaaattgagctgattgccatcgcaacaggagggcggatcgtccccaggttctcagagctcacagccgagaagctgggctttgctggtcttgtacaggagatctcatttgggacaactaaggataaaatgctggtcatcgagcagtgtaagaactccagagctgtaaccatttttattagaggaggaaataagatgatcattgaggaggcgaaacgatcccttcacgatgctttgtgtgtcatccggaacctcatccgcgataatcgtgtggtgtatggaggaggggctgctgagatatcctgtgccctggcagttagccaagaggcggataagtgccccaccttagaacagtatgccatgagagcgtttgccgacgcactggaggtcatccccatggccctctctgaaaacagtggcatgaatcccatccagactatgaccgaagtccgagccagacagatatgaagcaacagcatgtcatagaaaccttgattggcaaaaagcaacagatatctcttgcaacacaaatggttagaatgattttgaagattgatgacattcgtaagcctggagaatctgaagaatgaagacattgagaaaactatgtagcaagatccacttctgtgattaagtaaatggatgtctcgtgatgcgtctacagttatttattgttacatccttttccagacactgtagatgctataataaaaatagctgtttggtaaccatagtttcacttgttcaaagctgtgtaatcgtgggggtactatctcaactgcttttgtattcattgtattaaaagaatctgtttaaacaacctttatcttctcttcgggtttaagaaacgtttattgtaacagtaattaaatgctgccttaattgaa

SEQ ID NO: 421701 - DNA, 1913 bp, Homo sapiens
aacataggcaggtacgaggcgggtgttaatcggacgaggtccggctgttgcaccatggcgtccatggggaccctcgccttcgatgaatatgggcgccctttcctcatcatcaaggatcaggaccgcaagtcccgtcttatgggacttgaggccctcaagtctcatataatggcagcaaaggctgtagcaaatacaatgagaacatcacttggaccaaatgggcttgataagatgatggtggataaggatggggatgtgactgtaactaatgatggggccaccatcttaagcatgatggatgttgatcatcagattgccaagctgatggtggaactgtccaagtctcaggatgatgaaattggagatggaaccacaggagtggttgtcctggctggtgccttgttagaagaagcggagcaattgctagaccgaggcattcacccaatcagaatagccgatggctatgagcaggctgctcgcgttgctattgaacacctggacaagatcagcgatagcgtccttgttgacataaaggacaccgaacccctgattcagacagcaaaaaccacgctgggctccaaagtggtcaacagttgtcaccgacagatggctgagattgctgtgaatgccgtcctcactgtagcagatatggagcggagagacgttgactttgagcttatcaaagtagaaggcaaagtgggcggcaggctggaggacactaaactgattaagggcgtgattgtggacaaggatttcagtcacccacagatgccaaaaaaagtggaagatgcgaagattgcaattctcacatgtccatttgaaccacccaaaccaaaaacaaagcataagctggatgtgacctctgtcgaagattataaagcccttcagaaatacgaaaaggagaaatttgaagagatgattcaacaaattaaagagactggtgctaacctagcaatttgtcagtggggctttgatgatgaagcaaatcacttacttcttcagaacaacttgcctgcggttcgctgggtaggaggacctgaaattgagctgattgccatcgcaacaggagggcggatcgtccccaggttctcagagctcacagccgagaagctgggctttgctggtcttgtacaggagatctcatttgggacaactaaggataaaatgctggtcatcgagcagtgtaagaactccagagctgtaaccatttttattagaggaggaaataagatgatcattgaggaggcgaaacgatcccttcacgatgctttgtgtgtcatccggaacctcatccgcgataatcgtgtggtgtatggaggaggggctgctgagatatcctgtgccctggcagttagccaagaggcggataagtgccccaccttagaacagtatgccatgagagcgtttgccgacgcactggaggtcatccccatggccctctctgaaaacagtggcatgaatcccatccagactatgaccgaagtccgagccagacaggtgaaggagatgaaccctgctcttggcatcgactgtttgcacaaggggacaaatgatatgaagcaacagcatgtcatagaaaccttgattggcaaaaagcaacagatatctcttgcaacacaaatggttagaatgattttgaagattgatgacattcgtaagcctggagaatctgaagaatgaagacattgagaaaactatgtagcaagatccacttctgtgattaagtaaatggatgtctcgtgatgcgtctacagttatttattgttacatccttttccagacactgtagatgctataataaaaatagctgtttggtaaccatagtttcacttgttcaaagctgtgtaatcgtgggggtactatctcaactgcttttgtattcattgtattaaaagaatctgtttaaacaacct

SEQ ID NO: 421702 - DNA, 1947 bp, Homo sapiens
aataaagaaatagtgctttaagtcaatgaattcctccttgggacccactatcgagaaactatcagtggtaacgttttaaaaaatgacaaattcaatctgctcttgacttgtgtgtcctaagatttccactaagtgtcttcaaacctccccctccccggcttcctggataatagaagttcccgaaggccgccgattccagaagatactgtctggcgtgaaattagtctcagtagaaacataagtcccgcgcgtcttgtgctgcgcgtgcgcaagcttttgggccctcccgagaaagggaagtgcattctcgcttccgtagcggtctccgccggttgggggaaagtaattccggctgttgcaccatggcgtccatggggaccctcgccttcgatgaatatgggcgccctttcctcatcatcaaggatcaggaccgcaagtcccgtcttatgggacttgaggccctcaagtctcatataatggcagcaaaggctgtagcaaatacaatgagaacatcacttggaccaaatgggcttgataagatgatggtggataaggatggggatgtgactgtaactaatgatggggccaccatcttaagcatgatggatgttgatcatcagattgccaagctgatggtggaactgtccaagtctcaggatgatgaaattggagatggaaccacaggagtggttgtcctggctggtgccttgttagaagaagcggagcaattgctagaccgaggcattcacccaatcagaatagccgatggctatgagcaggctgctcgcgttgctattgaacacctggacaagatcagcgatagcgtccttgttgacataaaggacaccgaacccctgattcagacagcaaaaaccacgctgggctccaaagtggtcaacagttgtcaccgacagatggctgagattgctgtgaatgccgtcctcactgtagcagatatggagcggagagacgttgactttgagcttatcaaagtagaaggcaaagtgggcggcaggctggaggacactaaactgattaagggcgtgattgtggacaaggatttcagtcacccacagatgccaaaaaaagtggaagatgcgaagattgcaattctcacatgtccatttgaaccacccaaaccaaaaacaaagcataagctggatgtgacctctgtcgaagattataaagcccttcagaaatacgaaaaggagaaatttgaagagatgattcaacaaattaaagagactggtgctaacctagcaatttgtcagtggggctttgatgatgaagcaaatcacttacttcttcagaacaacttgcctgcggttcgctgggtaggaggacctgaaattgagctgattgccatcgcaacaggagggcggatcgtccccaggttctcagagctcacagccgagaagctgggctttgctggtcttgtacaggagatctcatttgggacaactaaggataaaatgctggtcatcgagcagtgtaagaactccagagctgtaaccatttttattagaggaggaaataagatgatcattgaggaggcgaaacgatcccttcacgatgctttgtgtgtcatccggaacctcatccgcgataatcgtgtggtgtatggaggaggggctgctgagatatcctgtgccctggcagttagccaagaggcggataagtgccccaccttagaacagtatgccatgagagcgtttgccgacgcactggaggtcatccccatggccctctctgaaaacagtggcatgaatcccatccagactatgaccgaagtccgagccagacaggtgaaggagatgaaccctgctcttggcatcgactgttgccagggggcattgttgagcacgctgtctagaaacctgttggaaaggccgttttcttgcccccttgttgatggttttgggtgtggctccgtgccggatctgatgg

SEQ ID NO: 421703 - DNA, 1367 bp, Homo sapiens
  misc_feature (1237)..(1237): n is a, c, g, or t
aataaagaaatagtgctttaagtcaatgaattcctccttgggacccactatcgagaaactatcagtggtaacgttttaaaaaatgacaaattcaatctgctcttgacttgtgtgtcctaagatttccactaagtgtcttcaaacctccccctccccggcttcctggataatagaagttcccgaaggccgccgattccagaagatactgtctggcgtgaaattagtctcagtagaaacataagtcccgcgcgtcttgtgctgcgcgtgcgcaagcttttgggccctcccgagaaagggaagtgcattctcgcttccgtagcggtctccgccggttgggggaaagtaattccggctgttgcaccatggcgtccatggggaccctcgccttcgatgaatatgggcgccctttcctcatcatcaaggatcaggaccgcaagtcccgtcttatgggacttgaggccctcaagtctcatataatggcagcaaaggctgtagcaaatacaatgagaacatcacttggaccaaatgggcttgataagatgatggtggataaggatggggatgtgactgtaactaatgatggggccaccatcttaagcatgatggatgttgatcatcagattgccaagctgatggtggaactgtccaagtctcaggatgatgaaattggagatggaaccacaggagtggttgtcctggctggtgccttgttagaagaagcggagcaattgctagaccgaggcattcacccaatcagaatagccgatggctatgagcaggctgctcgcgttgctattgaacacctggacaagatcagcgatagcgtccttgttgacataaaggacaccgaacccctgattcagacagcaaaaaccacgctgggctccaaagtggtcaacagttgtcaccgacagatggctgagattgctgtgaatgccgtcctcactgtagcagatatggagcggagagacgttgactttgagcttatcaaagtagaaggcaaagtgggcggcaggctggaggacactaaactgattaagggcgtgattgtggacaaggatttcagtcacccacagatgccaaaaaaagtggaagatgcgaagattgcaattctcacatgtccatttgaaccacccaaaccaaaaacaaagcataagctggatgtgacctctgtcgaagattataaagcccttcagaaatacgaaaaggagaaatttgaagagatgattcaacaatngaagggaatggagagctggttccaattagagatgtgtactgcaatgcaggggttgagaagaggaaatttttgaaagcgggaccggtgaggcgattgtggtgcgaaagggtcggtcagcaaagtgggtgtc

SEQ ID NO: 421704 - DNA, 1782 bp, Homo sapiens
tgtgaggcctccccagctgtgtaaaacctctcatataatggcagcaaaggctgtagcaaatacaatgagaacatcacttggaccaaatgggcttgataagatgatggtggataaggatggggatgtgactgtaactaatgatggggccaccatcttaagcatgatggatgttgatcatcagattgccaagctgatggtggaactgtccaagtctcaggatgatgaaattggagatggaaccacaggagtggttgtcctggctggtgccttgttagaagaagcggagcaattgctagaccgaggcattcacccaatcagaatagccgatggctatgagcaggctgctcgcgttgctattgaacacctggacaagatcagcgatagcgtccttgttgacataaaggacaccgaacccctgattcagacagcaaaaaccacgctgggctccaaagtggtcaacagttgtcaccgacagatggctgagattgctgtgaatgccgtcctcactgtagcagatatggagcggagagacgttgactttgagcttatcaaagtagaaggcaaagtgggcggcaggctggaggacactaaactgattaagggcgtgattgtggacaaggatttcagtcacccacagatgccaaaaaaagtggaagatgcgaagattgcaattctcacatgtccatttgaaccacccaaaccaaaaacaaagcataagctggatgtgacctctgtcgaagattataaagcccttcagaaatacgaaaaggagaaatttgaagagatgattcaacaaattaaagagactggtgctaacctagcaatttgtcagtggggctttgatgatgaagcaaatcacttacttcttcagaacaacttgcctgcggttcgctgggtaggaggacctgaaattgagctgattgccatcgcaacaggagggcggatcgtccccaggttctcagagctcacagccgagaagctgggctttgctggtcttgtacaggagatctcatttgggacaactaaggataaaatgctggtcatcgagcagtgtaagaactccagagctgtaaccatttttattagaggaggaaataagatgatcattgaggaggcgaaacgatcccttcacgatgctttgtgtgtcatccggaacctcatccgcgataatcgtgtggtgtatggaggaggggctgctgagatatcctgtgccctggcagttagccaagaggcggataagtgccccaccttagaacagtatgccatgagagcgtttgccgacgcactggaggtcatccccatggccctctctgaaaacagtggcatgaatcccatccagactatgaccgaagtccgagccagacaggtgaaggagatgaaccctgctcttggcatcgactgtttgcacaaggggacaaatgatatgaagcaacagcatgtcatagaaaccttgattggcaaaaagcaacagatatctcttgcaacacaaatggttagaatgattttgaagattgatgacattcgtaagcctggagaatctgaagaatgaagacattgagaaaactatgtagcaagatccacttctgtgattaagtaaatggatgtctcgtgatgcgtctacagttatttattgttacatccttttccagacactgtagatgctataataaaaatagctgtttggtaaccatagtttcacttgttcaaagctgtgtaatcgtgggggtactatctcaactgcttttgtattcattgtattaaaagaatctgtttaaacaacct

SEQ ID NO: 421705 - DNA, 1783 bp, Homo sapiens
cggacgcgtgggtcgacccacgcgtccggtctcatataatggcagcaaaggctgtagcaaatacaatgagaacatcacttggaccaaatgggcttgataagatgatggtggataaggatggggatgtgactgtaactaatgatggggccaccatcttaagcatgatggatgttgatcatcagattgccaagctgatggtggaactgtccaagtctcaggatgatgaaattggagatggaaccacaggagtggttgtcctggctggtgccttgttagaagaagcggagcaattgctagaccgaggcattcacccaatcagaatagccgatggctatgagcaggctgctcgcgttgctattgaacacctggacaagatcagcgatagcgtccttgttgacataaaggacaccgaacccctgattcagacagcaaaaaccacgctgggctccaaagtggtcaacagttgtcaccgacagatggctgagattgctgtgaatgccgtcctcactgtagcagatatggagcggagagacgttgactttgagcttatcaaagtagaaggcaaagtgggcggcaggctggaggacactaaactgattaagggcgtgattgtggacaaggatttcagtcacccacagatgccaaaaaaagtggaagatgcgaagattgcaattctcacatgtccatttgaaccacccaaaccaaaaacaaagcataagctggatgtgacctctgtcgaagattataaagcccttcagaaatacgaaaaggagaaatttgaagagatgattcaacaaattaaagagactggtgctaacctagcaatttgtcagtggggctttgatgatgaagcaaatcacttacttcttcagaacaacttgcctgcggttcgctgggtaggaggacctgaaattgagctgattgccatcgcaacaggagggcggatcgtccccaggttctcagagctcacagccgagaagctgggctttgctggtcttgtacaggagatctcatttgggacaactaaggataaaatgctggtcatcgagcagtgtaagaactccagagctgtaaccatttttattagaggaggaaataagatgatcattgaggaggcgaaacgatcccttcacgatgctttgtgtgtcatccggaacctcatccgcgataatcgtgtggtgtatggaggaggggctgctgagatatcctgtgccctggcagttagccaagaggcggataagtgccccaccttagaacagtatgccatgagagcgtttgccgacgcactggaggtcatccccatggccctctctgaaaacagtggcatgaatcccatccagactatgaccgaagtccgagccagacaggtgaaggagatgaaccctgctcttggcatcgactgtttgcacaaggggacaaatgatatgaagcaacagcatgtcatagaaaccttgattggcaaaaagcaacagatatctcttgcaacacaaatggttagaatgattttgaagattgatgacattcgtaagcctggagaatctgaagaatgaagacattgagaaaactatgtagcaagatccacttctgtgattaagtaaatggatgtctcgtgatgcgtctacagttatttattgttacatccttttccagacactgtagatgctataataaaaatagctgtttggtaaccatagtttcacttgttcaaagctgtgtaatcgtgggggtactatctcaactgcttttgtattcattgtattaaaagaatctgtttaaacaacct

SEQ ID NO: 421706 - DNA, 2111 bp, Homo sapiens
atgtgctccccggaaaggtcgagaatctccgtctccctgcggtctccggccgctcagcccgcttactgagctcgggagacgccggcgcctaatcctgggctcggaatgtgggggccagccaggctgggccgccagcgcccttcggagctgggtggggccgctcagtccggtcgcccgcgggagcaaagcgggaccgcctccccgcccggctcctccagcctgacggccgcgtgggactgcgctccagtgggagggcgccggggagatgctctgtcacctgtcggttaaggcgctgctgcttaacctttcgctggtccacccgcaacggcccttccgttttctttgtcactcgtaaagtctcatataatggcagcaaaggctgtagcaaatacaatgagaacatcacttggaccaaatgggcttgataagatgatggtggataaggatggggatgtgactgtaactaatgatggggccaccatcttaagcatgatggatgttgatcatcagattgccaagctgatggtggaactgtccaagtctcaggatgatgaaattggagatggaaccacaggagtggttgtcctggctggtgccttgttagaagaagcggagcaattgctagaccgaggcattcacccaatcagaatagccgatggctatgagcaggctgctcgcgttgctattgaacacctggacaagatcagcgatagcgtccttgttgacataaaggacaccgaacccctgattcagacagcaaaaaccacgctgggctccaaagtggtcaacagttgtcaccgacagatggctgagattgctgtgaatgccgtcctcactgtagcagatatggagcggagagacgttgactttgagcttatcaaagtagaaggcaaagtgggcggcaggctggaggacactaaactgattaagggcgtgattgtggacaaggatttcagtcacccacagatgccaaaaaaagtggaagatgcgaagattgcaattctcacatgtccatttgaaccacccaaaccaaaaacaaagcataagctggatgtgacctctgtcgaagattataaagcccttcagaaatacgaaaaggagaaatttgaagagatgattcaacaaattaaagagactggtgctaacctagcaatttgtcagtggggctttgatgatgaagcaaatcacttacttcttcagaacaacttgcctgcggttcgctgggtaggaggacctgaaattgagctgattgccatcgcaacaggagggcggatcgtccccaggttctcagagctcacagccgagaagctgggctttgctggtcttgtacaggagatctcatttgggacaactaaggataaaatgctggtcatcgagcagtgtaagaactccagagctgtaaccatttttattagaggaggaaataagatgatcattgaggaggcgaaacgatcccttcacgatgctttgtgtgtcatccggaacctcatccgcgataatcgtgtggtgtatggaggaggggctgctgagatatcctgtgccctggcagttagccaagaggcggataagtgccccaccttagaacagtatgccatgagagcgtttgccgacgcactggaggtcatccccatggccctctctgaaaacagtggcatgaatcccatccagactatgaccgaagtccgagccagacaggtgaaggagatgaaccctgctcttggcatcgactgtttgcacaaggggacaaatgatatgaagcaacagcatgtcatagaaaccttgattggcaaaaagcaacagatatctcttgcaacacaaatggttagaatgattttgaagattgatgacattcgtaagcctggagaatctgaagaatgaagacattgagaaaactatgtagcaagatccacttctgtgattaagtaaatggatgtctcgtgatgcgtctacagttatttattgttacatccttttccagacactgtagatgctataataaaaatagctgtttggtaaccatagtttcacttgttcaaagctgtgtaatcgtgggggtactatctcaactgcttttgtattcattgtattaaaagaatctgtttaaacaacct

SEQ ID NO: 421707 - DNA, 1657 bp, Homo sapiens
  misc_feature (7)..(7): n is a, c, g, or t
  misc_feature (18)..(18): n is a, c, g, or t
tggaagnagacaaactanggctaggtacgaggctgggtttgaatcggccgaggcagattgccaagctgatggtggaactgtccaagtctcaggatgatgaaattggagatggaaccacaggagtggttgtcctggctggtgccttgttagaagaagcggagcaattgctagaccgaggcattcacccaatcagaatagccgatggctatgagcaggctgctcgcgttgctattgaacacctggacaagatcagcgatagcgtccttgttgacataaaggacaccgaacccctgattcagacagcaaaaaccacgctgggctccaaagtggtcaacagttgtcaccgacagatggctgagattgctgtgaatgccgtcctcactgtagcagatatggagcggagagacgttgactttgagcttatcaaagtagaaggcaaagtgggcggcaggctggaggacactaaactgattaagggcgtgattgtggacaaggatttcagtcacccacagatgccaaaaaaagtggaagatgcgaagattgcaattctcacatgtccatttgaaccacccaaaccaaaaacaaagcataagctggatgtgacctctgtcgaagattataaagcccttcagaaatacgaaaaggagaaatttgaagagatgattcaacaaattaaagagactggtgctaacctagcaatttgtcagtggggctttgatgatgaagcaaatcacttacttcttcagaacaacttgcctgcggttcgctgggtaggaggacctgaaattgagctgattgccatcgcaacaggagggcggatcgtccccaggttctcagagctcacagccgagaagctgggctttgctggtcttgtacaggagatctcatttgggacaactaaggataaaatgctggtcatcgagcagtgtaagaactccagagctgtaaccatttttattagaggaggaaataagatgatcattgaggaggcgaaacgatcccttcacgatgctttgtgtgtcatccggaacctcatccgcgataatcgtgtggtgtatggaggaggggctgctgagatatcctgtgccctggcagttagccaagaggcggataagtgccccaccttagaacagtatgccatgagagcgtttgccgacgcactggaggtcatccccatggccctctctgaaaacagtggcatgaatcccatccagactatgaccgaagtccgagccagacaggtgaaggagatgaaccctgctcttggcatcgactgtttgcacaaggggacaaatgatatgaagcaacagcatgtcatagaaaccttgattggcaaaaagcaacagatatctcttgcaacacaaatggttagaatgattttgaagattgatgacattcgtaagcctggagaatctgaagaatgaagacattgagaaaactatgtagcaagatccacttctgtgattaagtaaatggatgtctcgtgatgcgtctacagttatttattgttacatccttttccagacactgtagatgctataataaaaatagctgtttggtaaccatagtttcacttgttcaaagctgtgtaatcgtgggggtactatctcaactgcttttgtattcattgtattaaaagaatctgtttaaacaacct

SEQ ID NO: 421708 - DNA, 1656 bp, Homo sapiens
  misc_feature (18)..(18): n is a, c, g, or t
  misc_feature (24)..(25): n is a, c, g, or t
  misc_feature (31)..(31): n is a, c, g, or t
  misc_feature (45)..(45): n is a, c, g, or t
  misc_feature (78)..(78): n is a, c, g, or t
  misc_feature (116)..(116): n is a, c, g, or t
  misc_feature (121)..(121): n is a, c, g, or t
tttgctaggttagcaccngtctcnntaattngttgaatcatctcntcaaatttctccttttcgtatttctgaagggcnttataatcttcgacagaggtcacatccagcttatgctntgttnttggttgtcctggctggtgccttgttagaagaagcggagcaattgctagaccgaggcattcacccaatcagaatagccgatggctatgagcaggctgctcgcgttgctattgaacacctggacaagatcagcgatagcgtccttgttgacataaaggacaccgaacccctgattcagacagcaaaaaccacgctgggctccaaagtggtcaacagttgtcaccgacagatggctgagattgctgtgaatgccgtcctcactgtagcagatatggagcggagagacgttgactttgagcttatcaaagtagaaggcaaagtgggcggcaggctggaggacactaaactgattaagggcgtgattgtggacaaggatttcagtcacccacagatgccaaaaaaagtggaagatgcgaagattgcaattctcacatgtccatttgaaccacccaaaccaaaaacaaagcataagctggatgtgacctctgtcgaagattataaagcccttcagaaatacgaaaaggagaaatttgaagagatgattcaacaaattaaagagactggtgctaacctagcaatttgtcagtggggctttgatgatgaagcaaatcacttacttcttcagaacaacttgcctgcggttcgctgggtaggaggacctgaaattgagctgattgccatcgcaacaggagggcggatcgtccccaggttctcagagctcacagccgagaagctgggctttgctggtcttgtacaggagatctcatttgggacaactaaggataaaatgctggtcatcgagcagtgtaagaactccagagctgtaaccatttttattagaggaggaaataagatgatcattgaggaggcgaaacgatcccttcacgatgctttgtgtgtcatccggaacctcatccgcgataatcgtgtggtgtatggaggaggggctgctgagatatcctgtgccctggcagttagccaagaggcggataagtgccccaccttagaacagtatgccatgagagcgtttgccgacgcactggaggtcatccccatggccctctctgaaaacagtggcatgaatcccatccagactatgaccgaagtccgagccagacaggtgaaggagatgaaccctgctcttggcatcgactgtttgcacaaggggacaaatgatatgaagcaacagcatgtcatagaaaccttgattggcaaaaagcaacagatatctcttgcaacacaaatggttagaatgattttgaagattgatgacattcgtaagcctggagaatctgaagaatgaagacattgagaaaactatgtagcaagatccacttctgtgattaagtaaatggatgtctcgtgatgcgtctacagttatttattgttacatccttttccagacactgtagatgctataataaaaatagctgtttggtaaccatagtttcacttgttcaaagctgtgtaatcgtgggggtactatctcaactgcttttgtattcattgtattaaaagaatctgtttaaacaacct

SEQ ID NO: 421709 - DNA, 1578 bp, Homo sapiens
ggctagtaggaggccgggtgttaattggagatggaacacaggagtggttgtcctggctggtgccttgttagaagaagcggagcaattgctagaccgaggcattcacccaatcagaatagccgatggctatgagcaggctgctcgcgttgctattgaacacctggacaagatcagcgatagcgtccttgttgacataaaggacaccgaacccctgattcagacagcaaaaaccacgctgggctccaaagtggtcaacagttgtcaccgacagatggctgagattgctgtgaatgccgtcctcactgtagcagatatggagcggagagacgttgactttgagcttatcaaagtagaaggcaaagtgggcggcaggctggaggacactaaactgattaagggcgtgattgtggacaaggatttcagtcacccacagatgccaaaaaaagtggaagatgcgaagattgcaattctcacatgtccatttgaaccacccaaaccaaaaacaaagcataagctggatgtgacctctgtcgaagattataaagcccttcagaaatacgaaaaggagaaatttgaagagatgattcaacaaattaaagagactggtgctaacctagcaatttgtcagtggggctttgatgatgaagcaaatcacttacttcttcagaacaacttgcctgcggttcgctgggtaggaggacctgaaattgagctgattgccatcgcaacaggagggcggatcgtccccaggttctcagagctcacagccgagaagctgggctttgctggtcttgtacaggagatctcatttgggacaactaaggataaaatgctggtcatcgagcagtgtaagaactccagagctgtaaccatttttattagaggaggaaataagatgatcattgaggaggcgaaacgatcccttcacgatgctttgtgtgtcatccggaacctcatccgcgataatcgtgtggtgtatggaggaggggctgctgagatatcctgtgccctggcagttagccaagaggcggataagtgccccaccttagaacagtatgccatgagagcgtttgccgacgcactggaggtcatccccatggccctctctgaaaacagtggcatgaatcccatccagactatgaccgaagtccgagccagacaggtgaaggagatgaaccctgctcttggcatcgactgtttgcacaaggggacaaatgatatgaagcaacagcatgtcatagaaaccttgattggcaaaaagcaacagatatctcttgcaacacaaatggttagaatgattttgaagattgatgacattcgtaagcctggagaatctgaagaatgaagacattgagaaaactatgtagcaagatccacttctgtgattaagtaaatggatgtctcgtgatgcgtctacagttatttattgttacatccttttccagacactgtagatgctataataaaaatagctgtttggtaaccatagtttcacttgttcaaagctgtgtaatcgtgggggtactatctcaactgcttttgtattcattgtattaaaagaatctgtttaaacaacct

SEQ ID NO: 421710 - DNA, 1264 bp, Homo sapiens
  misc_feature (1203)..(1203): n is a, c, g, or t
  misc_feature (1205)..(1205): n is a, c, g, or t
  misc_feature (1213)..(1213): n is a, c, g, or t
  misc_feature (1216)..(1216): n is a, c, g, or t
aataaagaaatagtgctttaagtcaatgaattcctccttgggacccactatcgagaaactatcagtggtaacgttttaaaaaatgacaaattcaatctgctcttgacttgtgtgtcctaagatttccactaagtgtcttcaaacctccccctccccggcttcctggataatagaagttcccgaaggccgccgattccagaagatactgtctggcgtgaaattagtctcagtagaaacataagtcccgcgcgtcttgtgctgcgcgtgcgcaagcttttgggccctcccgagaaagggaagtgcattctcgcttccgtagcggtctccgccggttgggggaaagtaattccggctgttgcaccatggcgtccatggggaccctcgccttcgatgaatatgggcgccctttcctcatcatcaaggatcaggaccgcaagtcccgtcttatgggacttgaggccctcaagtctcatataatggcagcaaaggctgtagcaaatacaatgagaacatcacttggaccaaatgggcttgataagatgatggtggataaggatggggatgtgactgtaactaatgatggggccaccatcttaagcatgatggatgttgatcatcagattgccaagctgatggtggaactgtccaagtctcaggatgatgaaattggagatggaaccacaggagtggttgtcctggctggtgccttgttagaagaagcggagcaattgctagaccgaggcattcacccaatcagaatagccgatggctatgagcaggctgctcgcgttgctattgaacacctggacaagatcagcgatagcgtccttgttgacataaaggacaccgaacccctgattcagacagcaaaaaccacgctgggctccaaagtggtcaacagttgtcaccgacagatggctgagattgctgtgaatgccgtcctcactgtagcagatatggagcggagagacgttgactttgagcttatcaaagtagaaggcaaagtgggcggcaggctggaggacactaaactgattaagggcgtgattgtggacaaggatttcagtcacccacagatgccaaaaaaggtggagatgcgaagattgcattctccactgtcctttgaaccaccaaacaaaaaaaggtagtgggttgactcgtgaaaatttaagcttgaattaaagggattggggatgtttccantnaaaggggnccncatggggggtgggtaaaaactttttaaatgggggcgcgggggcaagtc

SEQ ID NO: 421711 - DNA, 1360 bp, Homo sapiens
  misc_feature (1)..(2): n is a, c, g, or t
  misc_feature (28)..(29): n is a, c, g, or t
  misc_feature (31)..(31): n is a, c, g, or t
nnaggctaggtacgaggctgggtggcgnncnggtcaacagttgtcaccgacagatggctgagattgctgtgaatgccgtcctcactgtagcagatatggagcggagagacgttgactttgagcttatcaaagtagaaggcaaagtgggcggcaggctggaggacactaaactgattaagggcgtgattgtggacaaggatttcagtcacccacagatgccaaaaaaagtggaagatgcgaagattgcaattctcacatgtccatttgaaccacccaaaccaaaaacaaagcataagctggatgtgacctctgtcgaagattataaagcccttcagaaatacgaaaaggagaaatttgaagagatgattcaacaaattaaagagactggtgctaacctagcaatttgtcagtggggctttgatgatgaagcaaatcacttacttcttcagaacaacttgcctgcggttcgctgggtaggaggacctgaaattgagctgattgccatcgcaacaggagggcggatcgtccccaggttctcagagctcacagccgagaagctgggctttgctggtcttgtacaggagatctcatttgggacaactaaggataaaatgctggtcatcgagcagtgtaagaactccagagctgtaaccatttttattagaggaggaaataagatgatcattgaggaggcgaaacgatcccttcacgatgctttgtgtgtcatccggaacctcatccgcgataatcgtgtggtgtatggaggaggggctgctgagatatcctgtgccctggcagttagccaagaggcggataagtgccccaccttagaacagtatgccatgagagcgtttgccgacgcactggaggtcatccccatggccctctctgaaaacagtggcatgaatcccatccagactatgaccgaagtccgagccagacaggtgaaggagatgaaccctgctcttggcatcgactgtttgcacaaggggacaaatgatatgaagcaacagcatgtcatagaaaccttgattggcaaaaagcaacagatatctcttgcaacacaaatggttagaatgattttgaagattgatgacattcgtaagcctggagaatctgaagaatgaagacattgagaaaactatgtagcaagatccacttctgtgattaagtaaatggatgtctcgtgatgcgtctacagttatttattgttacatccttttccagacactgtagatgctataataaaaatagctgtttggtaaccatagtttcacttgttcaaagctgtgtaatcgtgggggtactatctcaactgcttttgtattcattgtattaaaagaatctgtttaaacaacct

SEQ ID NO: 421712 - DNA, 990 bp, Homo sapiens
aataaagaaatagtgctttaagtcaatgaattcctccttgggacccactatcgagaaactatcagtggtaacgttttaaaaaatgacaaattcaatctgctcttgacttgtgtgtcctaagatttccactaagtgtcttcaaacctccccctccccggcttcctggataatagaagttcccgaaggccgccgattccagaagatactgtctggcgtgaaattagtctcagtagaaacataagtcccgcgcgtcttgtgctgcgcgtgcgcaagcttttgggccctcccgagaaagggaagtgcattctcgcttccgtagcggtctccgccggttgggggaaagtaattccggctgttgcaccatggcgtccatggggaccctcgccttcgatgaatatgggcgccctttcctcatcatcaaggatcaggaccgcaagtcccgtcttatgggacttgaggccctcaagtctcatataatggcagcaaaggctgtagcaaatacaatgagaacatcacttggaccaaatgggcttgataagatgatggtggataaggatggggatgtgactgtaactaatgatggggccaccatcttaagcatgatggatgttgatcatcagattgccaagctgatggtggaactgtccaagtctcaggatgatgaaattggagatggaaccacaggagtggttgtcctggctggtgccttgttagaagaagcggagcaattgctagaccgaggcattcacccaatcagaatagccgatggctatgagcaggctgctcgcgttgctattgaacacctggacaagatcagcgatagcgtccttgttgacataaaggacaccgaacccctgattcagacagcaaaaaccacgctgggctccaaagtgtcaacaagttgtaccgccgaatgctgaaattgctggaaatgccgccctactgttgcatatttgaaccggggccgtgccctttggctttttgttgggg

SEQ ID NO: 421713 - DNA, 1168 bp, Homo sapiens
  misc_feature (905)..(905): n is a, c, g, or t
  misc_feature (921)..(921): n is a, c, g, or t
  misc_feature (932)..(932): n is a, c, g, or t
  misc_feature (950)..(950): n is a, c, g, or t
  misc_feature (969)..(969): n is a, c, g, or t
  misc_feature (978)..(978): n is a, c, g, or t
  misc_feature (1030)..(1030): n is a, c, g, or t
  misc_feature (1056)..(1056): n is a, c, g, or t
  misc_feature (1059)..(1059): n is a, c, g, or t
  misc_feature (1061)..(1061): n is a, c, g, or t
  misc_feature (1065)..(1065): n is a, c, g, or t
  misc_feature (1079)..(1079): n is a, c, g, or t
  misc_feature (1084)..(1084): n is a, c, g, or t
  misc_feature (1101)..(1102): n is a, c, g, or t
  misc_feature (1105)..(1105): n is a, c, g, or t
  misc_feature (1147)..(1147): n is a, c, g, or t
aataaagaaatagtgctttaagtcaatgaattcctccttgggacccactatcgagaaactatcagtggtaacgttttaaaaaatgacaaattcaatctgctcttgacttgtgtgtcctaagatttccactaagtgtcttcaaacctccccctccccggcttcctggataatagaagttcccgaaggccgccgattccagaagatactgtctggcgtgaaattagtctcagtagaaacataagtcccgcgcgtcttgtgctgcgcgtgcgcaagcttttgggccctcccgagaaagggaagtgcattctcgcttccgtagcggtctccgccggttgggggaaagtaattccggctgttgcaccatggcgtccatggggaccctcgccttcgatgaatatgggcgccctttcctcatcatcaaggatcaggaccgcaagtcccgtcttatgggacttgaggccctcaagtctcatataatggcagcaaaggctgtagcaaatacaatgagaacatcacttggaccaaatgggcttgataagatgatggtggataaggatggggatgtgactgtaactaatgatggggccaccatcttaagcatgatggatgttgatcatcagattgccaagctgatggtggaactgtccaagtctcaggatgatgaaattggagatggaaccacaggagtggttgtcctggctggtgccttgttagaagaagcggagcaattgctagaccgaggcattcacccaatcagaatagccgatggctatgagcaggctgctcgcgttgctattgaacacctggacaagatcagcgatagcgtccttgttgacataaaggacaccgaacccctgattcagacagcaaaaaccacgctgggctccaaagtaccgactggcgcntccaccacgtggatanccacgcttgtnacccgacacgactgtgantgacgacttgcatggtganctgcacgtncctcaccctgtacgcacgactactgcgacgcggacgacgaccgtttgacctnttgacgcattactcaccccgtacgancgngnaccncgtgggggcagggnacggngtgagacggacacctannacntgacttacacggggggtgactctgtgggacaacgagactttnacgtaacccaacacgactgaa

SEQ ID NO: 421714 - DNA, 1398 bp, Homo sapiens
agggggcgtctagaggatccctacacttatcttctcttcgggtttaagaaacgtttattgtaacagtaattaaatgctgccttaattgaaggggttgggtggatttttttttctcaaaataagctgtagggactattttaacagcttaaacaggagctctcaagatgcactttcgtattgagaggaatatgggcttgatcctcttcctatctaaatgggtgggccatttgattgtagagggtccaccacagaattatgggatgccttaagtgctgttactaggttgctcacagcctaacctggcgtgttgtttagggctgatggagacccatgtgagcctttgctttcctctggccccagccccaccctgaacacagctcatacgcagaatcaggaccagcatgtgcagagctggccaccagcacaggcttagggcagttcagaacccacttgtttccctatcagagggacacagtgaagtggaggttaaagtaaattacaggaaataagggagaaatcttgcagttaccatgttcagatagagtgactgaaattaattgtacttactaaagtattaactagctaacagtgatgggccaagacgctccgagaactgtaccgggattgtctgttctgacaacccagtgaggcagatacactttcttactgctcacatcttacaggtgagtactcataattggccagcatctcaccaccagcaagtagtagggccaggtcaatcccaggcagtctgaccccagagtggcccagctcatcccctactctgttatttgcttgttaatgattctctagattttctaaaataatgtttcttagcattgtgatgataaagctcatgatgaactttatcactagttatgccaccttaactagtcagatttcctagaattaggaaatggtgactcttgtctaaatttggttaagtgatgaatttgggttaccttctcatgtgaacctggagattcaccagtcttaacttttgggtcattgtgttttctctacattcatgcattggatgttttgctaaataactcctgtggatttaggaatgtgtgctaatagcaatcttcctaattttcatgtttatatggaactatgcagttgagtattgaaagctttaaactgagtttatttacaaggactgagtctagcctacagagaacatacagcagccttctttggaccacagtcttatccgaggggtctgtggttgtatcagaagagccactaaaccaatccccctttccaaaattgaacctcacagacgttcctgttttttgtgattgagaaactggtcaatgaacaggaagacttagagatgtttcacaagcctttgatttttgtttcatttatttgtaataaacctcttccacgtga

SEQ ID NO: 421715 - DNA, 686 bp, Homo sapiens
aataaagaaatagtgctttaagtcaatgaattcctccttgggacccactatcgagaaactatcagtggtaacgttttaaaaaatgacaaattcaatctgctcttgacttgtgtgtcctaagatttccactaagtgtcttcaaacctccccctccccggcttcctggataatagaagttcccgaaggccgccgattccagaagatactgtctggcgtgaaattagtctcagtagaaacataagtcccgcgcgtcttgtgctgcgcgtgcgcaagcttttgggccctcccgagaaagggaagtgcattctcgcttccgtagcggtctccgccggttgggggaaagtaattccggctgttgcaccatggcgtccatggggaccctcgccttcgatgaatatgggcgccctttcctcatcatcaaggatcaggaccgcaagtcccgtcttatgggacttgaggccctcaagtctcatataatggcagcaaaggctgtagcaaatacaatgagaacatcacttggaccaaatgggcttgataagatgatggtggataaggatggggatgtgactgtaactaatgatggggccaccatcttaagcatgatggatgttgatcatcgggagtttgttttttccccccccccccccccggggggggggccgggcgcgggagccggcgtccgccgc

SEQ ID NO: 421716 - DNA, 406 bp, Homo sapiens
gtctcatccaaatactaatggcagtcccaggcaacggtgcctcggtggttctcactgcagcgcagtgcaaggaacatgcaggctgggttcccagagtgagggagggctgcacagatgggagatgagggtatgagcttaggggacgggcgccgggtgatagatctgggcagcaccaaagccccaatcaagacgtccagctcaagagccttgttacctagcaaggtgctttgggttgaactggagatgtctcggtcaaagtggggcagcagttctagtgaacaagttggtcttagatcaagttttgctcatttgtggcccagttttgaaagttaacttcaccagtactgtcttcatccttctccctgaccaccccaattagctgattgccatcgcaacaggagggcgg

SEQ ID NO: 421717 - DNA, 189 bp, Homo sapiens
ccccagactgttgaaaatgcaggttgagatggcattcccctctagaagactcaaaacatcgtttgatttatatctttgagtaacattgtgttatgtggcctgctttggttgcagtaattgtgaaaccaatgaagtttgttttgtggtgttttcctcagggtcaacagttgtcaccgacagatggctgag

SEQ ID NO: 421718 - DNA, 324 bp, Homo sapiens
cgcccggctcctccagcctgacggccgcgtgggactgcgctccagtgggagggcgccggggagatgctctgtcacctgtcggttaaggcgctgctgcttaacctttcgctggtccacccgcaacggcccttccgttttctttgtcactcgtaaaggtgtggtcacttaacagggtatttcatttctgagtgcttttttgcccacccttgaggaaaaatagcgaagagtgaaaaacggacgcacataaccgtaatacaaggtggtgtgcagtgagaaggacagctacggagagggtgcacataagcgtggtgctggaggacagct

SEQ ID NO: 421719 - DNA, 3539 bp, Homo sapiens
aataaagaaatagtgctttaagtcaatgaattcctccttgggacccactatcgagaaactatcagtggtaacgttttaaaaaatgacaaattcaatctgctcttgacttgtgtgtcctaagatttccactaagtgtcttcaaacctccccctccccggcttcctggataatagaagttcccgaaggccgccgattccagaagatactgtctggcgtgaaattagtctcagtagaaacataagtcccgcgcgtcttgtgctgcgcgtgcgcaagcttttgggccctcccgagaaagggaagtgcattctcgcttccgtagcggtctccgccggttgggggaaagtaattccggctgttgcaccatggcgtccatggggaccctcgccttcgatgaatatgggcgccctttcctcatcatcaaggatcaggaccgcaagtcccgtcttatgggacttgaggccctcaagtctcatataatggcagcaaaggctgtagcaaatacaatgagaacatcacttggaccaaatgggcttgataagatgatggtggataaggatggggatgtgactgtaactaatgatggggccaccatcttaagcatgatggatgttgatcatcagattgccaagctgatggtggaactgtccaagtctcaggatgatgaaattggagatggaaccacaggagtggttgtcctggctggtgccttgttagaagaagcggagcaattgctagaccgaggcattcacccaatcagaatagccgatggctatgagcaggctgctcgcgttgctattgaacacctggacaagatcagcgatagcgtccttgttgacataaaggacaccgaacccctgattcagacagcaaaaaccacgctgggctccaaagtggtcaacagttgtcaccgacagatggctgagattgctgtgaatgccgtcctcactgtagcagatatggagcggagagacgttgactttgagcttatcaaagtagaaggcaaagtgggcggcaggctggaggacactaaactgattaagggcgtgattgtggacaaggatttcagtcacccacagatgccaaaaaaagtggaagatgcgaagattgcaattctcacatgtccatttgaaccacccaaaccaaaaacaaagcataagctggatgtgacctctgtcgaagattataaagcccttcagaaatacgaaaaggagaaatttgaagagatgattcaacaaattaaagagactggtgctaacctagcaatttgtcagtggggctttgatgatgaagcaaatcacttacttcttcagaacaacttgcctgcggttcgctgggtaggaggacctgaaattgagctgattgccatcgcaacaggagggcggatcgtccccaggttctcagagctcacagccgagaagctgggctttgctggtcttgtacaggagatctcatttgggacaactaaggataaaatgctggtcatcgagcagtgtaagaactccagagctgtaaccatttttattagaggaggaaataagatgatcattgaggaggcgaaacgatcccttcacgatgctttgtgtgtcatccggaacctcatccgcgataatcgtgtggtgtatggaggaggggctgctgagatatcctgtgccctggcagttagccaagaggcggataagtgccccaccttagaacagtatgccatgagagcgtttgccgacgcactggaggtcatccccatggccctctctgaaaacagtggcatgaatcccatccagactatgaccgaagtccgagccagacaggtgaaggagatgaaccctgctcttggcatcgactgtttgcacaaggggacaaatgatatgaagcaacagcatgtcatagaaaccttgattggcaatgacattcgtaagcctggagaatctgaagaatgaagacattgagaaaactatgtagcaagatccacttctgtgattaagtaaatggatgtctcgtgatgcgtctacagttatttattgttacatccttttccagacactgtagatgctataataaaaatagctgtttggtaaccatagtttcacttgttcaaagctgtgtaatcgtgggggtactatctcaactgcttttgtattcattgtattaaaagaatctgtttaaacaacctttatcttctcttcgggtttaagaaacgtttattgtaacagtaattaaatgctgccttaattgaaggggttgggtggatttttttttctcaaaataagctgtagggactattttaacagcttaaacaggagctctcaagatgcactttcgtattgagaggaatatgggcttgatcctcttcctatctaaatgggtgggccatttgattgtagagggtccaccacagaattatgggatgccttaagtgctgttactaggttgctcacagcctaacctggcgtgttgtttagggctgatggagacccatgtgagcctttgctttcctctggccccagccccaccctgaacacagctcatacgcagaatcaggaccagcatgtgcagagctggccaccagcacaggcttagggcagttcagaacccacttgtttccctatcagagggacacagtgaagtggaggttaaagtaaattacaggaaataagggagaaatcttgcagttaccatgttcagatagagtgactgaaattaattgtacttactaaagtattaactagctaacagtgatgggccaagacgctccgagaactgtaccgggattgtctgttctgacaacccagtgaggcagatacactttcttactgctcacatcttacaggtgagtactcataattggccagcatctcaccaccagcaagtagtagggccaggtcaatcccaggcagtctgaccccagagtggcccagctcatcccctactctgttatttgcttgttaatgattctctagattttctaaaataatgtttcttagcattgtgatgataaagctcatgatgaactttatcactagttatgccaccttaactagtcagatttcctagaattaggaaatggtgactcttgtctaaatttggttaagtgatgaatttgggttaccttctcatgtgaacctggagattcaccagtcttaacttttgggtcattgtgttttctctacattcatgcattggatgttttgctaaataactcctgtggatttaggaatgtgtgctaatagcaatcttcctaattttcatgtttatatggaactatgcagttgagtattgaaagctttaaactgagtttatttacaaggactgagtctagcctacagagaacatacagcagccttctttggaccacagtcttatccgaggggtctgtggttgtatcagaagagccactaaaccaatccccctttccaaaattgaacctcacagacgttcctgttttttgtgattgagaaactggtcaatgaacaggaagacttagagatgtttcacaagcctttgatttttgtttcatttatttgtaataaacctcttccacgtga

SEQ ID NO: 421720 - DNA, 1903 bp, Homo sapiens
cggacgcgtgggtcgacccacgcgtccggtccggctgttgcaccatggcgtccatggggaccctcgccttcgatgaatatgggcgccctttcctcatcatcaaggatcaggaccgcaagtcccgtcttatgggacttgaggccctcaagtctcatataatggcagcaaaggctgtagcaaatacaatgagaacatcacttggaccaaatgggcttgataagatgatggtggataaggatggggatgtgactgtaactaatgatggggccaccatcttaagcatgatggatgttgatcatcagattgccaagctgatggtggaactgtccaagtctcaggatgatgaaattggagatggaaccacaggagtggttgtcctggctggtgccttgttagaagaagcggagcaattgctagaccgaggcattcacccaatcagaatagccgatggctatgagcaggctgctcgcgttgctattgaacacctggacaagatcagcgatagcgtccttgttgacataaaggacaccgaacccctgattcagacagcaaaaaccacgctgggctccaaagtggtcaacagttgtcaccgacagatggctgagattgctgtgaatgccgtcctcactgtagcagatatggagcggagagacgttgactttgagcttatcaaagtagaaggcaaagtgggcggcaggctggaggacactaaactgattaagggcgtgattgtggacaaggatttcagtcacccacagatgccaaaaaaagtggaagatgcgaagattgcaattctcacatgtccatttgaaccacccaaaccaaaaacaaagcataagctggatgtgacctctgtcgaagattataaagcccttcagaaatacgaaaaggagaaatttgaagagatgattcaacaaattaaagagactggtgctaacctagcaatttgtcagtggggctttgatgatgaagcaaatcacttacttcttcagaacaacttgcctgcggttcgctgggtaggaggacctgaaattgagctgattgccatcgcaacaggagggcggatcgtccccaggttctcagagctcacagccgagaagctgggctttgctggtcttgtacaggagatctcatttgggacaactaaggataaaatgctggtcatcgagcagtgtaagaactccagagctgtaaccatttttattagaggaggaaataagatgatcattgaggaggcgaaacgatcccttcacgatgctttgtgtgtcatccggaacctcatccgcgataatcgtgtggtgtatggaggaggggctgctgagatatcctgtgccctggcagttagccaagaggcggataagtgccccaccttagaacagtatgccatgagagcgtttgccgacgcactggaggtcatccccatggccctctctgaaaacagtggcatgaatcccatccagactatgaccgaagtccgagccagacaggtgaaggagatgaaccctgctcttggcatcgactgtttgcacaaggggacaaatgatatgaagcaacagcatgtcatagaaaccttgattggcaaaaagcaacagatatctcttgcaacacaaatggttagaatgattttgaagattgatgacattcgtaagcctggagaatctgaagaatgaagacattgagaaaactatgtagcaagatccacttctgtgattaagtaaatggatgtctcgtgatgcgtctacagttatttattgttacatccttttccagacactgtagatgctataataaaaatagctgtttggtaaccatagtttcacttgttcaaagctgtgtaatcgtgggggtactatctcaactgcttttgtattcattgtattaaaagaatctgtttaaacaacct

SEQ ID NO: 421721 - DNA, 1340 bp, Homo sapiens
  misc_feature (1213)..(1213): n is a, c, g, or t
aataaagaaatagtgctttaagtcaatgaattcctccttgggacccactatcgagaaactatcagtggtaacgttttaaaaaatgacaaattcaatctgctcttgacttgtgtgtcctaagatttccactaagtgtcttcaaacctccccctccccggcttcctggataatagaagttcccgaaggccgccgattccagaagatactgtctggcgtgaaattagtctcagtagaaacataagtcccgcgcgtcttgtgctgcgcgtgcgcaagcttttgggccctcccgagaaagggaagtgcattctcgcttccgtagcggtctccgccggttgggggaaagtaattccggctgttgcaccatggcgtccatggggaccctcgccttcgatgaatatgggcgccctttcctcatcatcaaggatcaggaccgcaagtcccgtcttatgggacttgaggccctcaagtctcatataatggcagcaaaggctgtagcaaatacaatgagaacatcacttggaccaaatgggcttgataagatgatggtggataaggatggggatgtgactgtaactaatgatggggccaccatcttaagcatgatggatgttgatcatcagattgccaagctgatggtggaactgtccaagtctcaggatgatgaaattggagatggaaccacaggagtggttgtcctggctggtgccttgttagaagaagcggagcaattgctagaccgaggcattcacccaatcagaatagccgatggctatgagcaggctgctcgcgttgctattgaacacctggacaagatcagcgatagcgtccttgttgacataaaggacaccgaacccctgattcagacagcaaaaaccacgctgggctccaaagtggtcaacagttgtcaccgacagatggctgagattgctgtgaatgccgtcctcactgtagcagatatggagcggagagacgttgactttgagcttatcaaagtagaaggcaaagtgggcggcaggctggaggacactaaactgattaagggcgtgattgtggacaaggatttcagtcacccacagatgccaaaaaaagtggaagatgcgaagattgcaattctcacatgtccatttgaaccacccaaaccaaaaacaaagcataagctggatgtgacctctgtgaaatttaagccttcgaatccaaagggaattggagaagnccccattagagggctccagcatgcggtggaaacacacctctcaaatgcgggctggagcaaaagatctcaggggcacggaacgacgggggggactgaactgccaccataagagcacgctggggcctag

SEQ ID NO: 421722 - DNA, 2132 bp, Homo sapiens
aataaagaaatagtgctttaagtcaatgaattcctccttgggacccactatcgagaaactatcagtggtaacgttttaaaaaatgacaaattcaatctgctcttgacttgtgtgtcctaagatttccactaagtgtcttcaaacctccccctccccggcttcctggataatagaagttcccgaaggccgccgattccagaagatactgtctggcgtgaaattagtctcagtagaaacataagtcccgcgcgtcttgtgctgcgcgtgcgcaagcttttgggccctcccgagaaagggaagtgcattctcgcttccgtagcggtctccgccggttgggggaaagtaattccggctgttgcaccatggcgtccatggggaccctcgccttcgatgaatatgggcgccctttcctcatcatcaaggatcaggaccgcaagtcccgtcttatgggacttgaggccctcaagtctcatataatggcagcaaaggctgtagcaaatacaatgagaacatcacttggaccaaatgcagattgccaagctgatggtggaactgtccaagtctcaggatgatgaaattggagatggaaccacaggagtggttgtcctggctggtgccttgttagaagaagcggagcaattgctagaccgaggcattcacccaatcagaatagccgatggctatgagcaggctgctcgcgttgctattgaacacctggacaagatcagcgatagcgtccttgttgacataaaggacaccgaacccctgattcagacagcaaaaaccacgctgggctccaaagtggtcaacagttgtcaccgacagatggctgagattgctgtgaatgccgtcctcactgtagcagatatggagcggagagacgttgactttgagcttatcaaagtagaaggcaaagtgggcggcaggctggaggacactaaactgattaagggcgtgattgtggacaaggatttcagtcacccacagatgccaaaaaaagtggaagatgcgaagattgcaattctcacatgtccatttgaaccacccaaaccaaaaacaaagcataagctggatgtgacctctgtcgaagattataaagcccttcagaaatacgaaaaggagaaatttgaagagatgattcaacaaattaaagagactggtgctaacctagcaatttgtcagtggggctttgatgatgaagcaaatcacttacttcttcagaacaacttgcctgcggttcgctgggtaggaggacctgaaattgagctgattgccatcgcaacaggagggcggatcgtccccaggttctcagagctcacagccgagaagctgggctttgctggtcttgtacaggagatctcatttgggacaactaaggataaaatgctggtcatcgagcagtgtaagaactccagagctgtaaccatttttattagaggaggaaataagatgatcattgaggaggcgaaacgatcccttcacgatgctttgtgtgtcatccggaacctcatccgcgataatcgtgtggtgtatggaggaggggctgctgagatatcctgtgccctggcagttagccaagaggcggataagtgccccaccttagaacagtatgccatgagagcgtttgccgacgcactggaggtcatccccatggccctctctgaaaacagtggcatgaatcccatccagactatgaccgaagtccgagccagacaggtgaaggagatgaaccctgctcttggcatcgactgtttgcacaaggggacaaatgatatgaagcaacagcatgtcatagaaaccttgattggcaaaaagcaacagatatctcttgcaacacaaatggttagaatgattttgaagattgatgacattcgtaagcctggagaatctgaagaatgaagacattgagaaaactatgtagcaagatccacttctgtgattaagtaaatggatgtctcgtgatgcgtctacagttatttattgttacatccttttccagacactgtagatgctataataaaaatagctgtttggtaaccatagtttcacttgttcaaagctgtgtaatcgtgggggtactatctcaactgcttttgtattcattgtattaaaagaatctgtttaaacaacct

SEQ ID NO: 421723 - DNA, 2056 bp, Homo sapiens
aataaagaaatagtgctttaagtcaatgaattcctccttgggacccactatcgagaaactatcagtggtaacgttttaaaaaatgacaaattcaatctgctcttgacttgtgtgtcctaagatttccactaagtgtcttcaaacctccccctccccggcttcctggataatagaagttcccgaaggccgccgattccagaagatactgtctggcgtgaaattagtctcagtagaaacataagtcccgcgcgtcttgtgctgcgcgtgcgcaagcttttgggccctcccgagaaagggaagtgcattctcgcttccgtagcggtctccgccggttgggggaaagtaattccggctgttgcaccatggcgtccatggggaccctcgccttcgatgaatatgggcgccctttcctcatcatcaaggatcaggaccgcaagtcccgtcttatgggacttgaggccctcaagtctcatataatggcagcaaaggctgtagcaaatacaatgagaacatcacttggaccaaatgtcctggctggtgccttgttagaagaagcggagcaattgctagaccgaggcattcacccaatcagaatagccgatggctatgagcaggctgctcgcgttgctattgaacacctggacaagatcagcgatagcgtccttgttgacataaaggacaccgaacccctgattcagacagcaaaaaccacgctgggctccaaagtggtcaacagttgtcaccgacagatggctgagattgctgtgaatgccgtcctcactgtagcagatatggagcggagagacgttgactttgagcttatcaaagtagaaggcaaagtgggcggcaggctggaggacactaaactgattaagggcgtgattgtggacaaggatttcagtcacccacagatgccaaaaaaagtggaagatgcgaagattgcaattctcacatgtccatttgaaccacccaaaccaaaaacaaagcataagctggatgtgacctctgtcgaagattataaagcccttcagaaatacgaaaaggagaaatttgaagagatgattcaacaaattaaagagactggtgctaacctagcaatttgtcagtggggctttgatgatgaagcaaatcacttacttcttcagaacaacttgcctgcggttcgctgggtaggaggacctgaaattgagctgattgccatcgcaacaggagggcggatcgtccccaggttctcagagctcacagccgagaagctgggctttgctggtcttgtacaggagatctcatttgggacaactaaggataaaatgctggtcatcgagcagtgtaagaactccagagctgtaaccatttttattagaggaggaaataagatgatcattgaggaggcgaaacgatcccttcacgatgctttgtgtgtcatccggaacctcatccgcgataatcgtgtggtgtatggaggaggggctgctgagatatcctgtgccctggcagttagccaagaggcggataagtgccccaccttagaacagtatgccatgagagcgtttgccgacgcactggaggtcatccccatggccctctctgaaaacagtggcatgaatcccatccagactatgaccgaagtccgagccagacaggtgaaggagatgaaccctgctcttggcatcgactgtttgcacaaggggacaaatgatatgaagcaacagcatgtcatagaaaccttgattggcaaaaagcaacagatatctcttgcaacacaaatggttagaatgattttgaagattgatgacattcgtaagcctggagaatctgaagaatgaagacattgagaaaactatgtagcaagatccacttctgtgattaagtaaatggatgtctcgtgatgcgtctacagttatttattgttacatccttttccagacactgtagatgctataataaaaatagctgtttggtaaccatagtttcacttgttcaaagctgtgtaatcgtgggggtactatctcaactgcttttgtattcattgtattaaaagaatctgtttaaacaacct

SEQ ID NO: 421724 - DNA, 2190 bp, Homo sapiens
aataaagaaatagtgctttaagtcaatgaattcctccttgggacccactatcgagaaactatcagtggtaacgttttaaaaaatgacaaattcaatctgctcttgacttgtgtgtcctaagatttccactaagtgtcttcaaacctccccctccccggcttcctggataatagaagttcccgaaggccgccgattccagaagatactgtctggcgtgaaattagtctcagtagaaacataagtcccgcgcgtcttgtgctgcgcgtgcgcaagcttttgggccctcccgagaaagggaagtgcattctcgcttccgtagcggtctccgccggttgggggaaagtaattccggctgttgcaccatggcgtccatggggaccctcgccttcgatgaatatgggcgccctttcctcatcatcaaggatcaggaccgcaagtcccgtcttatgggacttgaggccctcaagtctcatataatggcagcaaaggctgtagcaaatacaatgagaacatcacttggaccaaatgggcttgataagatgatggtggataaggatggggatgtgactgtaactaatgatggggccaccatcttaagcatgatggatgttgatcatcagattgccaagctgatggtggaactgtccaagtctcaggatgatgaaattggagatggaaccacaggagtggttgtcctggctggtgccttgttagaagaagcggagcaattgctagaccgaggcattcacccaatcagaatagccgatggctatgagcaggctgctcgcgttgctattgaacacctggacaagatcagcgatagcgtccttgttgacataaaggacaccgaacccctgattcagacagcaaaaaccacgctgggctccaaagtattgctgtgaatgccgtcctcactgtagcagatatggagcggagagacgttgactttgagcttatcaaagtagaaggcaaagtgggcggcaggctggaggacactaaactgattaagggcgtgattgtggacaaggatttcagtcacccacagatgccaaaaaaagtggaagatgcgaagattgcaattctcacatgtccatttgaaccacccaaaccaaaaacaaagcataagctggatgtgacctctgtcgaagattataaagcccttcagaaatacgaaaaggagaaatttgaagagatgattcaacaaattaaagagactggtgctaacctagcaatttgtcagtggggctttgatgatgaagcaaatcacttacttcttcagaacaacttgcctgcggttcgctgggtaggaggacctgaaattgagctgattgccatcgcaacaggagggcggatcgtccccaggttctcagagctcacagccgagaagctgggctttgctggtcttgtacaggagatctcatttgggacaactaaggataaaatgctggtcatcgagcagtgtaagaactccagagctgtaaccatttttattagaggaggaaataagatgatcattgaggaggcgaaacgatcccttcacgatgctttgtgtgtcatccggaacctcatccgcgataatcgtgtggtgtatggaggaggggctgctgagatatcctgtgccctggcagttagccaagaggcggataagtgccccaccttagaacagtatgccatgagagcgtttgccgacgcactggaggtcatccccatggccctctctgaaaacagtggcatgaatcccatccagactatgaccgaagtccgagccagacaggtgaaggagatgaaccctgctcttggcatcgactgtttgcacaaggggacaaatgatatgaagcaacagcatgtcatagaaaccttgattggcaaaaagcaacagatatctcttgcaacacaaatggttagaatgattttgaagattgatgacattcgtaagcctggagaatctgaagaatgaagacattgagaaaactatgtagcaagatccacttctgtgattaagtaaatggatgtctcgtgatgcgtctacagttatttattgttacatccttttccagacactgtagatgctataataaaaatagctgtttggtaaccatagtttcacttgttcaaagctgtgtaatcgtgggggtactatctcaactgcttttgtattcattgtattaaaagaatctgtttaaacaacct

SEQ ID NO: 421725 - DNA, 2046 bp, Homo sapiens
aataaagaaatagtgctttaagtcaatgaattcctccttgggacccactatcgagaaactatcagtggtaacgttttaaaaaatgacaaattcaatctgctcttgacttgtgtgtcctaagatttccactaagtgtcttcaaacctccccctccccggcttcctggataatagaagttcccgaaggccgccgattccagaagatactgtctggcgtgaaattagtctcagtagaaacataagtcccgcgcgtcttgtgctgcgcgtgcgcaagcttttgggccctcccgagaaagggaagtgcattctcgcttccgtagcggtctccgccggttgggggaaagtaattccggctgttgcaccatggcgtccatggggaccctcgccttcgatgaatatgggcgccctttcctcatcatcaaggatcaggaccgcaagtcccgtcttatgggacttgaggccctcaagtctcatataatggcagcaaaggctgtagcaaatacaatgagaacatcacttggaccaaatgggcttgataagatgatggtggataaggatggggatgtgactgtaactaatgatggggccaccatcttaagcatgatggatgttgatcatcagattgccaagctgatggtggaactgtccaagtctcaggatgatgaaattggagatggaaccacaggagtggttgtcctggctggtgccttgttagaagaagcggagcaattgctagaccgaggcattcacccaatcagaatagccgatggctatgagcagatatggagcggagagacgttgactttgagcttatcaaagtagaaggcaaagtgggcggcaggctggaggacactaaactgattaagggcgtgattgtggacaaggatttcagtcacccacagatgccaaaaaaagtggaagatgcgaagattgcaattctcacatgtccatttgaaccacccaaaccaaaaacaaagcataagctggatgtgacctctgtcgaagattataaagcccttcagaaatacgaaaaggagaaatttgaagagatgattcaacaaattaaagagactggtgctaacctagcaatttgtcagtggggctttgatgatgaagcaaatcacttacttcttcagaacaacttgcctgcggttcgctgggtaggaggacctgaaattgagctgattgccatcgcaacaggagggcggatcgtccccaggttctcagagctcacagccgagaagctgggctttgctggtcttgtacaggagatctcatttgggacaactaaggataaaatgctggtcatcgagcagtgtaagaactccagagctgtaaccatttttattagaggaggaaataagatgatcattgaggaggcgaaacgatcccttcacgatgctttgtgtgtcatccggaacctcatccgcgataatcgtgtggtgtatggaggaggggctgctgagatatcctgtgccctggcagttagccaagaggcggataagtgccccaccttagaacagtatgccatgagagcgtttgccgacgcactggaggtcatccccatggccctctctgaaaacagtggcatgaatcccatccagactatgaccgaagtccgagccagacaggtgaaggagatgaaccctgctcttggcatcgactgtttgcacaaggggacaaatgatatgaagcaacagcatgtcatagaaaccttgattggcaaaaagcaacagatatctcttgcaacacaaatggttagaatgattttgaagattgatgacattcgtaagcctggagaatctgaagaatgaagacattgagaaaactatgtagcaagatccacttctgtgattaagtaaatggatgtctcgtgatgcgtctacagttatttattgttacatccttttccagacactgtagatgctataataaaaatagctgtttggtaaccatagtttcacttgttcaaagctgtgtaatcgtgggggtactatctcaactgcttttgtattcattgtattaaaagaatctgtttaaacaacct

SEQ ID NO: 421726 - DNA, 700 bp, Homo sapiens
ttagaggaggaaataagatgatcattgaggaggcgaaacgatcccttcacgatgctttgtgtgtcatccggaacctcatccgcgataatcgtgtggtgtatggaggaggggctgctgagatatcctgtgccctggcagttagccaagaggcggataagtgccccaccttagaacagtatgccatgagagcgtttgccgacgcactggaggtcatccccatggccctctctgaaaacagtggcatgaatcccatccagactatgaccgaagtccgagccagacaggtgaaggagatgaaccctgctcttggcatcgactgtttgcacaaggggacaaatgatatgaagcaacagcatgtcatagaaaccttgattggcaaaaagcaacagatatctcttgcaacacaaatggttagaatgattttgaagattgatgacattcgtaagcctggagaatctgaagaatgaagacattgagaaaactatgtagcaagatccacttctgtgattaagtaaatggatgtctcgtgatgcgtctacagttatttattgttacatccttttccagacactgtagatgctataataaaaatagctgtttggtaaccatagtttcacttgttcaaagctgtgtaatcgtgggggtactatctcaactgcttttgtattcattgtattaaaagaatctgtttaaacaacct

SEQ ID NO: 421727 - DNA, 1070 bp, Homo sapiens
  misc_feature (963)..(963): n is a, c, g, or t
  misc_feature (967)..(967): n is a, c, g, or t
  misc_feature (1007)..(1007): n is a, c, g, or t
  misc_feature (1009)..(1009): n is a, c, g, or t
  misc_feature (1052)..(1052): n is a, c, g, or t
aataaagaaatagtgctttaagtcaatgaattcctccttgggacccactatcgagaaactatcagtggtaacgttttaaaaaatgacaaattcaatctgctcttgacttgtgtgtcctaagatttccactaagtgtcttcaaacctccccctccccggcttcctggataatagaagttcccgaaggccgccgattccagaagatactgtctggcgtgaaattagtctcagtagaaacataagtcccgcgcgtcttgtgctgcgcgtgcgcaagcttttgggccctcccgagaaagggaagtgcattctcgcttccgtagcggtctccgccggttgggggaaagtaattccggctgttgcaccatggcgtccatggggaccctcgccttcgatgaatatgggcgccctttcctcatcatcaaggatcaggaccgcaagtcccgtcttatgggacttgaggccctcaagtctcatataatggcagcaaaggctgtagcaaatacaatgagaacatcacttggaccaaatgggcttgataagatgatggtggataaggatggggatgtgactgtaactaatgatggggccaccatcttaagcatgatggatgttgatcatcagattgccaagctgatggtggaactgtccaagtctcaggatgatgaaattggagatggaaccacaggagtggttgtcctggctggtgccttgttagaagaagcggagcaattgctagaccgaggcattcacccaatcagaatagccgatggctatgagcaggctgctcgcgttgctattgaacacctggacaagatcagcgatagcgtccttgttgacataaaggacaccgaacccctgattcagacagcaaaaaccacgctgggctccaaagtgtcaaccagttgttcacccgaacagatggcttgaaaattgcctgttgaatgcccgtccctccacttgttancaanaatattggaaccgggaaaaaaacgtttgaactttttgaancnttatccaaaagttaaaaaaggccaaaatttggggccgggcaanggcttgggaaaggaacac

SEQ ID NO: 421728 - DNA, 2310 bp, Homo sapiens
ttgtgctccaattgtgtgtttccatgtaatctccctcactagactggaagctggggatggaaaggggaagcatcaaaaaaacatgcaaaactaggagcttggcttctccttgcaactttactttttctttttttctaggaactgagttcaatgattcttaagaaaaagtatttcatgataaatgagtgaacaaatgtcttaatagaaaagtaaaattgcaggcggggctgcttctgcccagctctacaggggtagactacaagtcccagtacgcctcgggtcagcatctcttcacgtcactccccctccctggggtgggcaggtccggagggcggggcccgggggcagctgggctctcaggcgctgccggaggagagaaatgccccaggctctccggggcacacaaagcgcaggcgcagcgggttgggtggcagcagcatcgagtagcggccgcttaggcagcaacatccgcaacaagtgtagacaaggtcccgcctgactccgctctggaaagtccttttgaagaaatggccctggtgaggggcggctggctgtggagacagagctccatcctccgccgctggaagcggaactggtttgccctgtggctggacgggaccctgggatactaccacgatgagacagcgcaggacgaggaggaccgtgtgctcatccacttcaatgtccgtgacataaagatcggcccagagtgccatgatgtgcagcccccagagggccggagccgagatggcctgctgactgtgaacctacgggaaggcggccgcctgcacctctgtgcggagaccaaggatgatgccctagcatggaagacagcactgctggaggcaaactccaccccggtgcgcgtctacagcccgtaccaagactactacgaggtggtgccccccaatgcacacgaggccacgtatgtccgcagctactacggaccgccctacgcaggccctggcgtgacgcacgtgatagtgcgggaggatccctgctacagcgccggcgcccctctggccatgggcatgcttgcgggagccgccactggggcggcgctgggctcgctcatgtggtcgccctgctggttctgagccctgggactcggagcactgacccctgcgcttggattgctagactcctcttcctcctggaccccatcctctaccatccaagccctgtcccactttggccctatcctctccattagctccttccgggtttggaccattccccccactccctacccttaatccccacatgggaagaagctatcatcacaggtacaaacatcgcttgaagtcttcacatctaccactagacacccccaaaatctgttatagacatttatggatacatttcctctaaacacaacagggcacagcaaatacgacttcatttggcttcgagttccccaggcgctgtagacacaacatgaatcgggctctctgctctctccttagggagctcgagtcctggtggggagaacaggagtaaacaaggacttgacaaagctgaagagttatcagtcctttgacaaggacaggtggggcagggagcaagacaggtaggctggaagaacagttattggcaagtatgcagagccgtgaacgtcatggcatgtccaaggaattaaatgggagttcatttgggctggggtggaggctgggatcagaccgtggtgggccttcaagctaaggagcttcctaggtgaaaggggagatgtgagccttctctggagggaagtttcatgattgcatctataatgaatatattgcctgttttgtgaatactgacacatgtccatacctaaaacactcctgagttaagtcccatccttcccacaaacagcttcctggctggtacccatgataacaattgagctgaacctggggacccctggttggggaacaggtgagttctatttgagacttccagccctagaaagctgcctccgtccagaaatgcctctcacaccaggagctcggccctctctttgtagctgtgactgtcaccctctcaggctttgtctcatccttcattctgaataagatggcagtgttctcctctggggcctgatccacctctacaccagcccaggaagccccatctgtgcctgccctcaggtggtccaccagtctccccctttggttcccttccagtctcttccccctttctatcccaatcaccaatagaaatgctaacatccctgcctggtagccagactagcccactaaagctcccctgtaaatgggggctccattagttctgctgccgagactaataaagatttggttggctctagca

SEQ ID NO: 421729 - DNA, 2267 bp, Homo sapiens
aagagaggaaggcttaaagagccagactgcgcagccaggactggggtatgggcgctgtcctgcaggccaaagaatgaagatgtagccccgcccccaacctaggaggaggaccagcccggttcctgtcctgcccccgcaacctcgccccgattccactccgggaacctcggcgatgctgagccaagaccacttctgaatcagggatgacttgtctagtgaacgtagggtcagagccatcagttggaaaggctgggaggagcctggagaaagaggcgaccttccttgggatctgtgcgctccctccttgcctccccctccagcctcccacttggtagcaccttcctgatccccttatctctaaggcgctcagggaaatgccccgctgcgggagccttctgggaaatgctgccctggccacccaggaaccatgagccctgcagccccggtcccgcctgactccgctctggaaagtccttttgaagaaatggccctggtgaggggcggctggctgtggagacagagctccatcctccgccgctggaagcggaactggtttgccctgtggctggacgggaccctgggatactaccacgatgagacagcgcaggacgaggaggaccgtgtgctcatccacttcaatgtccgtgacataaagatcggcccagagtgccatgatgtgcagcccccagagggccggagccgagatggcctgctgactgtgaacctacgggaaggcggccgcctgcacctctgtgcggagaccaaggatgatgccctagcatggaagacagcactgctggaggcaaactccaccccggtgcgcgtctacagcccgtaccaagactactacgaggtggtgccccccaatgcacacgaggccacgtatgtccgcagctactacggaccgccctacgcaggccctggcgtgacgcacgtgatagtgcgggaggatccctgctacagcgccggcgcccctctggccatgggcatgcttgcgggagccgccactggggcggcgctgggctcgctcatgtggtcgccctgctggttctgagccctgggactcggagcactgacccctgcgcttggattgctagactcctcttcctcctggaccccatcctctaccatccaagccctgtcccactttggccctatcctctccattagctccttccgggtttggaccattccccccactccctacccttaatccccacatgggaagaagctatcatcacaggtacaaacatcgcttgaagtcttcacatctaccactagacacccccaaaatctgttatagacatttatggatacatttcctctaaacacaacagggcacagcaaatacgacttcatttggcttcgagttccccaggcgctgtagacacaacatgaatcgggctctctgctctctccttagggagctcgagtcctggtggggagaacaggagtaaacaaggacttgacaaagctgaagagttatcagtcctttgacaaggacaggtggggcagggagcaagacaggtaggctggaagaacagttattggcaagtatgcagagccgtgaacgtcatggcatgtccaaggaattaaatgggagttcatttgggctggggtggaggctgggatcagaccgtggtgggccttcaagctaaggagcttcctaggtgaaaggggagatgtgagccttctctggagggaagtttcatgattgcatctataatgaatatattgcctgttttgtgaatactgacacatgtccatacctaaaacactcctgagttaagtcccatccttcccacaaacagcttcctggctggtacccatgataacaattgagctgaacctggggacccctggttggggaacaggtgagttctatttgagacttccagccctagaaagctgcctccgtccagaaatgcctctcacaccaggagctcggccctctctttgtagctgtgactgtcaccctctcaggctttgtctcatccttcattctgaataagatggcagtgttctcctctggggcctgatccacctctacaccagcccaggaagccccatctgtgcctgccctcaggtggtccaccagtctccccctttggttcccttccagtctcttccccctttctatcccaatcaccaatagaaatgctaacatccctgcctggtagccagactagcccactaaagctcccctgtaaatgggggctccattagttctgctgccgagactaataaagatttggttggctctagca

SEQ ID NO: 421730 - DNA, 2415 bp, Homo sapiens
ttgtgctccaattgtgtgtttccatgtaatctccctcactagactggaagctggggatggaaaggggaagcatcaaaaaaacatgcaaaactaggagcttggcttctccttgcaactttactttttctttttttctaggaactgagttcaatgattcttaagaaaaagtatttcatgataaatgagtgaacaaatgtcttaatagaaaagtaaaattgcaggcggggctgcttctgcccagctctacaggggtagactacaagtcccagtacgcctcgggtcagcatctcttcacgtcactccccctccctggggtgggcaggtccggagggcggggcccgggggcagctgggctctcaggcgctgccggaggagagaaatgccccaggctctccggggcacacaaagcgcaggcgcagcgggttgggtggcagcagcatcgagtagcggccgcttaggcagcaacatccgcaacaagtgtagacaaggtcccgcctgactccgctctggaaagtccttttgaagaaatggccctggtgaggggcggctggctgtggagacagagctccatcctccgccgctggaagcggaactggtttgccctgtggctggacgggaccctgggatactaccacgatgagacagcgcaggacgaggaggaccgtgtgctcatccacttcaatgtccgtgacataaagatcggcccagagtgccatgatgtgcagcccccagagggccggagccgagatggcctgctgactgtgaacctacgggaaggcggccgcctgcacctctgtgcggagaccaaggatgatgccctagcatggaagacagcactgctggaggcaaactccaccccggccccagctggagccaccgtccctcccaggagccgccgggtttgctccaaggtcaggtgtgtgacccgctcgtggagcccctgtaaggttgagaggcggatctgggtgcgcgtctacagcccgtaccaagactactacgaggtggtgccccccaatgcacacgaggccacgtatgtccgcagctactacggaccgccctacgcaggccctggcgtgacgcacgtgatagtgcgggaggatccctgctacagcgccggcgcccctctggccatgggcatgcttgcgggagccgccactggggcggcgctgggctcgctcatgtggtcgccctgctggttctgagccctgggactcggagcactgacccctgcgcttggattgctagactcctcttcctcctggaccccatcctctaccatccaagccctgtcccactttggccctatcctctccattagctccttccgggtttggaccattccccccactccctacccttaatccccacatgggaagaagctatcatcacaggtacaaacatcgcttgaagtcttcacatctaccactagacacccccaaaatctgttatagacatttatggatacatttcctctaaacacaacagggcacagcaaatacgacttcatttggcttcgagttccccaggcgctgtagacacaacatgaatcgggctctctgctctctccttagggagctcgagtcctggtggggagaacaggagtaaacaaggacttgacaaagctgaagagttatcagtcctttgacaaggacaggtggggcagggagcaagacaggtaggctggaagaacagttattggcaagtatgcagagccgtgaacgtcatggcatgtccaaggaattaaatgggagttcatttgggctggggtggaggctgggatcagaccgtggtgggccttcaagctaaggagcttcctaggtgaaaggggagatgtgagccttctctggagggaagtttcatgattgcatctataatgaatatattgcctgttttgtgaatactgacacatgtccatacctaaaacactcctgagttaagtcccatccttcccacaaacagcttcctggctggtacccatgataacaattgagctgaacctggggacccctggttggggaacaggtgagttctatttgagacttccagccctagaaagctgcctccgtccagaaatgcctctcacaccaggagctcggccctctctttgtagctgtgactgtcaccctctcaggctttgtctcatccttcattctgaataagatggcagtgttctcctctggggcctgatccacctctacaccagcccaggaagccccatctgtgcctgccctcaggtggtccaccagtctccccctttggttcccttccagtctcttccccctttctatcccaatcaccaatagaaatgctaacatccctgcctggtagccagactagcccactaaagctcccctgtaaatgggggctccattagttctgctgccgagactaataaagatttggttggctctagca

SEQ ID NO: 421731 - DNA, 650 bp, Homo sapiens
cgtagggcaatgcattacattttctacatttatatatgattagttagataacaaataccattgtgttacaattgcctacagtattcagggcagtagcctgctgaacaggtttgttggcttggagcaataggatataccatatactctaggtgtgtgccacctaggtttgtttgtaagtacactctatgatattcacataactaaaattgcctaaggacgcatttctcagactgtatccctgttgtttaaaagacgcataactgtattttagttacttctcatccctatccttcctttcccttccttcctccccaacccctgtttatttcctgggcctggggcttggccatgttcccctccttgtgactagtagagctgggtctttcaagtggcattattgtagagctgctagcaaatattagactacctataaggagaaattggaagccccatctgtgcctgccctcaggtggtccaccagtctccccctttggttcccttccagtctcttccccctttctatcccaatcaccaatagaaatgctaacatccctgcctggtagccagactagcccactaaagctcccctgtaaatgggggctccattagttctgctgccgagactaataaagatttggttggctctagca

SEQ ID NO: 421732 - DNA, 2147 bp, Homo sapiens
ttgtgctccaattgtgtgtttccatgtaatctccctcactagactggaagctggggatggaaaggggaagcatcaaaaaaacatgcaaaactaggagcttggcttctccttgcaactttactttttctttttttctaggaactgagttcaatgattcttaagaaaaagtatttcatgataaatgagtgaacaaatgtcttaatagaaaagtaaaattgcaggcggggctgcttctgcccagctctacaggggtagactacaagtcccagtacgcctcgggtcagcatctcttcacgtcactccccctccctggggtgggcaggtccggagggcggggcccgggggcagctgggctctcaggcgctgccggaggagagaaatgccccaggctctccggggcacacaaagcgcaggcgcagcgggttgggtggcagcagcatcgagtagcggccgcttaggcagcaacatccgcaacaagtgtagacaaggtcccgcctgactccgctctggaaagtccttttgaagaaatggccctggtgaggggcggctggctgtggagacagagctccatcctccgccgctggaagcggaactggtttgccctgtggctggacgggaccctgggatactaccacgatgagacagcgcaggacgaggaggaccgtgtgctcatccacttcaatgtccgtgacataaagatcggcccagagtgccatgatgtgcagcccccagagggccggagccgagatggcctgctgactgtgaacctacgggaaggcggccgcctgcacctctgtgcggagaccaaggatgatgccctagcatggaagacagcactgctggaggcaaactccaccccggtgcgcgtctacagcccgtaccaagactactacgaggtggtgccccccaatgcacacgaggccacgtatgtccgcagctactacggaccgccctacgcaggccctggcgtgacgcacgtgatagtgcgggaggatccctgctacagcgccggcgcccctctggccatgggcatgcttgcgggagccgccactggggcggcgctgggctcgctcatgtggtcgccctgctggttctgagccctgggactcggagcactgacccctgcgcttggattgctagactcctcttcctcctggaccccatcctctaccatccaagccctgtcccactttggccctatcctctccattagctccttccgggtttggaccattccccccactccctacccttaatccccacatgggaagaagctatcatcacaggtacaaacatcgcttgaagtcttcacatctaccactagacacccccaaaatctgttatagacatttatggatacatttcctctaaacacaacagggcacagcaaatacgacttcatttggcttcgagttccccaggcgctgtagacacaacatgaatcgggctctctgctctctccttagggagctcgagtcctggtggggagaacaggagtaaacaaggacttgacaaagctgaagagttatcagtcctttgacaaggacaggtggggcagggagcaagacaggtaggctggagggaagtttcatgattgcatctataatgaatatattgcctgttttgtgaatactgacacatgtccatacctaaaacactcctgagttaagtcccatccttcccacaaacagcttcctggctggtacccatgataacaattgagctgaacctggggacccctggttggggaacaggtgagttctatttgagacttccagccctagaaagctgcctccgtccagaaatgcctctcacaccaggagctcggccctctctttgtagctgtgactgtcaccctctcaggctttgtctcatccttcattctgaataagatggcagtgttctcctctggggcctgatccacctctacaccagcccaggaagccccatctgtgcctgccctcaggtggtccaccagtctccccctttggttcccttccagtctcttccccctttctatcccaatcaccaatagaaatgctaacatccctgcctggtagccagactagcccactaaagctcccctgtaaatgggggctccattagttctgctgccgagactaataaagatttggttggctctagca

SEQ ID NO: 421733 - DNA, 1851 bp, Homo sapiens
tgtgtattgattagaggatccccgctacagtcccgcctgactccgctctggaaagtccttttgaagaaatggccctggtgaggggcggctggctgtggagacagagctccatcctccgccgctggaagcggaactggtttgccctgtggctggacgggaccctgggatactaccacgatgagacagcgcaggacgaggaggaccgtgtgctcatccacttcaatgtccgtgacataaagatcggcccagagtgccatgatgtgcagcccccagagggccggagccgagatggcctgctgactgtgaacctacgggaaggcggccgcctgcacctctgtgcggagaccaaggatgatgccctagcatggaagacagcactgctggaggcaaactccaccccggtgcgcgtctacagcccgtaccaagactactacgaggtggtgccccccaatgcacacgaggccacgtatgtccgcagctactacggaccgccctacgcaggccctggcgtgacgcacgtgatagtgcgggaggatccctgctacagcgccggcgcccctctggccatgggcatgcttgcgggagccgccactggggcggcgctgggctcgctcatgtggtcgccctgctggttctgagccctgggactcggagcactgacccctgcgcttggattgctagactcctcttcctcctggaccccatcctctaccatccaagccctgtcccactttggccctatcctctccattagctccttccgggtttggaccattccccccactccctacccttaatccccacatgggaagaagctatcatcacaggtacaaacatcgcttgaagtcttcacatctaccactagacacccccaaaatctgttatagacatttatggatacatttcctctaaacacaacagggcacagcaaatacgacttcatttggcttcgagttccccaggcgctgtagacacaacatgaatcgggctctctgctctctccttagggagctcgagtcctggtggggagaacaggagtaaacaaggacttgacaaagctgaagagttatcagtcctttgacaaggacaggtggggcagggagcaagacaggtaggctggaagaacagttattggcaagtatgcagagccgtgaacgtcatggcatgtccaaggaattaaatgggagttcatttgggctggggtggaggctgggatcagaccgtggtgggccttcaagctaaggagcttcctaggtgaaaggggagatgtgagccttctctggagggaagtttcatgattgcatctataatgaatatattgcctgttttgtgaatactgacacatgtccatacctaaaacactcctgagttaagtcccatccttcccacaaacagcttcctggctggtacccatgataacaattgagctgaacctggggacccctggttggggaacaggtgagttctatttgagacttccagccctagaaagctgcctccgtccagaaatgcctctcacaccaggagctcggccctctctttgtagctgtgactgtcaccctctcaggctttgtctcatccttcattctgaataagatggcagtgttctcctctggggcctgatccacctctacaccagcccaggaagccccatctgtgcctgccctcaggtggtccaccagtctccccctttggttcccttccagtctcttccccctttctatcccaatcaccaatagaaatgctaacatccctgcctggtagccagactagcccactaaagctcccctgtaaatgggggctccattagttctgctgccgagactaataaagatttggttggctctagca

SEQ ID NO: 421734 - DNA, 1993 bp, Homo sapiens
gcggaggcaagcgctggcaagtgagtcgccctcaggaacagagggcacctacctggattccagtgcaagctacatcatgtacatggatgagtcatttgctaaccctcagtttgtccatctgtaaaacaggagtaaagattcccttcctaacagggttagagtggggacaaggtcccgcctgactccgctctggaaagtccttttgaagaaatggccctggtgaggggcggctggctgtggagacagagctccatcctccgccgctggaagcggaactggtttgccctgtggctggacgggaccctgggatactaccacgatgagacagcgcaggacgaggaggaccgtgtgctcatccacttcaatgtccgtgacataaagatcggcccagagtgccatgatgtgcagcccccagagggccggagccgagatggcctgctgactgtgaacctacgggaaggcggccgcctgcacctctgtgcggagaccaaggatgatgccctagcatggaagacagcactgctggaggcaaactccaccccggtgcgcgtctacagcccgtaccaagactactacgaggtggtgccccccaatgcacacgaggccacgtatgtccgcagctactacggaccgccctacgcaggccctggcgtgacgcacgtgatagtgcgggaggatccctgctacagcgccggcgcccctctggccatgggcatgcttgcgggagccgccactggggcggcgctgggctcgctcatgtggtcgccctgctggttctgagccctgggactcggagcactgacccctgcgcttggattgctagactcctcttcctcctggaccccatcctctaccatccaagccctgtcccactttggccctatcctctccattagctccttccgggtttggaccattccccccactccctacccttaatccccacatgggaagaagctatcatcacaggtacaaacatcgcttgaagtcttcacatctaccactagacacccccaaaatctgttatagacatttatggatacatttcctctaaacacaacagggcacagcaaatacgacttcatttggcttcgagttccccaggcgctgtagacacaacatgaatcgggctctctgctctctccttagggagctcgagtcctggtggggagaacaggagtaaacaaggacttgacaaagctgaagagttatcagtcctttgacaaggacaggtggggcagggagcaagacaggtaggctggaagaacagttattggcaagtatgcagagccgtgaacgtcatggcatgtccaaggaattaaatgggagttcatttgggctggggtggaggctgggatcagaccgtggtgggccttcaagctaaggagcttcctaggtgaaaggggagatgtgagccttctctggagggaagtttcatgattgcatctataatgaatatattgcctgttttgtgaatactgacacatgtccatacctaaaacactcctgagttaagtcccatccttcccacaaacagcttcctggctggtacccatgataacaattgagctgaacctggggacccctggttggggaacaggtgagttctatttgagacttccagccctagaaagctgcctccgtccagaaatgcctctcacaccaggagctcggccctctctttgtagctgtgactgtcaccctctcaggctttgtctcatccttcattctgaataagatggcagtgttctcctctggggcctgatccacctctacaccagcccaggaagccccatctgtgcctgccctcaggtggtccaccagtctccccctttggttcccttccagtctcttccccctttctatcccaatcaccaatagaaatgctaacatccctgcctggtagccagactagcccactaaagctcccctgtaaatgggggctccattagttctgctgccgagactaataaagatttggttggctctagca

SEQ ID NO: 421735 - DNA, 1845 bp, Homo sapiens
gtttgaagccaggactgctgggtgtcccgcctgactccgctctggaaagtccttttgaagaaatggccctggtgaggggcggctggctgtggagacagagctccatcctccgccgctggaagcggaactggtttgccctgtggctggacgggaccctgggatactaccacgatgagacagcgcaggacgaggaggaccgtgtgctcatccacttcaatgtccgtgacataaagatcggcccagagtgccatgatgtgcagcccccagagggccggagccgagatggcctgctgactgtgaacctacgggaaggcggccgcctgcacctctgtgcggagaccaaggatgatgccctagcatggaagacagcactgctggaggcaaactccaccccggtgcgcgtctacagcccgtaccaagactactacgaggtggtgccccccaatgcacacgaggccacgtatgtccgcagctactacggaccgccctacgcaggccctggcgtgacgcacgtgatagtgcgggaggatccctgctacagcgccggcgcccctctggccatgggcatgcttgcgggagccgccactggggcggcgctgggctcgctcatgtggtcgccctgctggttctgagccctgggactcggagcactgacccctgcgcttggattgctagactcctcttcctcctggaccccatcctctaccatccaagccctgtcccactttggccctatcctctccattagctccttccgggtttggaccattccccccactccctacccttaatccccacatgggaagaagctatcatcacaggtacaaacatcgcttgaagtcttcacatctaccactagacacccccaaaatctgttatagacatttatggatacatttcctctaaacacaacagggcacagcaaatacgacttcatttggcttcgagttccccaggcgctgtagacacaacatgaatcgggctctctgctctctccttagggagctcgagtcctggtggggagaacaggagtaaacaaggacttgacaaagctgaagagttatcagtcctttgacaaggacaggtggggcagggagcaagacaggtaggctggaagaacagttattggcaagtatgcagagccgtgaacgtcatggcatgtccaaggaattaaatgggagttcatttgggctggggtggaggctgggatcagaccgtggtgggccttcaagctaaggagcttcctaggtgaaaggggagatgtgagccttctctggagggaagtttcatgattgcatctataatgaatatattgcctgttttgtgaatactgacacatgtccatacctaaaacactcctgagttaagtcccatccttcccacaaacagcttcctggctggtacccatgataacaattgagctgaacctggggacccctggttggggaacaggtgagttctatttgagacttccagccctagaaagctgcctccgtccagaaatgcctctcacaccaggagctcggccctctctttgtagctgtgactgtcaccctctcaggctttgtctcatccttcattctgaataagatggcagtgttctcctctggggcctgatccacctctacaccagcccaggaagccccatctgtgcctgccctcaggtggtccaccagtctccccctttggttcccttccagtctcttccccctttctatcccaatcaccaatagaaatgctaacatccctgcctggtagccagactagcccactaaagctcccctgtaaatgggggctccattagttctgctgccgagactaataaagatttggttggctctagca

SEQ ID NO: 421736 - DNA, 2222 bp, Homo sapiens
ttgtgctccaattgtgtgtttccatgtaatctccctcactagactggaagctggggatggaaaggggaagcatcaaaaaaacatgcaaaactaggagcttggcttctccttgcaactttactttttctttttttctaggaactgagttcaatgattcttaagaaaaagtatttcatgataaatgagtgaacaaatgtcttaatagaaaagtaaaattgcaggcggggctgcttctgcccagctctacaggggtagactacaagtcccagtacgcctcgggtcagcatctcttcacgtcactccccctccctggggtgggcaggtccggagggcggggcccgggggcagctgggctctcaggcgctgccggaggagagaaatgccccaggctctccggggcacacaaagcgcaggcgcagcgggttgggtggcagcagcatcgagtagcggccgcttaggcagcaacatccgcaacaagtgtagacaaggtcccgcctgactccgctctggaaagtccttttgaagaaatggccctggtgaggggcggctggctgtggagacagagctccatcctccgccgctggaagcggaactggtttgccctgtggctggacgggaccctgggatactaccacgatgagacagcgcaggacgaggaggaccgtgtgctcatccacttcaatgtccgtgacataaagatcggcccagagtgccatgatgtgcagcccccagagggccggagccgagatggcctgctgactgtgaacctacgggaaggcggccgcctgcacctctgtgcggagaccaaggatgatgccctagcatggaagacagcactgctggaggcaaactccaccccggtgcgcgtctacagcccgtaccaagactactacgaggtggtgccccccaatgcacacgaggccacgtatgtccgcagctactacggaccgccctacgcaggccctggcgtgacgcacgtgatagtgcgggaggatccctgctacagcgccggcgcccctctggccatgggcatgcttgcgggagccgccactggggcggcgctgggctcgctcatgtggtcgccctgctggttctgagccctgggactcggagcactgacccctgcgcttggattgctagactcctcttcctcctggaccccatcctctaccatccaagccctgtcccactttggccctatcctctccattagctccttccgggtttggaccattccccccactccctacccttaatccccacatgggaagaagctatcatcacaggtacaaacatcgcttgaagtcttcacatctaccactagacacccccaaaatctgttatagacatttatggatacatttcctctaaacacaacagggcacagcaaatacgacttcatttggcttcgagttccccaggcgctgtagacacaacatgaatcgggctctctgctctctccttagggagctcgagtcctggtggggagaacaggagtaaacaaggacttgacaaagctgaagagttatcagtcctttgacaaggacaggtggggcagggagcaagacaggtaggctggaagaacagttattggcaagtatgcagagccgtgaacgtcatggcatgtccaaggaattaaatgggagttcatttgggctggggtggaggctgggatcagaccgtggtgggccttcaagctaaggagcttcctaggtgaaaggggagatgtgagccttctctggagggaagtttcatgattgcatctataatgaatatattgcctgttttgtgaatactgacacatgtccatacctaaaacactcctgagttaagtcccatccttcccacaaacagcttcctggctggtacccatgataacaattgagctgaacctggggacccctggttggggaacagctgtgactgtcaccctctcaggctttgtctcatccttcattctgaataagatggcagtgttctcctctggggcctgatccacctctacaccagcccaggaagccccatctgtgcctgccctcaggtggtccaccagtctccccctttggttcccttccagtctcttccccctttctatcccaatcaccaatagaaatgctaacatccctgcctggtagccagactagcccactaaagctcccctgtaaatgggggctccattagttctgctgccgagactaataaagatttggttggctctagca

SEQ ID NO: 421737 - DNA, 2038 bp, Homo sapiens
ttgtgctccaattgtgtgtttccatgtaatctccctcactagactggaagctggggatggaaaggggaagcatcaaaaaaacatgcaaaactaggagcttggcttctccttgcaactttactttttctttttttctaggaactgagttcaatgattcttaagaaaaagtatttcatgataaatgagtgaacaaatgtcttaatagaaaagtaaaattgcaggcggggctgcttctgcccagctctacaggggtagactacaagtcccagtacgcctcgggtcagcatctcttcacgtcactccccctccctggggtgggcaggtccggagggcggggcccgggggcagctgggctctcaggcgctgccggaggagagaaatgccccaggctctccggggcacacaaagcgcaggcgcagcgggttgggtggcagcagcatcgagtagcggccgcttaggcagcaacatccgcaacaagtgtagacaaggtcccgcctgactccgctctggaaagtccttttgaagaaatggccctggtgaggggcggctggctgtggagacagagctccatcctccgccgctggaagcggaactggtttgccctgtggctggacgggaccctgggatactaccacgatgagacagcgcaggacgaggaggaccgtgtgctcatccacttcaatgtccgtgacataaagatcggcccagagtgccatgatgtgcagcccccagagggccggagccgagatggcctgctgactgtgaacctacgggaaggcggccgcctgcacctctgtgcggagaccaaggatgatgccctagcatggaagacagcactgctggaggcaaactccaccccggtgcgcgtctacagcccgtaccaagactactacgaggtggtgccccccaatgcacacgaggccacgtatgtccgcagctactacggaccgccctacgcaggccctggcgtgacgcacgtgatagtgcgggaggatccctgctacagcgccggcgcccctctggccatgggcatgcttgcgggagccgccactggggcggcgctgggctcgctcatgtggtcgccctgctggttctgagccctgggactcggagcactgacccctgcgcttggattgctagactcctcttcctcctggaccccatcctctaccatccaagccctgtcccactttggccctatcctctccattagctccttccgggtttggaccattccccccactccctacccttaatccccacatgggaagaagctatcatcacaggtacaaacatcgcttgaagtcttcacatctaccactagacacccccaaaatctgttatagacatttatggatacatttcctctaaacacaacagggcacagcaaatacgacttcatttggcttcgagttccccaggcgctgtagacacaacatgaatcgggctctctgctctctccttagggagctcgagtcctggtggggagaacaggagtaaacaaggacttgacaaagctgaagagttatcagtcctttgacaaggacaggtggggcagggagcaagacaggtaggctggaagaacagttattggcaagtatgcagagccgtgaacgtcatggcatgtccaaggaattaaatgggagttcatttgggctggggtggaggctgggatcagaccgtggtgggccttcaagctaaggagcttcctaggtgaaaggggagatgtgagccttctctggagggaagtttcatgattgcatctataatgaatatattgcctgttttgtgaatactgacacatgtccatacctaaaacactcctgagttaagtcccatccttcccacaaacagcttcctggctggtacccatgataacaattgagctgaacctggggacccctggttggggaacaggtgagttctatttgagacttccagccctagaaagctgcctccgtccagaccatgcatcccgccacaggagttagtcggtctttccctgacgtagttttaccctcaggaatcagctatgagc

SEQ ID NO: 421738 - DNA, 1750 bp, Homo sapiens
ccaaccgtccactgtatagatgaggaaactggaacttctagaggggacgagaagaatgaattagcctaacttagtgctccatccatgtgactggggcaggggaggggtcacttttgtcttcctgagggagacaagagatctctcctttcatgagagacttgggcttgaggctgggttggagaggaaagtctaaaatgtgggggcccaattcacccacccccaaactccctcctcatggtctggtgggatttgctttgcagagcatggaagacagcactgctggaggcaaactccaccccggtgcgcgtctacagcccgtaccaagactactacgaggtggtgccccccaatgcacacgaggccacgtatgtccgcagctactacggaccgccctacgcaggccctggcgtgacgcacgtgatagtgcgggaggatccctgctacagcgccggcgcccctctggccatgggcatgcttgcgggagccgccactggggcggcgctgggctcgctcatgtggtcgccctgctggttctgagccctgggactcggagcactgacccctgcgcttggattgctagactcctcttcctcctggaccccatcctctaccatccaagccctgtcccactttggccctatcctctccattagctccttccgggtttggaccattccccccactccctacccttaatccccacatgggaagaagctatcatcacaggtacaaacatcgcttgaagtcttcacatctaccactagacacccccaaaatctgttatagacatttatggatacatttcctctaaacacaacagggcacagcaaatacgacttcatttggcttcgagttccccaggcgctgtagacacaacatgaatcgggctctctgctctctccttagggagctcgagtcctggtggggagaacaggagtaaacaaggacttgacaaagctgaagagttatcagtcctttgacaaggacaggtggggcagggagcaagacaggtaggctggaagaacagttattggcaagtatgcagagccgtgaacgtcatggcatgtccaaggaattaaatgggagttcatttgggctggggtggaggctgggatcagaccgtggtgggccttcaagctaaggagcttcctaggtgaaaggggagatgtgagccttctctggagggaagtttcatgattgcatctataatgaatatattgcctgttttgtgaatactgacacatgtccatacctaaaacactcctgagttaagtcccatccttcccacaaacagcttcctggctggtacccatgataacaattgagctgaacctggggacccctggttggggaacaggtgagttctatttgagacttccagccctagaaagctgcctccgtccagaaatgcctctcacaccaggagctcggccctctctttgtagctgtgactgtcaccctctcaggctttgtctcatccttcattctgaataagatggcagtgttctcctctggggcctgatccacctctacaccagcccaggaagccccatctgtgcctgccctcaggtggtccaccagtctccccctttggttcccttccagtctcttccccctttctatcccaatcaccaatagaaatgctaacatccctgcctggtagccagactagcccactaaagctcccctgtaaatgggggctccattagttctgctgccgagactaataaagatttggttggctctagca

SEQ ID NO: 421739 - DNA, 2167 bp, Homo sapiens
cgtagggcaatgcattacattttctacatttatatatgattagttagataacaaataccattgtgttacaattgcctacagtattcagggcagtagcctgctgaacaggtttgttggcttggagcaataggatataccatatactctaggtgtgtgccacctaggtttgtttgtaagtacactctatgatattcacataactaaaattgcctaaggacgcatttctcagactgtatccctgttgtttaaaagacgcataactgtattttagttacttctcatccctatccttcctttcccttccttcctccccaacccctgtttatttcctgggcctggggcttggccatgttcccctccttgtgactagtagagctgggtctttcaagtggcattattgtagagctgctagcaaatattagactacctataaggagaaattgggagccatagagaattttttgagctaggtgggaggccagagttggagaatgggtgtcactgggagctggatgtagggcagaagttttagaggaccgtggaccttgtggggagggcagggcctttctccaagagcttgctagtggctggaggcccatttctaaacttggggaggtggctccatggatcccagagaggcctgtgccaggcgtgggggtaggggaccaaatccgggccagggagttcctgggcacctgacatggttggattccccaggtgcgcgtctacagcccgtaccaagactactacgaggtggtgccccccaatgcacacgaggccacgtatgtccgcagctactacggaccgccctacgcaggccctggcgtgacgcacgtgatagtgcgggaggatccctgctacagcgccggcgcccctctggccatgggcatgcttgcgggagccgccactggggcggcgctgggctcgctcatgtggtcgccctgctggttctgagccctgggactcggagcactgacccctgcgcttggattgctagactcctcttcctcctggaccccatcctctaccatccaagccctgtcccactttggccctatcctctccattagctccttccgggtttggaccattccccccactccctacccttaatccccacatgggaagaagctatcatcacaggtacaaacatcgcttgaagtcttcacatctaccactagacacccccaaaatctgttatagacatttatggatacatttcctctaaacacaacagggcacagcaaatacgacttcatttggcttcgagttccccaggcgctgtagacacaacatgaatcgggctctctgctctctccttagggagctcgagtcctggtggggagaacaggagtaaacaaggacttgacaaagctgaagagttatcagtcctttgacaaggacaggtggggcagggagcaagacaggtaggctggaagaacagttattggcaagtatgcagagccgtgaacgtcatggcatgtccaaggaattaaatgggagttcatttgggctggggtggaggctgggatcagaccgtggtgggccttcaagctaaggagcttcctaggtgaaaggggagatgtgagccttctctggagggaagtttcatgattgcatctataatgaatatattgcctgttttgtgaatactgacacatgtccatacctaaaacactcctgagttaagtcccatccttcccacaaacagcttcctggctggtacccatgataacaattgagctgaacctggggacccctggttggggaacaggtgagttctatttgagacttccagccctagaaagctgcctccgtccagaaatgcctctcacaccaggagctcggccctctctttgtagctgtgactgtcaccctctcaggctttgtctcatccttcattctgaataagatggcagtgttctcctctggggcctgatccacctctacaccagcccaggaagccccatctgtgcctgccctcaggtggtccaccagtctccccctttggttcccttccagtctcttccccctttctatcccaatcaccaatagaaatgctaacatccctgcctggtagccagactagcccactaaagctcccctgtaaatgggggctccattagttctgctgccgagactaataaagatttggttggctctagca

SEQ ID NO: 421740 - DNA, 663 bp, Homo sapiens
ctcggattccgaaacccgcccatgggatcagaccgtggtgggccttcaagctaaggagcttcctaggtgaaaggggagatgtgagccttctctggagggaagtttcatgattgcatctataatgaatatattgcctgttttgtgaatactgacacatgtccatacctaaaacactcctgagttaagtcccatccttcccacaaacagcttcctggctggtacccatgataacaattgagctgaacctggggacccctggttggggaacaggtgagttctatttgagacttccagccctagaaagctgcctccgtccagaaatgcctctcacaccaggagctcggccctctctttgtagctgtgactgtcaccctctcaggctttgtctcatccttcattctgaataagatggcagtgttctcctctggggcctgatccacctctacaccagcccaggaagccccatctgtgcctgccctcaggtggtccaccagtctccccctttggttcccttccagtctcttccccctttctatcccaatcaccaatagaaatgctaacatccctgcctggtagccagactagcccactaaagctcccctgtaaatgggggctccattagttctgctgccgagactaataaagatttggttggctctagca

SEQ ID NO: 421741 - DNA, 576 bp, Homo sapiens
tactgaacgccagctgccacctgttattcttataacggaaaaagtgcctgttttgtgaatactgacacatgtccatacctaaaacactcctgagttaagtcccatccttcccacaaacagcttcctggctggtacccatgataacaattgagctgaacctggggacccctggttggggaacaggtgagttctatttgagacttccagccctagaaagctgcctccgtccagaaatgcctctcacaccaggagctcggccctctctttgtagctgtgactgtcaccctctcaggctttgtctcatccttcattctgaataagatggcagtgttctcctctggggcctgatccacctctacaccagcccaggaagccccatctgtgcctgccctcaggtggtccaccagtctccccctttggttcccttccagtctcttccccctttctatcccaatcaccaatagaaatgctaacatccctgcctggtagccagactagcccactaaagctcccctgtaaatgggggctccattagttctgctgccgagactaataaagatttggttggctctagca

SEQ ID NO: 421742 - DNA, 1870 bp, Homo sapiens
ttgtgctccaattgtgtgtttccatgtaatctccctcactagactggaagctggggatggaaaggggaagcatcaaaaaaacatgcaaaactaggagcttggcttctccttgcaactttactttttctttttttctaggaactgagttcaatgattcttaagaaaaagtatttcatgataaatgagtgaacaaatgtcttaatagaaaagtaaaattgcaggcggggctgcttctgcccagctctacaggggtagactacaagtcccagtacgcctcgggtcagcatctcttcacgtcactccccctccctggggtgggcaggtccggagggcggggcccgggggcagctgggctctcaggcgctgccggaggagagaaatgccccaggctctccggggcacacaaagcgcaggcgcagcgggttgggtggcagcagcatcgagtagcggccgcttaggcagcaacatccgcaacaagtgtagacaaggtcccgcctgactccgctctggaaagtccttttgaagaaatggccctggtgaggggcggctggctgtggagacagagctccatcctccgccgctggaagcggaactggtttgccctgtggctggacgggaccctgggatactaccacgatgagacagcgcaggacgaggaggaccgtgtgctcatccacttcaatgtccgtgacataaagatcggcccagagtgccatgatgtgcagcccccagagggccggagccgagatggcctgctgactgtgaacctacgggaaggcggccgcctgcacctctgtgcggagaccaaggatgatgccctagcatggaagacagcactgctggaggcaaactccaccccggtgagtctcccgttctctccccctttccccaccacctccatgtgccatggaatcatgagtgactcagactcggtctccacctgccagaagttctcagtcttatgtggataggtttctgcaaactctgatgcctgagtcccaagtgttcggggaaaggataagggagagccaactggtgctcagaggagagagagaagcctccatggagatttgctggagggagtggcacatgagctggggagaaggaactgtcttttatcgagcaactattatgtgccaggtgtggtgcaggtatcattccagctgcttctcacaacagtcctgtgaagttggggttattgttctctctctgcagatgataagactgaagctcattcatccgcacaacaaatatttactgagctgctactatgggccaggtggtgtgccaagtgccagggatcagaggtgaaccaaggagatatgggctctgcccacctggactcagcctaatgagaagccggagacactgagaacaactaattaattattccatttcaatagtaataacagctctgacagagatttgcagtgtctggccctttcatccaggtggtagttcaggcaaggcttaaaccgaggactgaaggataaacagaaattgactgggtgaaaggtgtggggatcgggtaaagggcacggcattccaggcagagggatcagcatgtgccaaggctctgagagaggttaagacatttggcaagttgaggaacagaaggacagctggggtggctggtgcttagggagtgagtgggtaaggagggaaggagggttggcacgaccaggtcttgtgggctgtatgaaggatgttggtttctgctaagagcaccagggagccatgacaagtttttgaacagagggatggcatgatcagatcaggttcaatttatatttttaaaaagataattgttgtaacgttggggcatgtaaaaaaaagggggtagtctgtcagtttatgaaattttgttgta

SEQ ID NO: 421743 - DNA, 855 bp, Homo sapiens
ttgtgctccaattgtgtgtttccatgtaatctccctcactagactggaagctggggatggaaaggggaagcatcaaaaaaacatgcaaaactaggagcttggcttctccttgcaactttactttttctttttttctaggaactgagttcaatgattcttaagaaaaagtatttcatgataaatgagtgaacaaatgtcttaatagaaaagtaaaattgcaggcggggctgcttctgcccagctctacaggggtagactacaagtcccagtacgcctcgggtcagcatctcttcacgtcactccccctccctggggtgggcaggtccggagggcggggcccgggggcagctgggctctcaggcgctgccggaggagagaaatgccccaggctctccggggcacacaaagcgcaggcgcagcgggttgggtggcagcagcatcgagtagcggccgcttaggcagcaacatccgcaacaagtgtagacaaggtcccgcctgactccgctctggaaagtccttttgaagaaatggccctggtgaggggcggctggctgtggagacagagctccatcctccgccgctggaagcggaactggtttgccctgtggctggacgggaccctgggataccacctctacaccagcccaggaagccccatctgtgcctgccctcaggtggtccaccagtctccccctttggttcccttccagtctcttccccctttctatcccaatcaccaatagaaatgctaacatccctgcctggtagccagactagcccactaaagctcccctgtaaatgggggctccattagttctgctgccgagactaataaagatttggttggctctagca

SEQ ID NO: 421744 - DNA, 2372 bp, Homo sapiens
aagagaggaaggcttaaagagccagactgcgcagccaggactggggtatgggcgctgtcctgcaggccaaagaatgaagatgtagccccgcccccaacctaggaggaggaccagcccggttcctgtcctgcccccgcaacctcgccccgattccactccgggaacctcggcgatgctgagccaagaccacttctgaatcagggatgacttgtctagtgaacgtagggtcagagccatcagttggaaaggctgggaggagcctggagaaagaggcgaccttccttgggatctgtgcgctccctccttgcctccccctccagcctcccacttggtagcaccttcctgatccccttatctctaaggcgctcagggaaatgccccgctgcgggagccttctgggaaatgctgccctggccacccaggaaccatgagccctgcagccccggtcccgcctgactccgctctggaaagtccttttgaagaaatggccctggtgaggggcggctggctgtggagacagagctccatcctccgccgctggaagcggaactggtttgccctgtggctggacgggaccctgggatactaccacgatgagacagcgcaggacgaggaggaccgtgtgctcatccacttcaatgtccgtgacataaagatcggcccagagtgccatgatgtgcagcccccagagggccggagccgagatggcctgctgactgtgaacctacgggaaggcggccgcctgcacctctgtgcggagaccaaggatgatgccctagcatggaagacagcactgctggaggcaaactccaccccggccccagctggagccaccgtccctcccaggagccgccgggtttgctccaaggtcaggtgtgtgacccgctcgtggagcccctgtaaggttgagaggcggatctgggtgcgcgtctacagcccgtaccaagactactacgaggtggtgccccccaatgcacacgaggccacgtatgtccgcagctactacggaccgccctacgcaggccctggcgtgacgcacgtgatagtgcgggaggatccctgctacagcgccggcgcccctctggccatgggcatgcttgcgggagccgccactggggcggcgctgggctcgctcatgtggtcgccctgctggttctgagccctgggactcggagcactgacccctgcgcttggattgctagactcctcttcctcctggaccccatcctctaccatccaagccctgtcccactttggccctatcctctccattagctccttccgggtttggaccattccccccactccctacccttaatccccacatgggaagaagctatcatcacaggtacaaacatcgcttgaagtcttcacatctaccactagacacccccaaaatctgttatagacatttatggatacatttcctctaaacacaacagggcacagcaaatacgacttcatttggcttcgagttccccaggcgctgtagacacaacatgaatcgggctctctgctctctccttagggagctcgagtcctggtggggagaacaggagtaaacaaggacttgacaaagctgaagagttatcagtcctttgacaaggacaggtggggcagggagcaagacaggtaggctggaagaacagttattggcaagtatgcagagccgtgaacgtcatggcatgtccaaggaattaaatgggagttcatttgggctggggtggaggctgggatcagaccgtggtgggccttcaagctaaggagcttcctaggtgaaaggggagatgtgagccttctctggagggaagtttcatgattgcatctataatgaatatattgcctgttttgtgaatactgacacatgtccatacctaaaacactcctgagttaagtcccatccttcccacaaacagcttcctggctggtacccatgataacaattgagctgaacctggggacccctggttggggaacaggtgagttctatttgagacttccagccctagaaagctgcctccgtccagaaatgcctctcacaccaggagctcggccctctctttgtagctgtgactgtcaccctctcaggctttgtctcatccttcattctgaataagatggcagtgttctcctctggggcctgatccacctctacaccagcccaggaagccccatctgtgcctgccctcaggtggtccaccagtctccccctttggttcccttccagtctcttccccctttctatcccaatcaccaatagaaatgctaacatccctgcctggtagccagactagcccactaaagctcccctgtaaatgggggctccattagttctgctgccgagactaataaagatttggttggctctagca

SEQ ID NO: 421745 - DNA, 2836 bp, Homo sapiens
ttgtgctccaattgtgtgtttccatgtaatctccctcactagactggaagctggggatggaaaggggaagcatcaaaaaaacatgcaaaactaggagcttggcttctccttgcaactttactttttctttttttctaggaactgagttcaatgattcttaagaaaaagtatttcatgataaatgagtgaacaaatgtcttaatagaaaagtaaaattgcaggcggggctgcttctgcccagctctacaggggtagactacaagtcccagtacgcctcgggtcagcatctcttcacgtcactccccctccctggggtgggcaggtccggagggcggggcccgggggcagctgggctctcaggcgctgccggaggagagaaatgccccaggctctccggggcacacaaagcgcaggcgcagcgggttgggtggcagcagcatcgagtagcggccgcttaggcagcaacatccgcaacaagtgtagacaaggtcccgcctgactccgctctggaaagtccttttgaagaaatggccctggtgaggggcggctggctgtggagacagagctccatcctccgccgctggaagcggaactggtttgccctgtggctggacgggaccctgggatactaccacgatgagacagcgcaggacgaggaggaccgtgtgctcatccacttcaatgtccgtgacataaagatcggcccagagtgccatgatgtgcagcccccagagggccggagccgagatggcctgctgactgtgaacctacgggaaggcggccgcctgcacctctgtgcggagaccaaggatgatgccctagcatggaagacagcactgctggaggcaaactccaccccggtgcgcgtctacagcccgtaccaagactactacgaggtggtgccccccaatgcacacgaggccacgtatgtccgcagctactacggaccgccctacgcaggccctggcgtgacgcacgtgatagtgcgggaggatccctgctacagcgccggcgcccctctggccatgggcatgcttgcgggagccgccactggggcggcgctgggctcgctcatgtggtcgccctgctggttctgagccctgggactcggagcactgacccctgcgcttggattgctagactcctcttcctcctggaccccatcctctaccatccaagccctgtcccactttggccctatcctctccattagctccttccgggtttggaccattccccccactccctacccttaatccccacatgggaagaagctatcatcacaggtacaaacatcgcttgaagtcttcacatctaccactagacacccccaaaatctgttatagacatttatggatacatttcctctaaacacaacagggcacagcaaatacgacttcatttggcttcgagttccccaggcgctgtagacacaacatgaatcgggctctctgctctctccttagggagctcgagtcctggtggggagaacaggagtaaacaaggacttgacaaagctgaagagttatcagtcctttgacaaggacaggtggggcagggagcaagacaggtaggctggaagaacagttattggcaagtatgcagagccgtgaacgtcatggcatgtccaaggaattaaatgggagttcatttgggctggggtggaggctgggatcagaccgtggtgggccttcaagctaaggagcttcctaggtgaaaggggagatgtgagccttctctggagggaagtttcatgattgcatctataatgaatatattgcctgttttgtgaatactgacacatgtccatacctaaaacactcctgagttaagtcccatccttcccacaaacagcttcctggctggtacccatgataacaattgagctgaacctggggacccctggttggggaacaggtgagttctatttgagacttccagccctagaaagctgcctccgtccagaaatgcctctcacaccaggagctcggccctctctttgtagctgtgactgtcaccctctcaggctttgtctcatccttcattctgaataagatggcagtgttctcctctggggcctgatccacctctacaccagcccaggaagccccatctgtgcctgccctcaggtggtccaccagtctccccctttggttcccttccagtctcttccccctttctatcccaatcaccaatagaaatgctaacatccctgcctggtagccagactagcccactaaagctcccctgtaaatgggggctccattagttctgctgccgagactaataaagatttggttggctctagcaaaaaaaaaaaaaaaaaaaaaaaaaaaaaaaaaaaaaaaaaaaaaaaaaaaaaaaaaaaaaaaaaaaaaaaaaaaaaaaaaaaaaaaaaaaagagggggggccggcgcaatacccccgagcgcgggagggccaccgacagtaaatacgaccacccgcgattatttttttatcaaaaaagaggagcccatcccaatagagaagagcgcgcacttataaattaaaagttgcccggcgagcgagctgccgcccgctataaataatcgacgtctgtgcgggtgaagaaacacacacctgcaccttggtgatataattatcttgtgaaagaaggacccccaccaatctagccggggaggggagagcataaatactgggaccaccccccccccaccccagtgactattataccgtctcggtggcggaacaataacacaacttgatcactatattgaggcaacaacaccccgtacttagtctatcttgccccgaacaaaatctgccccacgcaatattttctacacattttacg

SEQ ID NO: 421746 - DNA, 2256 bp, Homo sapiens
ttgtgctccaattgtgtgtttccatgtaatctccctcactagactggaagctggggatggaaaggggaagcatcaaaaaaacatgcaaaactaggagcttggcttctccttgcaactttactttttctttttttctaggaactgagttcaatgattcttaagaaaaagtatttcatgataaatgagtgaacaaatgtcttaatagaaaagtaaaattgcaggcggggctgcttctgcccagctctacaggggtagactacaagtcccagtacgcctcgggtcagcatctcttcacgtcactccccctccctggggtgggcaggtccggagggcggggcccgggggcagctgggctctcaggcgctgccggaggagagaaatgccccaggctctccggggcacacaaagcgcaggcgcagcgggttgggtggcagcagcatcgagtagcggccgcttaggcagcaacatccgcaacaagtgtagacaaggtcccgcctgactccgctctggaaagtccttttgaagaaatggccctggtgaggggcggctggctgtggagacagagctccatcctccgccgctggaagcggaactggtttgccctgtggctggacgggaccctgggatactaccacgatgagacagcgcaggacgaggaggaccgtgtgctcatccacttcaatgtccgtgacataaagatcggcccagagtgccatgatgtgcagcccccagagggccggagccgagatggcctgctgactgtgaacctacgggaaggcggccgcctgcacctctgtgcggagaccaaggatgatgccctagcatggaagacagcactgctggaggcaaactccaccccggtgcgcgtctacagcccgtaccaagactactacgaggtggtgccccccaatgcacacgaggccacgtatgtccgcagctactacggaccgccctacgcaggccctggcgtgacgcacgtgatagtgcgggaggatccctgctacagcgccggcgcccctctggccatgggcatgcttgcgggagccgccactggggcggcgctgggctcgctcatgtggtcgccctgctggttctgagccctgggactcggagcactgacccctgcgcttggattgctagactcctcttcctcctggaccccatcctctaccatccaagccctgtcccactttggccctatcctctccattagctccttccgggtttggaccattccccccactccctacccttaatccccacatgggaagaagctatcatcacaggtacaaacatcgcttgaagtcttcacatctaccactagacacccccaaaatctgttatagacatttatggatacatttcctctaaacacaacagggcacagcaaatacgacttcatttggcttcgagttccccaggcgctgtagacacaacatgaatcgggctctctgctctctccttagggagctcgagtcctggtggggagaacaggagtaaacaaggacttgacaaagctgaagagttatcagtcctttgacaaggacaggtggggcagggagcaagacaggtaggctggaagaacagttattggcaagtatgcagagccgtgaacgtcatggcatgtccaaggaattaaatgggagttcatttgggctggggtggaggctgggatcagaccgtggtgggccttcaagctaaggagcttcctaggtgaaaggggagatgtgagccttctctggagggaagtttcatgattgcatctataatgaatatattgcctgttttgtgaatactgacacatgtccatacctaccatgataacaattgagctgaacctggggacccctggttggggaacaggtgagttctatttgagacttccagccctagaaagctgcctccgtccagaaatgcctctcacaccaggagctcggccctctctttgtagctgtgactgtcaccctctcaggctttgtctcatccttcattctgaataagatggcagtgttctcctctggggcctgatccacctctacaccagcccaggaagccccatctgtgcctgccctcaggtggtccaccagtctccccctttggttcccttccagtctcttccccctttctatcccaatcaccaatagaaatgctaacatccctgcctggtagccagactagcccactaaagctcccctgtaaatgggggctccattagttctgctgccgagactaataaagatttggttggctctagca

SEQ ID NO: 421747 - DNA, 2002 bp, Homo sapiens
ctacaaggtcgtggagtgaggaggactggaagctgcagctggaggctgaaaactacgagggccacaccccactccacgtggccgttatccacaaagatgtggagatggtccggctgctccgagatgctggagctgaccttgacaaaccggagcccacgtgcggggccttgtacgcgtacagtcccgcctgactccgctctggaaagtccttttgaagaaatggccctggtgaggggcggctggctgtggagacagagctccatcctccgccgctggaagcggaactggtttgccctgtggctggacgggaccctgggatactaccacgatgagacagcgcaggacgaggaggaccgtgtgctcatccacttcaatgtccgtgacataaagatcggcccagagtgccatgatgtgcagcccccagagggccggagccgagatggcctgctgactgtgaacctacgggaaggcggccgcctgcacctctgtgcggagaccaaggatgatgccctagcatggaagacagcactgctggaggcaaactccaccccggtgcgcgtctacagcccgtaccaagactactacgaggtggtgccccccaatgcacacgaggccacgtatgtccgcagctactacggaccgccctacgcaggccctggcgtgacgcacgtgatagtgcgggaggatccctgctacagcgccggcgcccctctggccatgggcatgcttgcgggagccgccactggggcggcgctgggctcgctcatgtggtcgccctgctggttctgagccctgggactcggagcactgacccctgcgcttggattgctagactcctcttcctcctggaccccatcctctaccatccaagccctgtcccactttggccctatcctctccattagctccttccgggtttggaccattccccccactccctacccttaatccccacatgggaagaagctatcatcacaggtacaaacatcgcttgaagtcttcacatctaccactagacacccccaaaatctgttatagacatttatggatacatttcctctaaacacaacagggcacagcaaatacgacttcatttggcttcgagttccccaggcgctgtagacacaacatgaatcgggctctctgctctctccttagggagctcgagtcctggtggggagaacaggagtaaacaaggacttgacaaagctgaagagttatcagtcctttgacaaggacaggtggggcagggagcaagacaggtaggctggaagaacagttattggcaagtatgcagagccgtgaacgtcatggcatgtccaaggaattaaatgggagttcatttgggctggggtggaggctgggatcagaccgtggtgggccttcaagctaaggagcttcctaggtgaaaggggagatgtgagccttctctggagggaagtttcatgattgcatctataatgaatatattgcctgttttgtgaatactgacacatgtccatacctaaaacactcctgagttaagtcccatccttcccacaaacagcttcctggctggtacccatgataacaattgagctgaacctggggacccctggttggggaacaggtgagttctatttgagacttccagccctagaaagctgcctccgtccagaaatgcctctcacaccaggagctcggccctctctttgtagctgtgactgtcaccctctcaggctttgtctcatccttcattctgaataagatggcagtgttctcctctggggcctgatccacctctacaccagcccaggaagccccatctgtgcctgccctcaggtggtccaccagtctccccctttggttcccttccagtctcttccccctttctatcccaatcaccaatagaaatgctaacatccctgcctggtagccagactagcccactaaagctcccctgtaaatgggggctccattagttctgctgccgagactaataaagatttggttggctctagca

SEQ ID NO: 421748 - DNA, 1892 bp, Homo sapiens
acggcagggctgggggcttctctccagggagctgctgctgaggcctgtgtctcccgtggctcctctgacagtcccgcctgactccgctctggaaagtccttttgaagaaatggccctggtgaggggcggctggctgtggagacagagctccatcctccgccgctggaagcggaactggtttgccctgtggctggacgggaccctgggatactaccacgatgagacagcgcaggacgaggaggaccgtgtgctcatccacttcaatgtccgtgacataaagatcggcccagagtgccatgatgtgcagcccccagagggccggagccgagatggcctgctgactgtgaacctacgggaaggcggccgcctgcacctctgtgcggagaccaaggatgatgccctagcatggaagacagcactgctggaggcaaactccaccccggtgcgcgtctacagcccgtaccaagactactacgaggtggtgccccccaatgcacacgaggccacgtatgtccgcagctactacggaccgccctacgcaggccctggcgtgacgcacgtgatagtgcgggaggatccctgctacagcgccggcgcccctctggccatgggcatgcttgcgggagccgccactggggcggcgctgggctcgctcatgtggtcgccctgctggttctgagccctgggactcggagcactgacccctgcgcttggattgctagactcctcttcctcctggaccccatcctctaccatccaagccctgtcccactttggccctatcctctccattagctccttccgggtttggaccattccccccactccctacccttaatccccacatgggaagaagctatcatcacaggtacaaacatcgcttgaagtcttcacatctaccactagacacccccaaaatctgttatagacatttatggatacatttcctctaaacacaacagggcacagcaaatacgacttcatttggcttcgagttccccaggcgctgtagacacaacatgaatcgggctctctgctctctccttagggagctcgagtcctggtggggagaacaggagtaaacaaggacttgacaaagctgaagagttatcagtcctttgacaaggacaggtggggcagggagcaagacaggtaggctggaagaacagttattggcaagtatgcagagccgtgaacgtcatggcatgtccaaggaattaaatgggagttcatttgggctggggtggaggctgggatcagaccgtggtgggccttcaagctaaggagcttcctaggtgaaaggggagatgtgagccttctctggagggaagtttcatgattgcatctataatgaatatattgcctgttttgtgaatactgacacatgtccatacctaaaacactcctgagttaagtcccatccttcccacaaacagcttcctggctggtacccatgataacaattgagctgaacctggggacccctggttggggaacaggtgagttctatttgagacttccagccctagaaagctgcctccgtccagaaatgcctctcacaccaggagctcggccctctctttgtagctgtgactgtcaccctctcaggctttgtctcatccttcattctgaataagatggcagtgttctcctctggggcctgatccacctctacaccagcccaggaagccccatctgtgcctgccctcaggtggtccaccagtctccccctttggttcccttccagtctcttccccctttctatcccaatcaccaatagaaatgctaacatccctgcctggtagccagactagcccactaaagctcccctgtaaatgggggctccattagttctgctgccgagactaataaagatttggttggctctagca

SEQ ID NO: 421749 - DNA, 1997 bp, Homo sapiens
aagactactacgaggtggtgccccccaatgcacacgaggccacgtatgtccgcagctactacggaccgccctacgcaggccctggcgtgacgcacgtgatagtgcgggaggatccctgctacagcgccggcgcccctctggccataggcagcaacatccgcaacaagtgtagacagtcccgcctgactccgctctggaaagtccttttgaagaaatggccctggtgaggggcggctggctgtggagacagagctccatcctccgccgctggaagcggaactggtttgccctgtggctggacgggaccctgggatactaccacgatgagacagcgcaggacgaggaggaccgtgtgctcatccacttcaatgtccgtgacataaagatcggcccagagtgccatgatgtgcagcccccagagggccggagccgagatggcctgctgactgtgaacctacgggaaggcggccgcctgcacctctgtgcggagaccaaggatgatgccctagcatggaagacagcactgctggaggcaaactccaccccggtgcgcgtctacagcccgtaccaagactactacgaggtggtgccccccaatgcacacgaggccacgtatgtccgcagctactacggaccgccctacgcaggccctggcgtgacgcacgtgatagtgcgggaggatccctgctacagcgccggcgcccctctggccatgggcatgcttgcgggagccgccactggggcggcgctgggctcgctcatgtggtcgccctgctggttctgagccctgggactcggagcactgacccctgcgcttggattgctagactcctcttcctcctggaccccatcctctaccatccaagccctgtcccactttggccctatcctctccattagctccttccgggtttggaccattccccccactccctacccttaatccccacatgggaagaagctatcatcacaggtacaaacatcgcttgaagtcttcacatctaccactagacacccccaaaatctgttatagacatttatggatacatttcctctaaacacaacagggcacagcaaatacgacttcatttggcttcgagttccccaggcgctgtagacacaacatgaatcgggctctctgctctctccttagggagctcgagtcctggtggggagaacaggagtaaacaaggacttgacaaagctgaagagttatcagtcctttgacaaggacaggtggggcagggagcaagacaggtaggctggaagaacagttattggcaagtatgcagagccgtgaacgtcatggcatgtccaaggaattaaatgggagttcatttgggctggggtggaggctgggatcagaccgtggtgggccttcaagctaaggagcttcctaggtgaaaggggagatgtgagccttctctggagggaagtttcatgattgcatctataatgaatatattgcctgttttgtgaatactgacacatgtccatacctaaaacactcctgagttaagtcccatccttcccacaaacagcttcctggctggtacccatgataacaattgagctgaacctggggacccctggttggggaacaggtgagttctatttgagacttccagccctagaaagctgcctccgtccagaaatgcctctcacaccaggagctcggccctctctttgtagctgtgactgtcaccctctcaggctttgtctcatccttcattctgaataagatggcagtgttctcctctggggcctgatccacctctacaccagcccaggaagccccatctgtgcctgccctcaggtggtccaccagtctccccctttggttcccttccagtctcttccccctttctatcccaatcaccaatagaaatgctaacatccctgcctggtagccagactagcccactaaagctcccctgtaaatgggggctccattagttctgctgccgagactaataaagatttggttggctctagca

SEQ ID NO: 421750 - DNA, 2331 bp, Homo sapiens
ttgtgctccaattgtgtgtttccatgtaatctccctcactagactggaagctggggatggaaaggggaagcatcaaaaaaacatgcaaaactaggagcttggcttctccttgcaactttactttttctttttttctaggaactgagttcaatgattcttaagaaaaagtatttcatgataaatgagtgaacaaatgtcttaatagaaaagtaaaattgcaggcggggctgcttctgcccagctctacaggggtagactacaagtcccagtacgcctcgggtcagcatctcttcacgtcactccccctccctggggtgggcaggtccggagggcggggcccgggggcagctgggctctcaggcgctgccggaggagagaaatgccccaggctctccggggcacacaaagcgcaggcgcagcgggttgggtggcagcagcatcgagtagcggccgcttaggcagcaacatccgcaacaagtgtagacaaggtcccgcctgactccgctctggaaagtccttttgaagaaatggccctggtgaggggcggctggctgtggagacagatgcatctggaatatcgtacaggctccatcctccgccgctggaagcggaactggtttgccctgtggctggacgggaccctgggatactaccacgatgagacagcgcaggacgaggaggaccgtgtgctcatccacttcaatgtccgtgacataaagatcggcccagagtgccatgatgtgcagcccccagagggccggagccgagatggcctgctgactgtgaacctacgggaaggcggccgcctgcacctctgtgcggagaccaaggatgatgccctagcatggaagacagcactgctggaggcaaactccaccccggtgcgcgtctacagcccgtaccaagactactacgaggtggtgccccccaatgcacacgaggccacgtatgtccgcagctactacggaccgccctacgcaggccctggcgtgacgcacgtgatagtgcgggaggatccctgctacagcgccggcgcccctctggccatgggcatgcttgcgggagccgccactggggcggcgctgggctcgctcatgtggtcgccctgctggttctgagccctgggactcggagcactgacccctgcgcttggattgctagactcctcttcctcctggaccccatcctctaccatccaagccctgtcccactttggccctatcctctccattagctccttccgggtttggaccattccccccactccctacccttaatccccacatgggaagaagctatcatcacaggtacaaacatcgcttgaagtcttcacatctaccactagacacccccaaaatctgttatagacatttatggatacatttcctctaaacacaacagggcacagcaaatacgacttcatttggcttcgagttccccaggcgctgtagacacaacatgaatcgggctctctgctctctccttagggagctcgagtcctggtggggagaacaggagtaaacaaggacttgacaaagctgaagagttatcagtcctttgacaaggacaggtggggcagggagcaagacaggtaggctggaagaacagttattggcaagtatgcagagccgtgaacgtcatggcatgtccaaggaattaaatgggagttcatttgggctggggtggaggctgggatcagaccgtggtgggccttcaagctaaggagcttcctaggtgaaaggggagatgtgagccttctctggagggaagtttcatgattgcatctataatgaatatattgcctgttttgtgaatactgacacatgtccatacctaaaacactcctgagttaagtcccatccttcccacaaacagcttcctggctggtacccatgataacaattgagctgaacctggggacccctggttggggaacaggtgagttctatttgagacttccagccctagaaagctgcctccgtccagaaatgcctctcacaccaggagctcggccctctctttgtagctgtgactgtcaccctctcaggctttgtctcatccttcattctgaataagatggcagtgttctcctctggggcctgatccacctctacaccagcccaggaagccccatctgtgcctgccctcaggtggtccaccagtctccccctttggttcccttccagtctcttccccctttctatcccaatcaccaatagaaatgctaacatccctgcctggtagccagactagcccactaaagctcccctgtaaatgggggctccattagttctgctgccgagactaataaagatttggttggctctagca

SEQ ID NO: 421751 - DNA, 1685 bp, Homo sapiens
tgaaattaggaggcccagagaagcgaagtggcccagagtcacagcaaatctccacattcctccaccaaggcccaggccacagttctaacaggatgtgcagcccccagagggccggagccgagatggcctgctgactgtgaacctacgggaaggcggccgcctgcacctctgtgcggagaccaaggatgatgccctagcatggaagacagcactgctggaggcaaactccaccccggtgcgcgtctacagcccgtaccaagactactacgaggtggtgccccccaatgcacacgaggccacgtatgtccgcagctactacggaccgccctacgcaggccctggcgtgacgcacgtgatagtgcgggaggatccctgctacagcgccggcgcccctctggccatgggcatgcttgcgggagccgccactggggcggcgctgggctcgctcatgtggtcgccctgctggttctgagccctgggactcggagcactgacccctgcgcttggattgctagactcctcttcctcctggaccccatcctctaccatccaagccctgtcccactttggccctatcctctccattagctccttccgggtttggaccattccccccactccctacccttaatccccacatgggaagaagctatcatcacaggtacaaacatcgcttgaagtcttcacatctaccactagacacccccaaaatctgttatagacatttatggatacatttcctctaaacacaacagggcacagcaaatacgacttcatttggcttcgagttccccaggcgctgtagacacaacatgaatcgggctctctgctctctccttagggagctcgagtcctggtggggagaacaggagtaaacaaggacttgacaaagctgaagagttatcagtcctttgacaaggacaggtggggcagggagcaagacaggtaggctggaagaacagttattggcaagtatgcagagccgtgaacgtcatggcatgtccaaggaattaaatgggagttcatttgggctggggtggaggctgggatcagaccgtggtgggccttcaagctaaggagcttcctaggtgaaaggggagatgtgagccttctctggagggaagtttcatgattgcatctataatgaatatattgcctgttttgtgaatactgacacatgtccatacctaaaacactcctgagttaagtcccatccttcccacaaacagcttcctggctggtacccatgataacaattgagctgaacctggggacccctggttggggaacaggtgagttctatttgagacttccagccctagaaagctgcctccgtccagaaatgcctctcacaccaggagctcggccctctctttgtagctgtgactgtcaccctctcaggctttgtctcatccttcattctgaataagatggcagtgttctcctctggggcctgatccacctctacaccagcccaggaagccccatctgtgcctgccctcaggtggtccaccagtctccccctttggttcccttccagtctcttccccctttctatcccaatcaccaatagaaatgctaacatccctgcctggtagccagactagcccactaaagctcccctgtaaatgggggctccattagttctgctgccgagactaataaagatttggttggctctagca

SEQ ID NO: 421752 - DNA, 1315 bp, Homo sapiens
ttgtgctccaattgtgtgtttccatgtaatctccctcactagactggaagctggggatggaaaggggaagcatcaaaaaaacatgcaaaactaggagcttggcttctccttgcaactttactttttctttttttctaggaactgagttcaatgattcttaagaaaaagtatttcatgataaatgagtgaacaaatgtcttaatagaaaagtaaaattgcaggcggggctgcttctgcccagctctacaggggtagactacaagtcccagtacgcctcgggtcagcatctcttcacgtcactccccctccctggggtgggcaggtccggagggcggggcccgggggcagctgggctctcaggcgctgccggaggagagaaatgccccaggctctccggggcacacaaagcgcaggcgcagcgggttgggtggcagcagcatcgagtagcggccgcttaggcagcaacatccgcaacaagtgtagacaaggtcccgcctgactccgctctggaaagtccttttgaagaaatggccctggtgaggggcggctggctgtggagacagagctccatcctccgccgctggaagcggaactggtttgccctgtggctggacgggaccctgggatactaccacgatgagacagcgcaggacgaggaggaccgtgtgctcatccacttcaatgtccgtgacataaagatcggcccagagtgccatgatgtgcagcccccagagggccggagccgagatggcctgctgactgtgaacctacgggaaggcggccgcctgcacctctgtgcggagaccaaggatgatgccctagcatggaagacagcactgctggaggcaaactccaccccggtgcgcgtctacagcccgtaccaagactactacgaggtggtgccccccaatgcacacgaggccacgtatgtccgcagctactacggaccgccctacgcaggccctggcgtgacgcacgtgatagtgcgggaggatccctgctacagcgccggcgcccctctggccatgggcatgcttgcgggagccgccactggggcggcgctgggctcgctcatgtggtcgccctgctggttctgagccctgggactcggagcactgacccctgcgcttggattgctagactcctcttccccctttggttcccttccagtctcttccccctttctatcccaatcaccaatagaaatgctaacatccctgcctggtagccagactagcccactaaagctcccctgtaaatgggggctccattagttctgctgccgagactaataaagatttggttggctctagca

SEQ ID NO: 421753 - DNA, 1515 bp, Homo sapiens
ttgtgctccaattgtgtgtttccatgtaatctccctcactagactggaagctggggatggaaaggggaagcatcaaaaaaacatgcaaaactaggagcttggcttctccttgcaactttactttttctttttttctaggaactgagttcaatgattcttaagaaaaagtatttcatgataaatgagtgaacaaatgtcttaatagaaaagtaaaattgcaggcggggctgcttctgcccagctctacaggggtagactacaagtcccagtacgcctcgggtcagcatctcttcacgtcactccccctccctggggtgggcaggtccggagggcggggcccgggggcagctgggctctcaggcgctgccggaggagagaaatgccccaggctctccggggcacacaaagcgcaggcgcagcgggttgggtggcagcagcatcgagtagcggccgcttaggcagcaacatccgcaacaagtgtagacaaggtcccgcctgactccgctctggaaagtccttttgaagaaatggccctggtgaggggcggctggctgtggagacagagctccatcctccgccgctggaagcggaactggtttgccctgtggctggacgggaccctgggatactaccacgatgagacagcgcaggacgaggaggaccgtgtgctcatccacttcaatgtccgtgacataaagatcggcccagagtgccatgatgtgcagcccccagagggccggagccgagatggcctgctgactgtgaacctacgggaaggcggccgcctgcacctctgtgcggagaccaaggatgatgccctagcatggaagacagcactgctggaggcaaactccaccccgatgataagactgaagctcattcatccgcacaacaaatatttactgagctgctactatgggccaggtggtgtgccaagtgccagggatcagaggtgaaccaaggagatatgggctctgcccacctggactcagcctaatgagaagccggagacactgagaacaactaattaattattccatttcaatagtaataacagctctgacagagatttgcagtgtctggccctttcatccaggtggtagttcaggcaaggcttaaaccgaggactgaaggataaacagaaattgactgggtgaaaggtgtggggatcgggtaaagggcacggcattccaggcagagggatcagcatgtgccaaggctctgagagaggttaagacatttggcaagttgaggaacagaaggacagctggggtggctggtgcttagggagtgagtgggtaaggagggaaggagggttggcacgaccaggtcttgtgggctgtatgaaggatgttggtttctgctaagagcaccagggagccatgacaagtttttgaacagagggatggcatgatcagatcaggttcaatttatatttttaaaaagataattgttgtaacgttggggcatgtaaaaaaaagggggtagtctgtcagtttatgaaattttgttgta

SEQ ID NO: 421754 - DNA, 710 bp, Homo sapiens
ttgtgctccaattgtgtgtttccatgtaatctccctcactagactggaagctggggatggaaaggggaagcatcaaaaaaacatgcaaaactaggagcttggcttctccttgcaactttactttttctttttttctaggaactgagttcaatgattcttaagaaaaagtatttcatgataaatgagtgaacaaatgtcttaatagaaaagtaaaattgcaggcggggctgcttctgcccagctctacaggggtagactacaagtcccagtacgcctcgggtcagcatctcttcacgtcactccccctccctggggtgggcaggtccggagggcggggcccgggggcagctgggctctcaggcgctgccggaggagagaaatgccccaggctctccggggcacacaaagcgcaggcgcagcgggttgggtggcagcagcatcgagtagcggccgcttaggcagcaacatccgcaacaagtgtagacaaggtcccgcctgactccgctctggaaagtccttttgaagaaatggccctggtgaggggcggctggctgtggagacagagctccatcctccgccgctggaagcggaactggtttgccctgtggctggacgggaccctgggatactaccacgatgagacagccgcccctcaccagggccatttcttcaaaaggactttccagagcggagtcagggtaccgagctcg

SEQ ID NO: 421755 - DNA, 769 bp, Homo sapiens
aaaaaaaaaaaaaaaaaaaaaatccctgtttattgggaaggatatgttcgattcttaaatacgccatctgacaaatcagaagatggaaggctaatttatactggcaatatggcccgagcagtgtttggtgtgaaatgtttctcttattctacgagtctgattggccttacatttctgccatacatttttacacaaaataatgctatttctgaaagtgtgcctctgcctattcaaatcatattctatggcatcatgggaagctttacggtgatcaccccagtgctgcttcactttattacaaaaggctatgtcattcgattgtaccatgaggccacaacagacacttataaagccattacctacaatgctatgcttgcagaaacgagtacagtgtttcaccagaatgatgtgaagattccagatgctaaacatgtatttaccacattttatgctaaaacaaaatcactgttagttaatccagtgctctttccaaaccgtgaagactatatccatctaatgggttatgacaaagaagaatttattttgtatatggaagaaaccagtgaagagaaacggcataaagatgacaaatgagcctatttgttagtgttcgtgctcaaatgtgatttacgttttaatgtataataataaaattgccttttgcattccgttagtgactgattgttaaaaataatttgaaattatcaaagcttttaatttccagagaatgatgtttgtttataataaaacaagctatgtttgaaaacca

SEQ ID NO: 421756 - DNA, 2630 bp, Homo sapiens
  misc_feature (2626)..(2626): n is a, c, g, or t
  misc_feature (2628)..(2628): n is a, c, g, or t
  misc_feature (2630)..(2630): n is a, c, g, or t
atccttagagaggctctcgggagtccgagagagcactgcattctgggatttgtagtttctctggtggataccgtcggcgttgggaccgaggcagccctgcatcctgggacttgtagtttctcgcactgcgtgttaagattttggtggttacagagactgtccgtacctctcatttagggttacgcctggaggtgggagactgctgaggaaagattgaaacgtgggagggcggtttctttgctaacgagatcgtactctttatgaagcagcatctgtccctggtgaaaagttgctgtgcgtgctgaagagccagcacagcaacgactagcgcaatcggctggcctcatttcctctcttcccggtagaattcaatgttaactgaaaactaaccacgtcccccactccacccgcgagggtcctgcctttgcctctgggttagctcagctgtcctggatccggagctcacgcacagaaaatccaggcgcctgccaacaccgttactcagtttttgggaacttctttctcattccacgccccgcttcccacccccccgcgtttcctatggctagaatcattttccgcaaaggaaacagtttttagtgatgtcgtccacgagaaaaaaaaatatttaaccctggcttctgggcattgtcattctcgtacagccctctgcccctccacactgttataaagaagcccgtgggcggtcgaactgcctctctgcggaaggaggactgcattgtgtgcggccgccgcgctccgaggtccccgggcctctgtctcccgggcgtcctccagcagcgggccttcggggccggtagccggctggagtacggggccttcgggagccgcgcgccttctccggcgtccgggtcgagcgcagatccctgtttattgggaaggatatgttcgattcttaaatacgccatctgacaaatcagaagatggaaggctaatttatactggcaatatggcccgagcagtgtttggtgtgaaatgtttctcttattctacgagtctgattggccttacatttctgccatacatttttacacaaaataatgctatttctgaaagtgtgcctctgcctattcaaatcatattctatggcatcatgggaagctttacggtgatcaccccagtgctgcttcactttattacaaaaggctatgtcattcgattgtaccatgaggccacaacagacacttataaagccattacctacaatgctatgcttgcagaaacgagtacagtgtttcaccagaatgatgtgaagattccagatgctaaacatgtatttaccacattttatgctaaaacaaaatcactgttagttaatccagtgctctttccaaaccgtgaagactatatccatctaatgggttatgacaaagaagaatttattttgtatatggaagaaaccagtgaagagaaacggcataaagatgacaaatgagcctatttgttagtgttcgtgctcaaatgtgatttacgttttaatgtataataataaaattgccttttgcattccgttagtgactgattgttaaaaataatttgaaattatcaaagcttttaatttccagagaatgatgtttgtttataataaaacaagctatgtttgaaaaccaaaatgtagtatctaccattcgtgttttagaaaggtatgtgaataaatatgttcatgctagtataagagttctgtgttactgtggttgactctaaactggggatctgatgtcagtagcaaatgggagagttgctttattctttgtgtatggatttttctaagtgtataaatattttccgacattaaaagacattttctctttgaggaagacacagtcataggtggtgcggagctgtggtccacctgctcctgctcctgactcactgctctttgctgttgcctgaggaccaagtctgtcaggaagctggctaggaagccttgcagcagccatggcttttaaacataccagaaaaacacccgtggagtcagaggtggcaattcaccgaattcatatcactctaacgagttgcaacgtaaaatccctggataaggtgtgtgctgacttgatctgaggagcaaaggaaaagaatcagtgaaaggaccagtttgaatgcctaccaagactttgagaatcactacaagaaaaacttacggtgaaggttctaaggcatgggatcgtttccagatgagaatccacaagcgactcattgacttgcgcagtcctcagatagttaagcagattacttccatcagtattgagccaggagttgagatggaagtcaccattgcaaatgcttaagtcaactgttttcataaattgattaccagttgttaaaaaattttcaaaaaaccgcaaaatttcaagaaattcacaaattatgggagcagttttaagtcttctttggttcagaacacaggtttttgcctaacccctggcatgattgcccataagaacatacatgtacagttgaactggtggttagctatacgggaaatggtaagtagtgttgtcttcagtatcttaatttgtttctgcaactgtgcactcctcccttggtgggcaccctatgggtgtaggaaaaccactgttattaaacaggtgaaaaataaaaaatntntn

SEQ ID NO: 421757 - DNA, 1470 bp, Homo sapiens
agctgccagtcaggcgtcccgggctgggcatgcgccacttgtgcggcagtcgggtgggaagccgtgtctcgcagtcgtggactcgtgcagctggggcgtccgcagccgctcgtcacccgcgtgatgctgtttctggcgttgggcagcccgtgggcggtcgaactgcctctctgcggaaggaggactgcattgtgtgcggccgccgcgctccgaggtccccgggcctctgtctcccgggcgtcctccagcagcgggccttcggggccggtagccggctggagtacggggccttcgggagccgcgcgccttctccggcgtccgggtcgagcgcagatccctgtttattgggaaggatatgttcgattcttaaatacgccatctgacaaatcagaagatggaaggctaatttatactggcaatatggcccgagcagtgtttggtgtgaaatgtttctcttattctacgagtctgattggccttacatttctgccatacatttttacacaaaataatgctatttctgaaagtgtgcctctgcctattcaaatcatattctatggcatcatgggaagctttacggtgatcaccccagtgctgcttcactttattacaaaaggctatgtcattcgattgtaccatgaggccacaacagacacttataaagccattacctacaatgctatgcttgcagaaacgagtacagtgtttcaccagaatgatgtgaagattccagatgctaaacatgtatttaccacattttatgctaaaacaaaatcactgttagttaatccagtgctctttccaaaccgtgaagactatatccatctaatgggttatgacaaagaagaatttattttgtatatggaagaaaccagtgaagagaaacggcataaagatgacaaatgagcctatttgttagtgttcgtgctcaaatgtgatttacgttttaatgtataataataaaattgccttttgcattccgttagtgactgattgttaaaaataatttgaaattatcaaagcttttaatttccagagaatgatgtttgtttataataaaacaagctatgtttgaaaaccacaaaaaaaaaaaaaaaaaaaaaaaaaaaacacgtgtgtgtgcggcgcgcgccccgctgggcccaccggaagaagagctttttatagacacccattcgcggtgtgggcgcgcgcgggcggcccacgttgggttaggtgtgaaactgtgggcgccatatagcgcgggttcccaagagaagagagaacccgggcgcacaggagaccataggcggcgtggggattctcttcacccaatataaaaagaagcgccgcgcggggggacaccgcggagccgttctcgtgaaaccaaattcccagagaggggcggttcgcggagggggccattagcgcggggtctcttattcaagcggggagttccaaaggaggagcccggaattcaaaatttgccca

SEQ ID NO: 421758 - DNA, 2163 bp, Homo sapiens
  misc_feature (2159)..(2159): n is a, c, g, or t
  misc_feature (2161)..(2161): n is a, c, g, or t
  misc_feature (2163)..(2163): n is a, c, g, or t
atccttagagaggctctcgggagtccgagagagcactgcattctgggatttgtagtttctctggtggataccgtcggcgttgggaccgaggcagccctgcatcctgggacttgtagtttctcgcactgcgtgttaagattttggtggttacagagactgtccgtacctctcatttagggttacgcctggaggctagaatcattttccgcaaaggaaacagtttttagtgatgtcgtccacgagaaaaaaaaatatttaaccctggcttctgggcattgtcattctcgtacagccctctgcccctccacactgttataaagaagatccctgtttattgggaaggatatgttcgattcttaaatacgccatctgacaaatcagaagatggaaggctaatttatactggcaatatggcccgagcagtgtttggctggagtgcagtggcatgatcttggttcaccatactcttcgcctcccatgttcaagcgattctcctggctcagcctcctgctgggattacaggtgtgaaatgtttctcttattctacgagtctgattggccttacatttctgccatacatttttacacaaaataatgctatttctgaaagtgtgcctctgcctattcaaatcatattctatggcatcatgggaagctttacggtgatcaccccagtgctgcttcactttattacaaaaggctatgtcattcgattgtaccatgaggccacaacagacacttataaagccattacctacaatgctatgcttgcagaaacgagtacagtgtttcaccagaatgatgtgaagattccagatgctaaacatgtatttaccacattttatgctaaaacaaaatcactgttagttaatccagtgctctttccaaaccgtgaagactatatccatctaatgggttatgacaaagaagaatttattttgtatatggaagaaaccagtgaagagaaacggcataaagatgacaaatgagcctatttgttagtgttcgtgctcaaatgtgatttacgttttaatgtataataataaaattgccttttgcattccgttagtgactgattgttaaaaataatttgaaattatcaaagcttttaatttccagagaatgatgtttgtttataataaaacaagctatgtttgaaaaccaaaatgtagtatctaccattcgtgttttagaaaggtatgtgaataaatatgttcatgctagtataagagttctgtgttactgtggttgactctaaactggggatctgatgtcagtagcaaatgggagagttgctttattctttgtgtatggatttttctaagtgtataaatattttccgacattaaaagacattttctctttgaggaagacacagtcataggtggtgcggagctgtggtccacctgctcctgctcctgactcactgctctttgctgttgcctgaggaccaagtctgtcaggaagctggctaggaagccttgcagcagccatggcttttaaacataccagaaaaacacccgtggagtcagaggtggcaattcaccgaattcatatcactctaacgagttgcaacgtaaaatccctggataaggtgtgtgctgacttgatctgaggagcaaaggaaaagaatcagtgaaaggaccagtttgaatgcctaccaagactttgagaatcactacaagaaaaacttacggtgaaggttctaaggcatgggatcgtttccagatgagaatccacaagcgactcattgacttgcgcagtcctcagatagttaagcagattacttccatcagtattgagccaggagttgagatggaagtcaccattgcaaatgcttaagtcaactgttttcataaattgattaccagttgttaaaaaattttcaaaaaaccgcaaaatttcaagaaattcacaaattatgggagcagttttaagtcttctttggttcagaacacaggtttttgcctaacccctggcatgattgcccataagaacatacatgtacagttgaactggtggttagctatacgggaaatggtaagtagtgttgtcttcagtatcttaatttgtttctgcaactgtgcactcctcccttggtgggcaccctatgggtgtaggaaaaccactgttattaaacaggtgaaaaataaaaaatntntn

SEQ ID NO: 421759 - DNA, 1174 bp, Homo sapiens
agctgccagtcaggcgtcccgggctgggcatgcgccacttgtgcggcagtcgggtgggaagccgtgtctcgcagtcgtggactcgtgcagctggggcgtccgcagccgctcgtcacccgcgtgatgctgtttctggcgttgggcagcccgtgggcggtcgaactgcctctctgcggaaggaggactgcattgtgtgcggccgccgcgctccgaggtccccgggcctctgtctcccgggcgtcctccagcagcgggccttcggggccggtagccggctggagtacggggccttcgggagccgcgcgccttctccggcgtccgggtcgagcgcagatccctgtttattgggaaggatatgttcgattcttaaatacgccatctgacaaatcagaagatggaaggctaatttatactggcaatatggcccgagcagtgtttggctggagtgcagtggcatgatcttggttcaccatactcttcgcctcccatgttcaagcgattctcctggctcagcctcctgctgggattacaggtgtgaaatgtttctcttattctacgagtctgattggccttacatttctgccatacatttttacacaaaataatgctatttctgaaagtgtgcctctgcctattcaaatcatattctatggcatcatgggaagctttacggtgatcaccccagtgctgcttcactttattacaaaaggctatgtcattcgattgtaccatgaggccacaacagacacttataaagccattacctacaatgctatgcttgcagaaacgagtacagtgtttcaccagaatgatgtgaagattccagatgctaaacatgtatttaccacattttatgctaaaacaaaatcactgttagttaatccagtgctctttccaaaccgtgaagactatatccatctaatgggttatgacaaagaagaatttattttgtatatggaagaaaccagtgaagagaaacggcataaagatgacaaatgagcctatttgttagtgttcgtgctcaaatgtgatttacgttttaatgtataataataaaattgccttttgcattccgttagtgactgattgttaaaaataatttgaaattatcaaagcttttaatttccagagaatgatgtttgtttataataaaacaagctatgtttgaaaacca

SEQ ID NO: 421760 - DNA, 521 bp, Homo sapiens
tatgttttttaaccactggttttatttctctggtgatttgctgttttaatcctgggcacttagcctgatagaatttcccatgtttgaatattttatgttagatatactggagtgcttgttaatagagagttttgtttgataatctgctatctgaatcaacttttgtagtacaatattagtaaggatctttaagtaatattaactactttattgtggaactgaggtagggccacttaaaccctaaagcagatttcctgcctggagaggcagtgcattctaatggtcagtagcagggacattgaagtcaaaatatgtaaagtccttaaaacagagcttagaatataataagcactgtatttatggtttgattttgttgtcttgagctgatacagtaagaagaaaaatggaagaattagtgggatagattgattcttttataaaatttaaaagtattgatcctctctctttttttcccatttaggtgtgaaatgtttctcttattctacgagtctgattggcct

SEQ ID NO: 421761 - DNA, 2080 bp, Homo sapiens
  misc_feature (2076)..(2076): n is a, c, g, or t
  misc_feature (2078)..(2078): n is a, c, g, or t
  misc_feature (2080)..(2080): n is a, c, g, or t
agctgccagtcaggcgtcccgggctgggcatgcgccacttgtgcggcagtcgggtgggaagccgtgtctcgcagtcgtggactcgtgcagctggggcgtccgcagccgctcgtcacccgcgtgatgctgtttctggcgttgggcagcccgtgggcggtcgaactgcctctctgcggaaggaggactgcattgtgtgcggccgccgcgctccgaggtccccgggcctctgtctcccgggcgtcctccagcagcgggccttcggggccggtagccggctggagtacggggccttcgggagccgcgcgccttctccggcgtccgggtcgagcgcagatccctgtttattgggaaggatatgttcgattcttaaatacgccatctgacaaatcagaagatggaaggctaatttatactggcaatatggcccgagcagtgtttggtgtgaaatgtttctcttattctacgagtctgattggccttacatttctgccatacatttttacacaaaataatgctatttctgaaagtgtgcctctgcctattcaaatcatattctatggcatcatgggaagctttacggtgatcaccccagtgctgcttcactttattacaaaaggctatgtcattcgattgtaccatgaggccacaacagacacttataaagccattacctacaatgctatgcttgcagaaacgagtacagtgtttcaccagaatgatgtgaagattccagatgctaaacatgtatttaccacattttatgctaaaacaaaatcactgttagttaatccagtgctctttccaaaccgtgaagactatatccatctaatgggttatgacaaagaagaatttattttgtatatggaagaaaccagtgaagagaaacggcataaagatgacaaatgagcctatttgttagtgttcgtgctcaaatgtgatttacgttttaatgtataataataaaattgccttttgcattccgttagtgactgattgttaaaaataatttgaaattatcaaagcttttaatttccagagaatgatgtttgtttataataaaacaagctatgtttgaaaaccaaaatgtagtatctaccattcgtgttttagaaaggtatgtgaataaatatgttcatgctagtataagagttctgtgttactgtggttgactctaaactggggatctgatgtcagtagcaaatgggagagttgctttattctttgtgtatggatttttctaagtgtataaatattttccgacattaaaagacattttctctttgaggaagacacagtcataggtggtgcggagctgtggtccacctgctcctgctcctgactcactgctctttgctgttgcctgaggaccaagtctgtcaggaagctggctaggaagccttgcagcagccatggcttttaaacataccagaaaaacacccgtggagtcagaggtggcaattcaccgaattcatatcactctaacgagttgcaacgtaaaatccctggataaggtgtgtgctgacttgatctgaggagcaaaggaaaagaatcagtgaaaggaccagtttgaatgcctaccaagactttgagaatcactacaagaaaaacttacggtgaaggttctaaggcatgggatcgtttccagatgagaatccacaagcgactcattgacttgcgcagtcctcagatagttaagcagattacttccatcagtattgagccaggagttgagatggaagtcaccattgcaaatgcttaagtcaactgttttcataaattgattaccagttgttaaaaaattttcaaaaaaccgcaaaatttcaagaaattcacaaattatgggagcagttttaagtcttctttggttcagaacacaggtttttgcctaacccctggcatgattgcccataagaacatacatgtacagttgaactggtggttagctatacgggaaatggtaagtagtgttgtcttcagtatcttaatttgtttctgcaactgtgcactcctcccttggtgggcaccctatgggtgtaggaaaaccactgttattaaacaggtgaaaaataaaaaatntntn

SEQ ID NO: 421762 - DNA, 1081 bp, Homo sapiens
agctgccagtcaggcgtcccgggctgggcatgcgccacttgtgcggcagtcgggtgggaagccgtgtctcgcagtcgtggactcgtgcagctggggcgtccgcagccgctcgtcacccgcgtgatgctgtttctggcgttgggcagcccgtgggcggtcgaactgcctctctgcggaaggaggactgcattgtgtgcggccgccgcgctccgaggtccccgggcctctgtctcccgggcgtcctccagcagcgggccttcggggccggtagccggctggagtacggggccttcgggagccgcgcgccttctccggcgtccgggtcgagcgcagatccctgtttattgggaaggatatgttcgattcttaaatacgccatctgacaaatcagaagatggaaggctaatttatactggcaatatggcccgagcagtgtttggtgtgaaatgtttctcttattctacgagtctgattggccttacatttctgccatacatttttacacaaaataatgctatttctgaaagtgtgcctctgcctattcaaatcatattctatggcatcatgggaagctttacggtgatcaccccagtgctgcttcactttattacaaaaggctatgtcattcgattgtaccatgaggccacaacagacacttataaagccattacctacaatgctatgcttgcagaaacgagtacagtgtttcaccagaatgatgtgaagattccagatgctaaacatgtatttaccacattttatgctaaaacaaaatcactgttagttaatccagtgctctttccaaaccgtgaagactatatccatctaatgggttatgacaaagaagaatttattttgtatatggaagaaaccagtgaagagaaacggcataaagatgacaaatgagcctatttgttagtgttcgtgctcaaatgtgatttacgttttaatgtataataataaaattgccttttgcattccgttagtgactgattgttaaaaataatttgaaattatcaaagcttttaatttccagagaatgatgtttgtttataataaaacaagctatgtttgaaaacca

SEQ ID NO: 421763 - DNA, 2173 bp, Homo sapiens
  misc_feature (2169)..(2169): n is a, c, g, or t
  misc_feature (2171)..(2171): n is a, c, g, or t
  misc_feature (2173)..(2173): n is a, c, g, or t
agctgccagtcaggcgtcccgggctgggcatgcgccacttgtgcggcagtcgggtgggaagccgtgtctcgcagtcgtggactcgtgcagctggggcgtccgcagccgctcgtcacccgcgtgatgctgtttctggcgttgggcagcccgtgggcggtcgaactgcctctctgcggaaggaggactgcattgtgtgcggccgccgcgctccgaggtccccgggcctctgtctcccgggcgtcctccagcagcgggccttcggggccggtagccggctggagtacggggccttcgggagccgcgcgccttctccggcgtccgggtcgagcgcagatccctgtttattgggaaggatatgttcgattcttaaatacgccatctgacaaatcagaagatggaaggctaatttatactggcaatatggcccgagcagtgtttggctggagtgcagtggcatgatcttggttcaccatactcttcgcctcccatgttcaagcgattctcctggctcagcctcctgctgggattacaggtgtgaaatgtttctcttattctacgagtctgattggccttacatttctgccatacatttttacacaaaataatgctatttctgaaagtgtgcctctgcctattcaaatcatattctatggcatcatgggaagctttacggtgatcaccccagtgctgcttcactttattacaaaaggctatgtcattcgattgtaccatgaggccacaacagacacttataaagccattacctacaatgctatgcttgcagaaacgagtacagtgtttcaccagaatgatgtgaagattccagatgctaaacatgtatttaccacattttatgctaaaacaaaatcactgttagttaatccagtgctctttccaaaccgtgaagactatatccatctaatgggttatgacaaagaagaatttattttgtatatggaagaaaccagtgaagagaaacggcataaagatgacaaatgagcctatttgttagtgttcgtgctcaaatgtgatttacgttttaatgtataataataaaattgccttttgcattccgttagtgactgattgttaaaaataatttgaaattatcaaagcttttaatttccagagaatgatgtttgtttataataaaacaagctatgtttgaaaaccaaaatgtagtatctaccattcgtgttttagaaaggtatgtgaataaatatgttcatgctagtataagagttctgtgttactgtggttgactctaaactggggatctgatgtcagtagcaaatgggagagttgctttattctttgtgtatggatttttctaagtgtataaatattttccgacattaaaagacattttctctttgaggaagacacagtcataggtggtgcggagctgtggtccacctgctcctgctcctgactcactgctctttgctgttgcctgaggaccaagtctgtcaggaagctggctaggaagccttgcagcagccatggcttttaaacataccagaaaaacacccgtggagtcagaggtggcaattcaccgaattcatatcactctaacgagttgcaacgtaaaatccctggataaggtgtgtgctgacttgatctgaggagcaaaggaaaagaatcagtgaaaggaccagtttgaatgcctaccaagactttgagaatcactacaagaaaaacttacggtgaaggttctaaggcatgggatcgtttccagatgagaatccacaagcgactcattgacttgcgcagtcctcagatagttaagcagattacttccatcagtattgagccaggagttgagatggaagtcaccattgcaaatgcttaagtcaactgttttcataaattgattaccagttgttaaaaaattttcaaaaaaccgcaaaatttcaagaaattcacaaattatgggagcagttttaagtcttctttggttcagaacacaggtttttgcctaacccctggcatgattgcccataagaacatacatgtacagttgaactggtggttagctatacgggaaatggtaagtagtgttgtcttcagtatcttaatttgtttctgcaactgtgcactcctcccttggtgggcaccctatgggtgtaggaaaaccactgttattaaacaggtgaaaaataaaaaatntntn

SEQ ID NO: 421764 - DNA, 3059 bp, Homo sapiens
acaaggtctgtttcttttcccttaagaaccacaaaagtgctaattttccctttacaaatgttacataaaatcttgattacaaaactactcaacaacttaatcctaccatccatacaattatatgttccttttcagcaaggtcaaaagccaacgatgtagtccctttgtacactagagattctttacataatagaagttcacagactgaaatatcattgctgcagtctttggagaacagaactggtccatttctgtgaatcctttttgcacggacaagactcaagactggctaggtgaaaactggtggcagggaccccagccctcctgttaactttcaggaccacctacttcatcatcaagtctgagaggctgaggttcggtcagcagcagctccgctttggctctgatcatacagtttttagtaatctttcctgaaaaacactggctttctctggaaaagcttcctcagctggaagctttactccctcctcgacagaaagtgaggattacagatgacatggctcaggtattcgtggacggcgtgttccagaggcgcggggcgccgccgctgcagctgccgcgcgtgtgcacattcaggttcccgagcacaaacatcaagataacgttcactgccctgtccagcgagaagagagagaagcaggaggcgtctgagtctccagtgaaggccgtacagccacacatctcgcccctgaccatcaacattccagacaccatggcccacctcatcagccctctgccctcccccacgggaaccatcagcgctgcaaactcctgcccctccagcccccggggagcggggtcttcagggtacaaggtgggccgagtgatgccatctgacctcaatttaatggctgacaactcacagcctgaaaatgaaaaggaagcttcaggtggagacagcccgaaggatgattcaaagccgccttactcctacgcgcagctgatagttcaggcgattacgatggctcccgacaaacagctcaccctgaacgggatttatacacacatcactaaaaattatccctactacaggactgcggacaagggctggcagaattcaattcgccacaatctctctctgaatcgttatttcatcaaagtgccgcgttcccaggaagaaccaggcaaaggctcgttctggaggatagacccagcctctgaaagcaaattaatagaacaggcttttaggaaacgacggcctaggggcgtgccctgctttagaacccctctgggaccgctctcttctaggagtgccccagcctctcccaatcacgcgggagtgctgtctgctcactctagtggcgcccagacccctgagagcctgtcgagggaaggttcgccggcccccctggagcctgagcctggcgctgcacagcccaaactcgctgtcatccaggaagcccggtttgcccagagcgccccagggtcacctctgtccagtcagccagtcttaatcaccgtccagcggcagctaccacaggccatcaagcctgtcacctacactgtggccaccccagtgaccacctcgacctcccagccacccgtcgtgcagacggttcacgtcgtccaccagatcccagcggtgtcggtcaccagtgtggccggactggccccagcgaacacgtacactgtctctggacaagctgtggtcaccccggcagccgtgctggcccctcctaaggcagaggcccaggagaatggagaccacagggaagtcaaagtgaaagtagagcctattcccgccattggccacgccacgctcggcactgccagccggatcattcagacggcacagaccaccccggtccagacggtgaccatagtacaacaggcacctctaggtcaacaccagctaccaataaaaactgtaacacaaaacggcactcacgtggcatcagtccccactgcggtccacggccaggtgaacaatgccgcggcgagtcctttgcacatgttggcaacacacgcatccgcatcggcctccctgcccacaaagcgccacaacggtgaccagccggagcagccggagctgaagcggatcaagacagaagacggcgagggcatcgtcattgccctgagcgtggacacgccaccggcagccgtaagggaaaagggtgtccagaactagcgaccgggagagcttttctttaacgatatcaactctgtggtgccaaaaggagacgcggcctcccgccagcactcgggggtgcagggccctgtggttggacttcacctctcagcactgaaaacccaaaacccagctggccttaacactccttaaagacagaagtcacacttgaacaaaacccacacacaacaaaacctgatttgggagacggtgtctccactgagcacctgctgggctgagcttctacctacgagtgaaactctgtcctcccgcgaggaccaggcatcgctgtgtgaggacggcacggccagcgcctgctgtgagtgggtctcccaagactaggcctcaggacgcggggggagccatccccgccgccctcacaggacccaccaggcagcggagacatgtggaattagagtattttgaggtgtcctttctttacaaaataatggggtcttgggcatttcacatcactccatttctactgagactttcagaatcacacaggccctttccgtggatttcatttggggcaaagaaacaacgtagttttgtttttgttttcagcctatggaatgatttccttttgtctgtcttgttcaagttcagacgaagctactctggcatctgcacatttccgtgttacagcagctgcctgatgaattttatccacctccatttcagcatgtggctcgcgtggacaggtggacggacgctgtggccgcatggaaccttgagaacccagggacgagccagtgccgggaaggaactgccgggactcaccgagctgcacttaactgttctctttctggctattttttgttgtttgtttctttgtgttgactttgtccctggcaaaattttccactctgagtaaaacaagtctcctaagtattgtgtatgtttaaaa

SEQ ID NO: 421765 - DNA, 3481 bp, Homo sapiens
acaaggtctgtttcttttcccttaagaaccacaaaagtgctaattttccctttacaaatgttacataaaatcttgattacaaaactactcaacaacttaatcctaccatccatacaattatatgttccttttcagcaaggtcaaaagccaacgatgtagtccctttgtacactagagattctttacataatagaagttcacagactgaaatatcattgctgcagtctttggagaacagaactggtccatttctgtgaatcctttttgcacggacaagactcaagactggctaggtgaaaactggtggcagggaccccagccctcctgttaactttcaggaccacctacttcatcatcaagtctgagaggctgaggttcggtcagcagcagctccgctttggctctgatcatacagtttttagtaatctttcctgaaaaacactggctttctctggaaaagcttcctcagctggaagctttactccctcctcgacagaaagtgaggattacagatgacatggctcaggtattcgtggacggcgtgttccagaggcgcggggcgccgccgctgcagctgccgcgcgtgtgcacattcaggttcccgagcacaaacatcaagataacgttcactgccctgtccagcgagaagagagagaagcaggaggcgtctgagtctccagtgaaggccgtacagccacacatctcgcccctgaccatcaacattccagacaccatggcccacctcatcagccctctgccctcccccacgggaaccatcagcgctgcaaactcctgcccctccagcccccggggagcggggtcttcagggtacaaggtgggccgagtgatgccatctgacctcaatttaatggctgacaactcacagcctgaaaatgaaaaggaagcttcaggtggagacagcccgaaggatgattcaaagccgccttactcctacgcgcagctgatagttcaggcgattacgatggctcccgacaaacagctcaccctgaacgggatttatacacacatcactaaaaattatccctactacaggactgcggacaagggctggcagaattcaattcgccacaatctctctctgaatcgttatttcatcaaagtgccgcgttcccaggaagaaccaggcaaaggctcgttctggaggatagacccagcctctgaaagcaaattaatagaacaggcttttaggaaacgacggcctaggggcgtgccctgctttagaacccctctgggaccgctctcttctaggagtgccccagcctctcccaatcacgcgggagtgctgtctgctcactctagtggcgcccagacccctgagagcctgtcgagggaaggttcgccggcccccctggagcctgagcctggcgctgcacagcccaaactcgctgtcatccaggaagcccggtttgcccagagcgccccagggtcacctctgtccagtcagccagtcttaatcaccgtccagcggcagctaccacaggccatcaagcctgtcacctacactgtggccaccccagtgaccacctcgacctcccagccacccgtcgtgcagacggttcacgtcgtccaccagatcccagcggtgtcggtcaccagtgtggccggactggccccagcgaacacgtacactgtctctggacaagctgtggtcaccccggcagccgtgctggcccctcctaaggcagaggcccaggagaatggagaccacagggaagtcaaagtgaaagtagagcctattcccgccattggccacgccacgctcggcactgccagccggatcattcagacggcacagaccaccccggtccagacggtgaccatagtacaacaggcacctctaggtcaacaccagctaccaataaaaactgtaacacaaaacggcactcacgtggcatcagtccccactgcggtccacggccaggtgaacaatgggccccttggcctcagaaggcccccatgtgccagctcagactggagttgcctcagttgacacagcaggccccatccagacagaccagcaggtgcttctggagacaagagcaaagccttttccggcagcccggaacctgggatgagaaacgacaggtggaaggttgtccagagacacctacagcgtggatgctgttccgagtcagcgtaggagaaaggccactggaaaccagagtcacactgcgcgtctgtgcatctctggcctaccgcagtggccccggctgtctgcacattttttgtagacacattagagtcggttgaggccacacctgcggccacacctgcggccacagactgcgaccgcgattgcagggaggagcatctgaggtggtcacggggtttgcccagctcacaccaactgcagccgcggcgagtcctttgcacatgttggcaacacacgcatccgcatcggcctccctgcccacaaagcgccacaacggtgaccagccggagcagccggagctgaagcggatcaagacagaagacggcgagggcatcgtcattgccctgagcgtggacacgccaccggcagccgtaagggaaaagggtgtccagaactagcgaccgggagagcttttctttaacgatatcaactctgtggtgccaaaaggagacgcggcctcccgccagcactcgggggtgcagggccctgtggttggacttcacctctcagcactgaaaacccaaaacccagctggccttaacactccttaaagacagaagtcacacttgaacaaaacccacacacaacaaaacctgatttgggagacggtgtctccactgagcacctgctgggctgagcttctacctacgagtgaaactctgtcctcccgcgaggaccaggcatcgctgtgtgaggacggcacggccagcgcctgctgtgagtgggtctcccaagactaggcctcaggacgcggggggagccatccccgccgccctcacaggacccaccaggcagcggagacatgtggaattagagtattttgaggtgtcctttctttacaaaataatggggtcttgggcatttcacatcactccatttctactgagactttcagaatcacacaggccctttccgtggatttcatttggggcaaagaaacaacgtagttttgtttttgttttcagcctatggaatgatttccttttgtctgtcttgttcaagttcagacgaagctactctggcatctgcacatttccgtgttacagcagctgcctgatgaattttatccacctccatttcagcatgtggctcgcgtggacaggtggacggacgctgtggccgcatggaaccttgagaacccagggacgagccagtgccgggaaggaactgccgggactcaccgagctgcacttaactgttctctttctggctattttttgttgtttgtttctttgtgttgactttgtccctggcaaaattttccactctgagtaaaacaagtctcctaagtattgtgtatgtttaaaa

SEQ ID NO: 421766 - DNA, 2206 bp, Homo sapiens
gccccccccccacgcctcctcccctcctcccgcccgcgcgtgctcccgcccctcgccgccgctcgctcgctcgccggccggcctccgctcggccccctccctcagctccggtgcgcggcggccgacgacccgcggcctgggcctcggcgcgccaccggcgcccgcgcggagcggcccgggggccctcacgcaggcccatggcggcggcgcggcgcgctctcgggccgggcaccacgcgggcggcggggccgggggcggcggggccgggggcggcgggtccccgccgggcggctgggccgtggcgcgcctggagggccgcgagttcgagtatctgatgaagaagcgctcggtgaccatcggccgcaactcgtcgcagggctcggtggacgtgagcatgggccactcgagcttcatctcccggcgccacctcgagatcttcacgcccccgggcggcggcggccatggcggggccgctccggagctgccgcccgcgcagcccaggcccgacgccggcggcgacttctacctgcgctgcttgggcaagaacggggtattcgtggacggcgtgttccagaggcgcggggcgccgccgctgcagctgccgcgcgtgtgcacattcaggttcccgagcacaaacatcaagataacgttcactgccctgtccagcgagaagagagagaagcaggaggcgtctgagtctccagtgaaggccgtacagccacacatctcgcccctgaccatcaacattccagacaccatggcccacctcatcagccctctgccctcccccacgggaaccatcagcgctgcaaactcctgcccctccagcccccggggagcggggtcttcagggtacaaggtgggccgagtgatgccatctgacctcaatttaatggctgacaactcacagcctgaaaatgaaaaggaagcttcaggtggagacagcccgaaggatgattcaaagccgccttactcctacgcgcagctgatagttcaggcgattacgatggctcccgacaaacagctcaccctgaacgggatttatacacacatcactaaaaattatccctactacaggactgcggacaagggctggcagccgcggcgagtcctttgcacatgttggcaacacacgcatccgcatcggcctccctgcccacaaagcgccacaacggtgaccagccggagcagccggagctgaagcggatcaagacagaagacggcgagggcatcgtcattgccctgagcgtggacacgccaccggcagccgtaagggaaaagggtgtccagaactagcgaccgggagagcttttctttaacgatatcaactctgtggtgccaaaaggagacgcggcctcccgccagcactcgggggtgcagggccctgtggttggacttcacctctcagcactgaaaacccaaaacccagctggccttaacactccttaaagacagaagtcacacttgaacaaaacccacacacaacaaaacctgatttgggagacggtgtctccactgagcacctgctgggctgagcttctacctacgagtgaaactctgtcctcccgcgaggaccaggcatcgctgtgtgaggacggcacggccagcgcctgctgtgagtgggtctcccaagactaggcctcaggacgcggggggagccatccccgccgccctcacaggacccaccaggcagcggagacatgtggaattagagtattttgaggtgtcctttctttacaaaataatggggtcttgggcatttcacatcactccatttctactgagactttcagaatcacacaggccctttccgtggatttcatttggggcaaagaaacaacgtagttttgtttttgttttcagcctatggaatgatttccttttgtctgtcttgttcaagttcagacgaagctactctggcatctgcacatttccgtgttacagcagctgcctgatgaattttatccacctccatttcagcatgtggctcgcgtggacaggtggacggacgctgtggccgcatggaaccttgagaacccagggacgagccagtgccgggaaggaactgccgggactcaccgagctgcacttaactgttctctttctggctattttttgttgtttgtttctttgtgttgactttgtccctggcaaaattttccactctgagtaaaacaagtctcctaagtattgtgtatgtttaaaa

SEQ ID NO: 421767 - DNA, 457 bp, Homo sapiens
  misc_feature (57)..(57): n is a, c, g, or t
acttttttttgctaaaccctcagaaatataaaaaaaaaaaaaagacaggacacaaanaaccataagacaaatgaggtatcagaggaacacttaaaagcactgagaatctttaaatctagtaaatttaatacaaaatatggtaacttcaatattcgttttgtgtttgttttttaaatacaggatgattcaaagccgccttactcctacgcgcagctgatagttcaggcgattacgatggctcccgacaaacagctcaccctgaacgggatttatacacacatcactaaaaattatccctactacaggactgcggacaagggctggcaggtaaatgccttcagtttgttgttaaatagaggctgatggataccgagaagaaagtggagcggctgctgtctggaacacaggcacaggataggaaggtagaagggggggttggagcctcccgtgctgagag

SEQ ID NO: 421768 - DNA, 520 bp, Homo sapiens
gagcagaaggaagcgtggttctggaggagcgtctaggcctgcatgctttactgttgtggaaattcatgtgtctgcataggatttgtgaagtgtggattgtttgagatatttccctttgaccaatgcagttcatatttgaaatgtaggagaaatttaaaacccagcctatccttccctttggcattctcctgtcttcctcatctaatcctgctaatggacagaagttttgaagtttgcagagacagttttcaaaccgcattttaccaagagacactttgaaatctgcaaaatattccctttggtcagctcacacaccaataatttttttttttttttttgagtcagagtctcgctctgttatgccaataattttaaccctttagattatgtaggttttttctctgtgtatctgtgttgtgttggctgtttactggatgtatatgagaatcttgctatttgaaataatttggcagtgggtaggtttgaaatatagaatattaaaaacatagagaagaaatgt

SEQ ID NO: 421769 - DNA, 458 bp, Homo sapiens
taacatttctgtatttgttatccctgtaattaaagccagttgctgaagcacagtaggatgcgtgcactgtgatagactaataggaacaactttttctcttccacagcgctgcaaactcctgcccctccagcccccggggagcggggtcttcagggtacaaggtgggccgagtgatgccatctgacctcaatttaatggctgacaactcacagcctgaaaatgaaaaggaagcttcaggtggagacagcccgaaggtaaaggctttgtagccttgaagcagcccctgggggacagtgtgtagccacagggccctcaatgtcacctgcctgtcactcacctgcctgtccagtgacagccctgccagggcatcggtggggatgtgggcttgattctggtgttgctgctgtgttcttggtattggggctttttgcaagtgtactcgtttagtcattcaacgc

SEQ ID NO: 421770 - DNA, 456 bp, Homo sapiens
gagccaagatcgcgtcactgtactccagcctgggcgacacagcgagactctgtctcaaaaaaaagacaaatgaggtatcagaggaacacttaaaagcactgagaatctttaaatctagtaaatttaatacaaaatatggtaacttcaatattcgttttgtgtttgttttttaaatacaggatgattcaaagccgccttactcctacgcgcagctgatagttcaggcgattacgatggctcccgacaaacagctcaccctgaacgggatttatacacacatcactaaaaattatccctactacaggactgcggacaagggctggcaggtaaatgccttcagtttgttgttaaatagaggctgatggataccgagaagaaagtggagcggctgctgtctggaacacaggcacaggataggaaggtagaagggggggttggagcctcccgtgctgagag

SEQ ID NO: 421771 - DNA, 208 bp, Homo sapiens
tactactactgggttggcggccggtcgacccttgagaacccagggacgagccagtgccgggaaggaactgccgggactcaccgagctgcacttaactgttctctttctggctattttttgttgtttgtttctttgtgttgactttgtccctggcaaaattttccactctgagtaaaacaagtctcctaagtattgtgtatgtttaaaa

SEQ ID NO: 421772 - DNA, 3462 bp, Homo sapiens
gccccccccccacgcctcctcccctcctcccgcccgcgcgtgctcccgcccctcgccgccgctcgctcgctcgccggccggcctccgctcggccccctccctcagctccggtgcgcggcggccgacgacccgcggcctgggcctcggcgcgccaccggcgcccgcgcggagcggcccgggggccctcacgcaggcccatggcggcggcgcggcgcgctctcgggccgggcaccacgcgggcggcggggccgggggcggcggggccgggggcggcgggtccccgccgggcggctgggccgtggcgcgcctggagggccgcgagttcgagtatctgatgaagaagcgctcggtgaccatcggccgcaactcgtcgcagggctcggtggacgtgagcatgggccactcgagcttcatctcccggcgccacctcgagatcttcacgcccccgggcggcggcggccatggcggggccgctccggagctgccgcccgcgcagcccaggcccgacgccggcggcgacttctacctgcgctgcttgggcaagaacggggtattcgtggacggcgtgttccagaggcgcggggcgccgccgctgcagctgccgcgcgtgtgcacattcaggttcccgagcacaaacatcaagataacgttcactgccctgtccagcgagaagagagagaagcaggaggcgtctgagtctccagtgaaggccgtacagccacacatctcgcccctgaccatcaacattccagacaccatggcccacctcatcagccctctgccctcccccacgggaaccatcagcgctgcaaactcctgcccctccagcccccggggagcggggtcttcagggtacaaggtgggccgagtgatgccatctgacctcaatttaatggctgacaactcacagcctgaaaatgaaaaggaagcttcaggtggagacagcccgaaggatgattcaaagccgccttactcctacgcgcagctgatagttcaggcgattacgatggctcccgacaaacagctcaccctgaacgggatttatacacacatcactaaaaattatccctactacaggactgcggacaagggctggcagaattcaattcgccacaatctctctctgaatcgttatttcatcaaagtgccgcgttcccaggaagaaccaggcaaaggctcgttctggaggatagacccagcctctgaaagcaaattaatagaacaggcttttaggaaacgacggcctaggggcgtgccctgctttagaacccctctgggaccgctctcttctaggagtgccccagcctctcccaatcacgcgggagtgctgtctgctcactctagtggcgcccagacccctgagagcctgtcgagggaaggttcgccggcccccctggagcctgagcctggcgctgcacagcccaaactcgctgtcatccaggaagcccggtttgcccagagcgccccagggtcacctctgtccagtcagccagtcttaatcaccgtccagcggcagctaccacaggccatcaagcctgtcacctacactgtggccaccccagtgaccacctcgacctcccagccacccgtcgtgcagacggttcacgtcgtccaccagatcccagcggtgtcggtcaccagtgtggccggactggccccagcgaacacgtacactgtctctggacaagctgtggtcaccccggcagccgtgctggcccctcctaaggcagaggcccaggagaatggagaccacagggaagtcaaagtgaaagtagagcctattcccgccattggccacgccacgctcggcactgccagccggatcattcagacggcacagaccaccccggtccagacggtgaccatagtacaacaggcacctctaggtcaacaccagctaccaataaaaactgtaacacaaaacggcactcacgtggcatcagtccccactgcggtccacggccaggtgaacaatgccgcggcgagtcctttgcacatgttggcaacacacgcatccgcatcggcctccctgcccacaaagcgccacaacggtgaccagccggagcagccggagctgaagcggatcaagacagaagacggcgagggcatcgtcattgccctgagcgtggacacgccaccggcagccgtaagggaaaagggtgtccagaactagcgaccgggagagcttttctttaacgatatcaactctgtggtgccaaaaggagacgcggcctcccgccagcactcgggggtgcagggccctgtggttggacttcacctctcagcactgaaaacccaaaacccagctggccttaacactccttaaagacagaagtcacacttgaacaaaacccacacacaacaaaacctgatttgggagacggtgtctccactgagcacctgctgggctgagcttctacctacgagtgaaactctgtcctcccgcgaggaccaggcatcgctgtgtgaggacggcacggccagcgcctgctgtgagtgggtctcccaagactaggcctcaggacgcggggggagccatccccgccgccctcacaggacccaccaggcagcggagacatgtggaattagagtattttgaggtgtcctttctttacaaaataatggggtcttgggcatttcacatcactccatttctactgagactttcagaatcacacaggccctttccgtggatttcatttggggcaaagaaacaacgtagttttgtttttgttttcagcctatggaatgatttccttttgtctgtcttgttcaagttcagacgaagctactctggcatctgcacatttccgtgttacagcagctgcctgatgaattttatccacctccatttcagcatgtggctcgcgtggacaggtggacggacgctgtggccgcatggaaccttgagaacccagggacgagccagtgccgggaaggaactgccgggactcaccgagctgcacttaactgttctctttctggctattttttgttgtttgtttctttgtgttgactttgtccctggcaaaattttccactctgagtaaaacaagtctcctaagtattgtgtatgtttaaaacgacagaaccatttctacttcatttggaaaaagattcagtcttttatcacaggcccttttgaaactcagatcccaggtctctccgtggtatgtttgtatttggggtgtccctccggctctaggcggcctctgacccgctgtctactccccaccttcggtgagcggccgccatggtggagcagggtccgagccacgtcctgcagggcacgtctggggcatttcctgttttgtggtaggaaatgtccctgacctttcagaaccgaacccaatcctgaggctgactcctctacggaaaatgaggacaggacgggggtgagggaatgagagtgggaggtccctgcacctcctcgcccggctcctcaggaagaaaaccgctggc

SEQ ID NO: 421773 - DNA, 2999 bp, Homo sapiens
actccacagctgcgctcagctcagagccagcttcgtgtgcagagcccagcagagatggcggagccacttggcatccaagcaccttgccctgtttgtgtccacctggttctgccgtgagaacccctgggttttaagccgttaggctggtgcacattcaggttcccgagcacaaacatcaagataacgttcactgccctgtccagcgagaagagagagaagcaggaggcgtctgagtctccagtgaaggccgtacagccacacatctcgcccctgaccatcaacattccagacaccatggcccacctcatcagccctctgccctcccccacgggaaccatcagcgctgcaaactcctgcccctccagcccccggggagcggggtcttcagggtacaaggtgggccgagtgatgccatctgacctcaatttaatggctgacaactcacagcctgaaaatgaaaaggaagcttcaggtggagacagcccgaaggatgattcaaagccgccttactcctacgcgcagctgatagttcaggcgattacgatggctcccgacaaacagctcaccctgaacgggatttatacacacatcactaaaaattatccctactacaggactgcggacaagggctggcagaattcaattcgccacaatctctctctgaatcgttatttcatcaaagtgccgcgttcccaggaagaaccaggcaaaggctcgttctggaggatagacccagcctctgaaagcaaattaatagaacaggcttttaggaaacgacggcctaggggcgtgccctgctttagaacccctctgggaccgctctcttctaggagtgccccagcctctcccaatcacgcgggagtgctgtctgctcactctagtggcgcccagacccctgagagcctgtcgagggaaggttcgccggcccccctggagcctgagcctggcgctgcacagcccaaactcgctgtcatccaggaagcccggtttgcccagagcgccccagggtcacctctgtccagtcagccagtcttaatcaccgtccagcggcagctaccacaggccatcaagcctgtcacctacactgtggccaccccagtgaccacctcgacctcccagccacccgtcgtgcagacggttcacgtcgtccaccagatcccagcggtgtcggtcaccagtgtggccggactggccccagcgaacacgtacactgtctctggacaagctgtggtcaccccggcagccgtgctggcccctcctaaggcagaggcccaggagaatggagaccacagggaagtcaaagtgaaagtagagcctattcccgccattggccacgccacgctcggcactgccagccggatcattcagacggcacagaccaccccggtccagacggtgaccatagtacaacaggcacctctaggtcaacaccagctaccaataaaaactgtaacacaaaacggcactcacgtggcatcagtccccactgcggtccacggccaggtgaacaatgccgcggcgagtcctttgcacatgttggcaacacacgcatccgcatcggcctccctgcccacaaagcgccacaacggtgaccagccggagcagccggagctgaagcggatcaagacagaagacggcgagggcatcgtcattgccctgagcgtggacacgccaccggcagccgtaagggaaaagggtgtccagaactagcgaccgggagagcttttctttaacgatatcaactctgtggtgccaaaaggagacgcggcctcccgccagcactcgggggtgcagggccctgtggttggacttcacctctcagcactgaaaacccaaaacccagctggccttaacactccttaaagacagaagtcacacttgaacaaaacccacacacaacaaaacctgatttgggagacggtgtctccactgagcacctgctgggctgagcttctacctacgagtgaaactctgtcctcccgcgaggaccaggcatcgctgtgtgaggacggcacggccagcgcctgctgtgagtgggtctcccaagactaggcctcaggacgcggggggagccatccccgccgccctcacaggacccaccaggcagcggagacatgtggaattagagtattttgaggtgtcctttctttacaaaataatggggtcttgggcatttcacatcactccatttctactgagactttcagaatcacacaggccctttccgtggatttcatttggggcaaagaaacaacgtagttttgtttttgttttcagcctatggaatgatttccttttgtctgtcttgttcaagttcagacgaagctactctggcatctgcacatttccgtgttacagcagctgcctgatgaattttatccacctccatttcagcatgtggctcgcgtggacaggtggacggacgctgtggccgcatggaaccttgagaacccagggacgagccagtgccgggaaggaactgccgggactcaccgagctgcacttaactgttctctttctggctattttttgttgtttgtttctttgtgttgactttgtccctggcaaaattttccactctgagtaaaacaagtctcctaagtattgtgtatgtttaaaacgacagaaccatttctacttcatttggaaaaagattcagtcttttatcacaggcccttttgaaactcagatcccaggtctctccgtggtatgtttgtatttggggtgtccctccggctctaggcggcctctgacccgctgtctactccccaccttcggtgagcggccgccatggtggagcagggtccgagccacgtcctgcagggcacgtctggggcatttcctgttttgtggtaggaaatgtccctgacctttcagaaccgaacccaatcctgaggctgactcctctacggaaaatgaggacaggacgggggtgagggaatgagagtgggaggtccctgcacctcctcgcccggctcctcaggaagaaaaccgctggc

SEQ ID NO: 421774 - DNA, 1861 bp, Homo sapiens
acaacacacgccacaatgacaacaagcttagtaactatgacagcgtacgattagcaggctgtacggtcggactccggttatgacaagctgtggtcaccccggcagccgtgctggcccctcctaaggcagaggcccaggagaatggagaccacagggaagtcaaagtgaaagtagagcctattcccgccattggccacgccacgctcggcactgccagccggatcattcagacggcacagaccaccccggtccagacggtgaccatagtacaacaggcacctctaggtcaacaccagctaccaataaaaactgtaacacaaaacggcactcacgtggcatcagtccccactgcggtccacggccaggtgaacaatgccgcggcgagtcctttgcacatgttggcaacacacgcatccgcatcggcctccctgcccacaaagcgccacaacggtgaccagccggagcagccggagctgaagcggatcaagacagaagacggcgagggcatcgtcattgccctgagcgtggacacgccaccggcagccgtaagggaaaagggtgtccagaactagcgaccgggagagcttttctttaacgatatcaactctgtggtgccaaaaggagacgcggcctcccgccagcactcgggggtgcagggccctgtggttggacttcacctctcagcactgaaaacccaaaacccagctggccttaacactccttaaagacagaagtcacacttgaacaaaacccacacacaacaaaacctgatttgggagacggtgtctccactgagcacctgctgggctgagcttctacctacgagtgaaactctgtcctcccgcgaggaccaggcatcgctgtgtgaggacggcacggccagcgcctgctgtgagtgggtctcccaagactaggcctcaggacgcggggggagccatccccgccgccctcacaggacccaccaggcagcggagacatgtggaattagagtattttgaggtgtcctttctttacaaaataatggggtcttgggcatttcacatcactccatttctactgagactttcagaatcacacaggccctttccgtggatttcatttggggcaaagaaacaacgtagttttgtttttgttttcagcctatggaatgatttccttttgtctgtcttgttcaagttcagacgaagctactctggcatctgcacatttccgtgttacagcagctgcctgatgaattttatccacctccatttcagcatgtggctcgcgtggacaggtggacggacgctgtggccgcatggaaccttgagaacccagggacgagccagtgccgggaaggaactgccgggactcaccgagctgcacttaactgttctctttctggctattttttgttgtttgtttctttgtgttgactttgtccctggcaaaattttccactctgagtaaaacaagtctcctaagtattgtgtatgtttaaaacgacagaaccatttctacttcatttggaaaaagattcagtcttttatcacaggcccttttgaaactcagatcccaggtctctccgtggtatgtttgtatttggggtgtccctccggctctaggcggcctctgacccgctgtctactccccaccttcggtgagcggccgccatggtggagcagggtccgagccacgtcctgcagggcacgtctggggcatttcctgttttgtggtaggaaatgtccctgacctttcagaaccgaacccaatcctgaggctgactcctctacggaaaatgaggacaggacgggggtgagggaatgagagtgggaggtccctgcacctcctcgcccggctcctcaggaagaaaaccgctggc

SEQ ID NO: 421775 - DNA, 2205 bp, Homo sapiens
tagagatggggtcttaccgtgctgctcaggctggtctcaaactcctaggttcaagtgattctctcgcctctgcctccccaaatgctgggactacaggtgtgagccaccgcgcccagccttctccttgtgtttgaactggagaggacagagtgctatacatgtggtcacggtttttcttcgttgaaagctctaacagtggggtcggtccctgttattaagcctgtgtcactattccctgggccctaaaagtgcacctggctcctgtgacttggggtcctttcccactcctctccccagggccccttggcctcagaaggcccccatgtgccagctcagactggagttgcctcagttgacacagcaggccccatccagacagaccagcaggtgcttctggagacaagagcaaagccttttccggcagcccggaacctgggatgagaaacgacaggtggaaggttgtccagagacacctacagcgtggatgctgttccgagtcagcgtaggagaaaggccactggaaaccagagtcacactgcgcgtctgtgcatctctggcctaccgcagtggccccggctgtctgcacattttttgtagacacattagagtcggttgaggccacacctgcggccacacctgcggccacagactgcgaccgcgattgcagggaggagcatctgaggtggtcacggggtttgcccagctcacaccaactgcagccgcggcgagtcctttgcacatgttggcaacacacgcatccgcatcggcctccctgcccacaaagcgccacaacggtgaccagccggagcagccggagctgaagcggatcaagacagaagacggcgagggcatcgtcattgccctgagcgtggacacgccaccggcagccgtaagggaaaagggtgtccagaactagcgaccgggagagcttttctttaacgatatcaactctgtggtgccaaaaggagacgcggcctcccgccagcactcgggggtgcagggccctgtggttggacttcacctctcagcactgaaaacccaaaacccagctggccttaacactccttaaagacagaagtcacacttgaacaaaacccacacacaacaaaacctgatttgggagacggtgtctccactgagcacctgctgggctgagcttctacctacgagtgaaactctgtcctcccgcgaggaccaggcatcgctgtgtgaggacggcacggccagcgcctgctgtgagtgggtctcccaagactaggcctcaggacgcggggggagccatccccgccgccctcacaggacccaccaggcagcggagacatgtggaattagagtattttgaggtgtcctttctttacaaaataatggggtcttgggcatttcacatcactccatttctactgagactttcagaatcacacaggccctttccgtggatttcatttggggcaaagaaacaacgtagttttgtttttgttttcagcctatggaatgatttccttttgtctgtcttgttcaagttcagacgaagctactctggcatctgcacatttccgtgttacagcagctgcctgatgaattttatccacctccatttcagcatgtggctcgcgtggacaggtggacggacgctgtggccgcatggaaccttgagaacccagggacgagccagtgccgggaaggaactgccgggactcaccgagctgcacttaactgttctctttctggctattttttgttgtttgtttctttgtgttgactttgtccctggcaaaattttccactctgagtaaaacaagtctcctaagtattgtgtatgtttaaaacgacagaaccatttctacttcatttggaaaaagattcagtcttttatcacaggcccttttgaaactcagatcccaggtctctccgtggtatgtttgtatttggggtgtccctccggctctaggcggcctctgacccgctgtctactccccaccttcggtgagcggccgccatggtggagcagggtccgagccacgtcctgcagggcacgtctggggcatttcctgttttgtggtaggaaatgtccctgacctttcagaaccgaacccaatcctgaggctgactcctctacggaaaatgaggacaggacgggggtgagggaatgagagtgggaggtccctgcacctcctcgcccggctcctcaggaagaaaaccgctggc

SEQ ID NO: 421776 - DNA, 2905 bp, Homo sapiens
gccccccccccacgcctcctcccctcctcccgcccgcgcgtgctcccgcccctcgccgccgctcgctcgctcgccggccggcctccgctcggccccctccctcagctccggtgcgcggcggccgacgacccgcggcctgggcctcggcgcgccaccggcgcccgcgcggagcggcccgggggccctcacgcaggcccatggcggcggcgcggcgcgctctcgggccgggcaccacgcgggcggcggggccgggggcggcggggccgggggcggcgggtccccgccgggcggctgggccgtggcgcgcctggagggccgcgagttcgagtatctgatgaagaagcgctcggtgaccatcggccgcaactcgtcgcagggctcggtggacgtgagcatgggccactcgagcttcatctcccggcgccacctcgagatcttcacgcccccgggcggcggcggccatggcggggccgctccggagctgccgcccgcgcagcccaggcccgacgccggcggcgacttctacctgcgctgcttgggcaagaacggggtattcgtggacggcgtgttccagaggcgcggggcgccgccgctgcagctgccgcgcgtgtgcacattcaggttcccgagcacaaacatcaagataacgttcactgccctgtccagcgagaagagagagaagcaggaggcgtctgagtctccagtgaaggccgtacagccacacatctcgcccctgaccatcaacattccagacaccatggcccacctcatcagccctctgccctcccccacgggaaccatcagcgctgcaaactcctgcccctccagcccccggggagcggggtcttcagggtacaaggtgggccgagtgatgccatctgacctcaatttaatggctgacaactcacagcctgaaaatgaaaaggaagcttcaggtggagacagcccgaaggatgattcaaagccgccttactcctacgcgcagctgatagttcaggcgattacgatggctcccgacaaacagctcaccctgaacgggatttatacacacatcactaaaaattatccctactacaggactgcggacaagggctggcagaattcaattcgccacaatctctctctgaatcgttatttcatcaaagtgccgcgttcccaggaagaaccaggcaaaggctcgttctggaggatagacccagcctctgaaagcaaattaatagaacaggcttttaggaaacgacggcctaggggcgtgccctgctttagaacccctctgggaccgctctcttctaggagtgccccagcctctcccaatcacgcgggagtgctgtctgctcactctagtggcgcccagacccctgagagcctgtcgagggaaggttcgccggcccccctggagcctgagcctggcgctgcacagcccaaactcgctgtcatccaggaagcccggtttgcccagagcgccccagggtcacctctgtccagtcagccagtcttaatcaccgtccagcggcagctaccacaggccatcaagcctgtcacctacactgtggccaccccagtgaccacctcgacctcccagccacccgtcgtgcagacggttcacgtcgtccaccagatcccagcggtgtcggtcaccagtgtggccggactggccccagcgaacacgtacactgtctctggacaagctgtggtcaccccggcagccgtgctggcccctcctaaggcagaggcccaggagaatggagaccacagggaagtcaaagtgaaagtagagcctattcccgccattggccacgccacgctcggcactgccagccggatcattcagacggcacagaccaccccggtccagacggtgaccatagtacaacaggcacctctaggtcaacaccagctaccaataaaaactgtaacacaaaacggcactcacgtggcatcagtccccactgcggtccacggccaggtgaacaatgccgcggcgagtcctttgcacatgttggcaacacacgcatccgcatcggcctccctgcccacaaagcgccacaacggtgaccagccggagcagccggagctgaagcggatcaagacagaagacggcgagggcatcgtcattgccctgagcgtggacacgccaccggcagccgtaagggaaaagggtgtccagaactagcgaccgggagagcttttctttaacgatatcaactctgtggtgccaaaaggagacgcggcctcccgccagcactcgggggtgcagggccctgtggttggacttcacctctcagcactgaaaacccaaaacccagctggccttaacactccttaaagacagaagtcacacttgaacaaaacccacacacaacaaaacctgatttgggagacggtgtctccactgagcacctgctgggctgagcttctacctacgagtgaaactctgtcctcccgcgaggaccaggcatcgctgtgtgaggacggcacggccagcgcctgctgtgagtgggtctcccaagactaggcctcaggacgcggggggagccatccccgccgccctcacaggacccaccaggcagcggagacatgtggaattagagtattttgaggtgtcctttctttacaaaataatggggtcttgggcatttcacatcactccatttctactgagactttcagaatcacacaggccctttccgtggatttcatttggggcaaagaaacaacgtagttttgtttttgttttcagcctatggaatgatttccttttgtctgtcttgttcaagttcagacgaagctactctggcatctgcacatttccgtgttacagcagctgcctgatgaattttatccacctccatttcagcatgtggctcgcgtggactagagtgtccgtgtatactcaagaatcagc

SEQ ID NO: 421777 - DNA, 2293 bp, Homo sapiens
gccccccccccacgcctcctcccctcctcccgcccgcgcgtgctcccgcccctcgccgccgctcgctcgctcgccggccggcctccgctcggccccctccctcagctccggtgcgcggcggccgacgacccgcggcctgggcctcggcgcgccaccggcgcccgcgcggagcggcccgggggccctcacgcaggcccatggcggcggcgcggcgcgctctcgggccgggcaccacgcgggcggcggggccgggggcggcggggccgggggcggcgggtccccgccgggcggctgggccgtggcgcgcctggagggccgcgagttcgagtatctgatgaagaagcgctcggtgaccatcggccgcaactcgtcgcagggctcggtggacgtgagcatgggccactcgagcttcatctcccggcgccacctcgagatcttcacgcccccgggcggcggcggccatggcggggccgctccggagctgccgcccgcgcagcccaggcccgacgccggcggcgacttctacctgcgctgcttgggcaagaacggggtattcgtggacggcgtgttccagaggcgcggggcgccgccgctgcagctgccgcgcgtgtgcacattcaggttcccgagcacaaacatcaagataacgttcactgccctgtccagcgagaagagagagaagcaggaggcgtctgagtctccagtgaaggccgtacagccacacatctcgcccctgaccatcaacattccagacaccatggcccacctcatcagccctctgccctcccccacgggaaccatcagcgctgcaaactcctgcccctccagcccccggggagcggggtcttcagggtacaaggtgggccgagtgatgccatctgacctcaatttaatggctgacaactcacagcctgaaaatgaaaaggaagcttcaggtggagacagcccgaaggatgattcaaagccgccttactcctacgcgcagctgatagttcaggcgattacgatggctcccgacaaacagctcaccctgaacgggatttatacacacatcactaaaaattatccctactacaggactgcggacaagggctggcagaattcaattcgccacaatctctctctgaatcgttatttcatcaaagtgccgcgttcccaggaagaaccaggcaaaggctcgttctggaggatagacccagcctctgaaagcaaattaatagaacaggcttttaggaaacgacggcctaggggcgtgccctgctttagaacccctctgggaccgctctcttctaggagtgccccagcctctcccaatcacgcgggagtgctgtctgctcactctagtggcgcccagacccctgagagcctgtcgagggaaggttcgccggcccccctggagcctgagcctggcgctgcacagcccaaactcgctgtcatccaggaagcccggtttgcccagagcgccccagggtcacctctgtccagtcagccagtcttaatcaccgtccagcggcagctaccacaggccatcaagcctgtcacctacactgtggccaccccagtgaccacctcgacctcccagccacccgtcgtgcagacggttcacgtcgtccaccagatcccagcggtgtcggtcaccagtgtggccggactggccccagcgaacacgtacactgtctctggacaagctgtggtcaccccggcagccgtgctggcccctcctaaggcagaggcccaggagaatggagaccacagggaagtcaaagtgaaagtagagcctattcccgccattggccacgccacgctcggcactgccagccggatcattcagacggcacagaccaccccggtccagacggtgaccatagtacaacaggcacctctaggtcaacaccagctaccaataaaaactgtaacacaaaacggcactcacgtggcatcagtccccactgcggtccacggccaggtgaacaatggtaagacgtgctggtcggtggctccccgtggctgtgggtactgggagcagagccccttctcactcgtggtttcggttctgactgtaacaattttagcttttgtctgaggcaatgtttgcatttcgaagctgcaggaaatctagtcatgctggggaagtggtcgtggagtcggccgtcacgggattcccgtgggaggacctgcctgaaaagagatgagagtttctaatacattgagagggaaaaatactctcgcctcttgtagatttcctgggtgtggcctggaagcgccggttgccggatgaccgggttactctaga

SEQ ID NO: 421778 - DNA, 2155 bp, Homo sapiens
gccccccccccacgcctcctcccctcctcccgcccgcgcgtgctcccgcccctcgccgccgctcgctcgctcgccggccggcctccgctcggccccctccctcagctccggtgcgcggcggccgacgacccgcggcctgggcctcggcgcgccaccggcgcccgcgcggagcggcccgggggccctcacgcaggcccatggcggcggcgcggcgcgctctcgggccgggcaccacgcgggcggcggggccgggggcggcggggccgggggcggcgggtccccgccgggcggctgggccgtggcgcgcctggagggccgcgagttcgagtatctgatgaagaagcgctcggtgaccatcggccgcaactcgtcgcagggctcggtggacgtgagcatgggccactcgagcttcatctcccggcgccacctcgagatcttcacgcccccgggcggcggcggccatggcggggccgctccggagctgccgcccgcgcagcccaggcccgacgccggcggcgacttctacctgcgctgcttgggcaagaacggggtattcgtggacggcgtgttccagaggcgcggggcgccgccgctgcagctgccgcgcgtgtgcacattcaggttcccgagcacaaacatcaagataacgttcactgccctgtccagcgagaagagagagaagcaggaggcgtctgagtctccagtgaaggccgtacagccacacatctcgcccctgaccatcaacattccagacaccatggcccacctcatcagccctctgccctcccccacgggaaccatcagcgctgcaaactcctgcccctccagcccccggggagcggggtcttcagggtacaaggtgggccgagtgatgccatctgacctcaatttaatggctgacaactcacagcctgaaaatgaaaaggaagcttcaggtggagacagcccgaaggatgattcaaagccgccttactcctacgcgcagctgatagttcaggcgattacgatggctcccgacaaacagctcaccctgaacgggatttatacacacatcactaaaaattatccctactacaggactgcggacaagggctggcagaattcaattcgccacaatctctctctgaatcgttatttcatcaaagtgccgcgttcccaggaagaaccaggcaaaggctcgttctggaggatagacccagcctctgaaagcaaattaatagaacaggcttttaggaaacgacggcctaggggcgtgccctgctttagaacccctctgggaccgctctcttctaggagtgccccagcctctcccaatcacgcgggagtgctgtctgctcactctagtggcgcccagacccctgagagcctgtcgagggaaggttcgccggcccccctggagcctgagcctggcgctgcacagcccaaactcgctgtcatccaggaagcccggtttgcccagagcgccccagggtcacctctgtccagtcagccagtcttaatcaccgtccagcggcagctaccacaggccatcaagcctgtcacctacactgtggccaccccagtgaccacctcgacctcccagccacccgtcgtgcagacggttcacgtcgtccaccagatcccagcggtgtcggtcaccagtgtggccggactggccccagcgaacacgtacactgtctctggacaagctgtggtcaccccggcagccgtgctggcccctcctaaggcagaggcccaggagaatggagaccacagggaagtcaaagtgaaagtagagcctattcccgccattggccacgccacgctcggcactgccagccggatcattcagacggcacagaccaccccggtccagacggtgaccatagtacaacaggcacctctaggtcaacaccagctaccaataaaaactgtaacacaaaacggcactcacgtggcatcagtccccactgcggtccacggccaggtgaacaatggtaagacgtgctggtcggtggctccccgtggctgtgggtactgggagcagagccccttctcactcgtggtttcggttctgactgtaacaattttagcttttgtctgaggcaatgtttgcatttcgaagctgcaggaaatctagtcttacggtttcaagtgtcgtaatcctctagagcac

SEQ ID NO: 421779 - DNA, 2790 bp, Homo sapiens
gccccccccccacgcctcctcccctcctcccgcccgcgcgtgctcccgcccctcgccgccgctcgctcgctcgccggccggcctccgctcggccccctccctcagctccggtgcgcggcggccgacgacccgcggcctgggcctcggcgcgccaccggcgcccgcgcggagcggcccgggggccctcacgcaggcccatggcggcggcgcggcgcgctctcgggccgggcaccacgcgggcggcggggccgggggcggcggggccgggggcggcgggtccccgccgggcggctgggccgtggcgcgcctggagggccgcgagttcgagtatctgatgaagaagcgctcggtgaccatcggccgcaactcgtcgcagggctcggtggacgtgagcatgggccactcgagcttcatctcccggcgccacctcgagatcttcacgcccccgggcggcggcggccatggcggggccgctccggagctgccgcccgcgcagcccaggcccgacgccggcggcgacttctacctgcgctgcttgggcaagaacggggtattcgtggacggcgtgttccagaggcgcggggcgccgccgctgcagctgccgcgcgtgtgcacattcaggttcccgagcacaaacatcaagataacgttcactgccctgtccagcgagaagagagagaagcaggaggcgtctgagtctccagtgaaggccgtacagccacacatctcgcccctgaccatcaacattccagacaccatggcccacctcatcagccctctgccctcccccacgggaaccatcagcgctgcaaactcctgcccctccagcccccggggagcggggtcttcagggtacaaggtgggccgagtgatgccatctgacctcaatttaatggctgacaactcacagcctgaaaatgaaaaggaagcttcaggtggagacagcccgaaggatgattcaaagccgccttactcctacgcgcagctgatagttcaggcgattacgatggctcccgacaaacagctcaccctgaacgggatttatacacacatcactaaaaattatccctactacaggactgcggacaagggctggcagaattcaattcgccacaatctctctctgaatcgttatttcatcaaagtgccgcgttcccaggaagaaccaggcaaaggctcgttctggaggatagacccagcctctgaaagcaaattaatagaacaggcttttaggaaacgacggcctaggggcgtgccctgctttagaacccctctgggaccgctctcttctaggagtgccccagcctctcccaatcacgcgggagtgctgtctgctcactctagtggcgcccagacccctgagagcctgtcgagggaaggttcgccggcccccctggagcctgagcctggcgctgcacagcccaaactcgctgtcatccaggaagcccggtttgcccagagcgccccagggtcacctctgtccagtcagccagtcttaatcaccgtccagcggcagctaccacaggccatcaagcctgtcacctacactgtggccaccccagtgaccacctcgacctcccagccacccgtcgtgcagacggttcacgtcgtccaccagatcccagcggtgtcggtcaccagtgtggccggactggccccagcgaacacgtacactgtctctggacaagctgtggtcaccccggcagccgtgctggcccctcctaaggcagaggcccaggagaatggagaccacagggaagtcaaagtgaaagtagagcctattcccgccattggccacgccacgctcggcactgccagccggatcattcagacggcacagaccaccccggtccagacggtgaccatagtacaacaggcacctctaggtcaacaccagctaccaataaaaactgtaacacaaaacggcactcacgtggcatcagtccccactgcggtccacggccaggtgaacaatgggccccttggcctcagaaggcccccatgtgccagctcagactggagttgcctcagttgacacagcaggccccatccagacagaccagcaggtgcttctggagacaagagcaaagccttttccggcagcccggaacctgggatgagaaacgacaggtggaaggttgtccagagacacctacagcgtggatgctgttccgagtcagcgtaggagaaaggccactggaaaccagagtcacactgcgcgtctgtgcatctctggcctaccgcagtggccccggctgtctgcacattttttgtagacacattagagtcggttgaggccacacctgcggccacacctgcggccacagactgcgaccgcgattgcagggaggagcatctgaggtggtcacggggtttgcccagctcacaccaactgcaggtcagttcctgcttcgccttcagtagcctgagtcccttcttctttttctttcacgttactagggcagttgttcgctgacgccttaattctggaacacgttccttgcccagattcttggtggctgcttgttcccttctcatcgttcctgctgtgttttccatgcttggtgtagggggaccctcagagcttggtgtagggggagcctcagagcttggtgtagggggagcctcagagcttggtgtagggggagcctcagaggtggcgtcaggacgtgcctgccccaccggttgccctggtgccctcgtcacgccccgggaccgcgcacacgtggggactgtttccagacgcactttctgccctggtgccctcatcacgccccgggaccgcgcaca

SEQ ID NO: 421780 - DNA, 787 bp, Homo sapiens
tgtaggtttctgctttttagggcactaaaacgaggacacatttttatttctcagcaaataaatatatgaattctacgtatttttttatgtttcatagaattcaattcgccacaatctctctctgaatcgttatttcatcaaagtgccgcgttcccaggaagaaccaggcaaaggctcgttctggaggatagacccagcctgtggcatcagtccccactgcggtccacggccaggtgaacaatggtaagacgtgctggtcggtggctccccgtggctgtgggtactgggagcagagccccttctcactcgtggtttcggttctgactgtaacaattttagcttttgtctgaggcaatgtttgcatttcgaagctgcaggaaatctagtcatgctggggaagtggtcgtggagtcggccgtcacgggattcccgtgggaggacctgcctgaaaagagatgagagtttctaatacattgagagggaaaaatactctcgcctcttgtagatttcctgggtgtggcctggaagcggcctgaaacggcgggagccgccgcgtgtcttttcccttggcctcgcgcgccctgtggcctgtggcggtgctatgctgctgagggtgggagagaggctgcttttctgtgcgctttgctctcagagtccgtccgaggccggtgcacagaaaaccgcacggatgttctgacattgacaagtggagacaccagaacctccgcgccgacaccgggttatctaccttcgccctgccctgtggagtgtggaaagggtgggagtc

SEQ ID NO: 421781 - DNA, 627 bp, Homo sapiens
atgattcaaagccgccttactcctacgcgcagctgatagttcaggcgattacgatggctcccgacaaacagctcaccctgaacgggatttatacacacatcactaaaaattatccctactacaggactgcggacaagggctggcaggtaaatgccttcagtttgttgttaaatagaggctgatggataccgagaagaaagtggagcggctgctgtctggaacacaggcacaggataggaaggtagaagggggggttggagcctcccgtgctgagaggaagaggagttgggggccggtgctgccatgctctgcctcaccttctttgtgtggagcagaaggaagcgtggttctggaggagcgtctaggcctgcatgctttactgttgtggaaattcatgtgtctgcataggatttgtgaagtgtggattgtttgagatatttccctttgaccaatgcagttcatatttgaaatgtaggagaaatttaaaacccagcctatccttccctttggcattctcctgtcttcctcatctaatcctgctaatggacagaagttttgaagtttgcagagacagttttcaaaccgcattttaccaaggaacacttagaagacatcttaaccagttgg

SEQ ID NO: 421782 - DNA, 3083 bp, Homo sapiens
gccccccccccacgcctcctcccctcctcccgcccgcgcgtgctcccgcccctcgccgccgctcgctcgctcgccggccggcctccgctcggccccctccctcagctccggtgcgcggcggccgacgacccgcggcctgggcctcggcgcgccaccggcgcccgcgcggagcggcccgggggccctcacgcaggcccatggcggcggcgcggcgcgctctcgggccgggcaccacgcgggcggcggggccgggggcggcggggccgggggcggcgggtccccgccgggcggctgggccgtggcgcgcctggagggccgcgagttcgagtatctgatgaagaagcgctcggtgaccatcggccgcaactcgtcgcagggctcggtggacgtgagcatgggccactcgagcttcatctcccggcgccacctcgagatcttcacgcccccgggcggcggcggccatggcggggccgctccggagctgccgcccgcgcagcccaggcccgacgccggcggcgacttctacctgcgctgcttgggcaagaacggggtattcgtggacggcgtgttccagaggcgcggggcgccgccgctgcagctgccgcgcgtgtgcacattcaggttcccgagcacaaacatcaagataacgttcactgccctgtccagcgagaagagagagaagcaggaggcgtctgagtctccagtgaaggccgtacagccacacatctcgcccctgaccatcaacattccagacaccatggcccacctcatcagccctctgccctcccccacgggaaccatcagcgctgcaaactcctgcccctccagcccccggggagcggggtcttcagggtacaaggtgggccgagtgatgccatctgacctcaatttaatggctgacaactcacagcctgaaaatgaaaaggaagcttcaggtggagacagcccgaaggatgattcaaagccgccttactcctacgcgcagctgatagttcaggcgattacgatggctcccgacaaacagctcaccctgaacgggatttatacacacatcactaaaaattatccctactacaggactgcggacaagggctggcagaattcaattcgccacaatctctctctgaatcgttatttcatcaaagtgccgcgttcccaggaagaaccaggcaaaggctcgttctggaggatagacccagcctctgaaagcaaattaatagaacaggcttttaggaaacgacggcctaggggcgtgccctgctttagaacccctctgggaccgctctcttctaggagtgccccagcctctcccaatcacgcgggagtgctgtctgctcactctagtggcgcccagacccctgagagcctgtcgagggaaggttcgccggcccccctggagcctgagcctggcgctgcacagcccaaactcgctgtcatccaggaagcccggtttgcccagagcgccccagggtcacctctgtccagtcagccagtcttaatcaccgtccagcggcagctaccacaggccatcaagcctgtcacctacactgtggccaccccagtgaccacctcgacctcccagccacccgtcgtgcagacggttcacgtcgtccaccagatcccagcggtgtcggtcaccagtgtggccggactggccccagcgaacacgtacactgtctctggacaagctgtggtcaccccggcagccgtgctggcccctcctaaggcagaggcccaggagaatggagaccacagggaagtcaaagtgaaagtagagcctattcccgccattggccacgccacgctcggcactgccagccggatcattcagacggcacagaccaccccggtccagacggtgaccatagtacaacaggcacctctaggtcaacaccagctaccaataaaaactgtaacacaaaacggcactcacgtggcatcagtccccactgcggtccacggccaggtgaacaatgccgcggcgagtcctttgcacatgttggcaacacacgcatccgcatcggcctccctgcccacaaagcgccacaacggtgaccagccggagcagccggagctgaagcggatcaagacagaagacggcgagggcatcgtcattgccctgagcgtggacacgccaccggcagccgtaagggaaaagggtgtccagaactagcgaccgggagagcttttctttaacgatatcaactctgtggtgccaaaaggagacgcggcctcccgccagcactcgggggtgcagggccctgtggttggacttcacctctcagcactgaaaacccaaaacccagctggccttaacactccttaaagacagaagtcacacttgaacaaaacccacacacaacaaaacctgatttgggagacggtgtctccactgagcacctgctgggctgagcttctacctacgagtgaaactctgtcctcccgcgaggaccaggcatcgctgtgtgaggacggcacggccagcgcctgctgtgagtgggtctcccaagactaggcctcaggacgcggggggagccatccccgccgccctcacaggacccaccaggcagcggagacatgtggaattagagtattttgaggtgtcctttctttacaaaataatggggtcttgggcatttcacatcactccatttctactgagactttcagaatcacacaggccctttccgtggatttcatttggggcaaagaaacaacgtagttttgtttttgttttcagcctatggaatgatttccttttgtctgtcttgttcaagttcagacgaagctactctggcatctgcacatttccgtgttacagcagctgcctgatgaattttatccacctccatttcagcatgtggctcgcgtggacaggtggacggacgctgtggccgcatggaaccttgagaacccagggacgagccagtgccgggaaggaactgccgggactcaccgagctgcacttaactgttctctttctggctattttttgttgtttgtttctttgtgttgactttgtccctggcaaaattttccactctgagtaaaacaagtctcctaagtattgtgtatgtttaaaa

SEQ ID NO: 421783 - DNA, 3505 bp, Homo sapiens
gccccccccccacgcctcctcccctcctcccgcccgcgcgtgctcccgcccctcgccgccgctcgctcgctcgccggccggcctccgctcggccccctccctcagctccggtgcgcggcggccgacgacccgcggcctgggcctcggcgcgccaccggcgcccgcgcggagcggcccgggggccctcacgcaggcccatggcggcggcgcggcgcgctctcgggccgggcaccacgcgggcggcggggccgggggcggcggggccgggggcggcgggtccccgccgggcggctgggccgtggcgcgcctggagggccgcgagttcgagtatctgatgaagaagcgctcggtgaccatcggccgcaactcgtcgcagggctcggtggacgtgagcatgggccactcgagcttcatctcccggcgccacctcgagatcttcacgcccccgggcggcggcggccatggcggggccgctccggagctgccgcccgcgcagcccaggcccgacgccggcggcgacttctacctgcgctgcttgggcaagaacggggtattcgtggacggcgtgttccagaggcgcggggcgccgccgctgcagctgccgcgcgtgtgcacattcaggttcccgagcacaaacatcaagataacgttcactgccctgtccagcgagaagagagagaagcaggaggcgtctgagtctccagtgaaggccgtacagccacacatctcgcccctgaccatcaacattccagacaccatggcccacctcatcagccctctgccctcccccacgggaaccatcagcgctgcaaactcctgcccctccagcccccggggagcggggtcttcagggtacaaggtgggccgagtgatgccatctgacctcaatttaatggctgacaactcacagcctgaaaatgaaaaggaagcttcaggtggagacagcccgaaggatgattcaaagccgccttactcctacgcgcagctgatagttcaggcgattacgatggctcccgacaaacagctcaccctgaacgggatttatacacacatcactaaaaattatccctactacaggactgcggacaagggctggcagaattcaattcgccacaatctctctctgaatcgttatttcatcaaagtgccgcgttcccaggaagaaccaggcaaaggctcgttctggaggatagacccagcctctgaaagcaaattaatagaacaggcttttaggaaacgacggcctaggggcgtgccctgctttagaacccctctgggaccgctctcttctaggagtgccccagcctctcccaatcacgcgggagtgctgtctgctcactctagtggcgcccagacccctgagagcctgtcgagggaaggttcgccggcccccctggagcctgagcctggcgctgcacagcccaaactcgctgtcatccaggaagcccggtttgcccagagcgccccagggtcacctctgtccagtcagccagtcttaatcaccgtccagcggcagctaccacaggccatcaagcctgtcacctacactgtggccaccccagtgaccacctcgacctcccagccacccgtcgtgcagacggttcacgtcgtccaccagatcccagcggtgtcggtcaccagtgtggccggactggccccagcgaacacgtacactgtctctggacaagctgtggtcaccccggcagccgtgctggcccctcctaaggcagaggcccaggagaatggagaccacagggaagtcaaagtgaaagtagagcctattcccgccattggccacgccacgctcggcactgccagccggatcattcagacggcacagaccaccccggtccagacggtgaccatagtacaacaggcacctctaggtcaacaccagctaccaataaaaactgtaacacaaaacggcactcacgtggcatcagtccccactgcggtccacggccaggtgaacaatgggccccttggcctcagaaggcccccatgtgccagctcagactggagttgcctcagttgacacagcaggccccatccagacagaccagcaggtgcttctggagacaagagcaaagccttttccggcagcccggaacctgggatgagaaacgacaggtggaaggttgtccagagacacctacagcgtggatgctgttccgagtcagcgtaggagaaaggccactggaaaccagagtcacactgcgcgtctgtgcatctctggcctaccgcagtggccccggctgtctgcacattttttgtagacacattagagtcggttgaggccacacctgcggccacacctgcggccacagactgcgaccgcgattgcagggaggagcatctgaggtggtcacggggtttgcccagctcacaccaactgcagccgcggcgagtcctttgcacatgttggcaacacacgcatccgcatcggcctccctgcccacaaagcgccacaacggtgaccagccggagcagccggagctgaagcggatcaagacagaagacggcgagggcatcgtcattgccctgagcgtggacacgccaccggcagccgtaagggaaaagggtgtccagaactagcgaccgggagagcttttctttaacgatatcaactctgtggtgccaaaaggagacgcggcctcccgccagcactcgggggtgcagggccctgtggttggacttcacctctcagcactgaaaacccaaaacccagctggccttaacactccttaaagacagaagtcacacttgaacaaaacccacacacaacaaaacctgatttgggagacggtgtctccactgagcacctgctgggctgagcttctacctacgagtgaaactctgtcctcccgcgaggaccaggcatcgctgtgtgaggacggcacggccagcgcctgctgtgagtgggtctcccaagactaggcctcaggacgcggggggagccatccccgccgccctcacaggacccaccaggcagcggagacatgtggaattagagtattttgaggtgtcctttctttacaaaataatggggtcttgggcatttcacatcactccatttctactgagactttcagaatcacacaggccctttccgtggatttcatttggggcaaagaaacaacgtagttttgtttttgttttcagcctatggaatgatttccttttgtctgtcttgttcaagttcagacgaagctactctggcatctgcacatttccgtgttacagcagctgcctgatgaattttatccacctccatttcagcatgtggctcgcgtggacaggtggacggacgctgtggccgcatggaaccttgagaacccagggacgagccagtgccgggaaggaactgccgggactcaccgagctgcacttaactgttctctttctggctattttttgttgtttgtttctttgtgttgactttgtccctggcaaaattttccactctgagtaaaacaagtctcctaagtattgtgtatgtttaaaa

SEQ ID NO: 421784 - DNA, 1081 bp, Homo sapiens
gccccccccccacgcctcctcccctcctcccgcccgcgcgtgctcccgcccctcgccgccgctcgctcgctcgccggccggcctccgctcggccccctccctcagctccggtgcgcggcggccgacgacccgcggcctgggcctcggcgcgccaccggcgcccgcgcggagcggcccgggggccctcacgcaggcccatggcggcggcgcggcgcgctctcgggccgggcaccacgcgggcggcggggccgggggcggcggggccgggggcggcgggtccccgccgggcggctgggccgtggcgcgcctggagggccgcgagttcgagtatctgatgaagaagcgctcggtgaccatcggccgcaactcgtcgcagggctcggtggacgtgagcatgggccactcgagcttcatctcccggcgccacctcgagatcttcacgcccccgggcggcggcggccatggcggggccgctccggagctgccgcccgcgcagcccaggcccgacgccggcggcgacttctacctgcgctgcttgggcaagaacggggtattcgtggacggcgtgttccagaggcgcggggcgccgccgctgcagctgccgcgcgtgtgcacattcaggttcccgagcacaaacatcaagataacgttcactgccctgtccagcgagaagagagagaagcaggaggcgtctgagtctccagtgaaggccgtacagccacacatctcgcccctgaccatcaacattccagacaccatggcccacctcatcagccctctgccctcccccacgggaaccatcaggatgattcaaagccgccttactcctacgcgcagctgatagttcaggcgattacgatggctcccgacaaacagctcaccctgaacgggatttatacacacatcactaaaaattatccctactacaggactgcggacaagggctggcaggtaaatgccttcagtttgttgttaaatagaggctgatggataccgagaagaaagtggagcggctgctgtctggaacacaggcacaggataggaaggtagaagggggggttggagcctcccgtgctgagag

SEQ ID NO: 421785 - DNA, 3314 bp, Homo sapiens
gccccccccccacgcctcctcccctcctcccgcccgcgcgtgctcccgcccctcgccgccgctcgctcgctcgccggccggcctccgctcggccccctccctcagctccggtgcgcggcggccgacgacccgcggcctgggcctcggcgcgccaccggcgcccgcgcggagcggcccgggggccctcacgcaggcccatggcggcggcgcggcgcgctctcgggccgggcaccacgcgggcggcggggccgggggcggcggggccgggggcggcgggtccccgccgggcggctgggccgtggcgcgcctggagggccgcgagttcgagtatctgatgaagaagcgctcggtgaccatcggccgcaactcgtcgcagggctcggtggacgtgagcatgggccactcgagcttcatctcccggcgccacctcgagatcttcacgcccccgggcggcggcggccatggcggggccgctccggagctgccgcccgcgcagcccaggcccgacgccggcggcgacttctacctgcgctgcttgggcaagaacggggtattcgtggacggcgtgttccagaggcgcggggcgccgccgctgcagctgccgcgcgtgtgcacattcaggttcccgagcacaaacatcaagataacgttcactgccctgtccagcgagaagagagagaagcaggaggcgtctgagtctccagtgaaggccgtacagccacacatctcgcccctgaccatcaacattccagacaccatggcccacctcatcagccctctgccctcccccacgggaaccatcaggatgattcaaagccgccttactcctacgcgcagctgatagttcaggcgattacgatggctcccgacaaacagctcaccctgaacgggatttatacacacatcactaaaaattatccctactacaggactgcggacaagggctggcagaattcaattcgccacaatctctctctgaatcgttatttcatcaaagtgccgcgttcccaggaagaaccaggcaaaggctcgttctggaggatagacccagcctctgaaagcaaattaatagaacaggcttttaggaaacgacggcctaggggcgtgccctgctttagaacccctctgggaccgctctcttctaggagtgccccagcctctcccaatcacgcgggagtgctgtctgctcactctagtggcgcccagacccctgagagcctgtcgagggaaggttcgccggcccccctggagcctgagcctggcgctgcacagcccaaactcgctgtcatccaggaagcccggtttgcccagagcgccccagggtcacctctgtccagtcagccagtcttaatcaccgtccagcggcagctaccacaggccatcaagcctgtcacctacactgtggccaccccagtgaccacctcgacctcccagccacccgtcgtgcagacggttcacgtcgtccaccagatcccagcggtgtcggtcaccagtgtggccggactggccccagcgaacacgtacactgtctctggacaagctgtggtcaccccggcagccgtgctggcccctcctaaggcagaggcccaggagaatggagaccacagggaagtcaaagtgaaagtagagcctattcccgccattggccacgccacgctcggcactgccagccggatcattcagacggcacagaccaccccggtccagacggtgaccatagtacaacaggcacctctaggtcaacaccagctaccaataaaaactgtaacacaaaacggcactcacgtggcatcagtccccactgcggtccacggccaggtgaacaatgccgcggcgagtcctttgcacatgttggcaacacacgcatccgcatcggcctccctgcccacaaagcgccacaacggtgaccagccggagcagccggagctgaagcggatcaagacagaagacggcgagggcatcgtcattgccctgagcgtggacacgccaccggcagccgtaagggaaaagggtgtccagaactagcgaccgggagagcttttctttaacgatatcaactctgtggtgccaaaaggagacgcggcctcccgccagcactcgggggtgcagggccctgtggttggacttcacctctcagcactgaaaacccaaaacccagctggccttaacactccttaaagacagaagtcacacttgaacaaaacccacacacaacaaaacctgatttgggagacggtgtctccactgagcacctgctgggctgagcttctacctacgagtgaaactctgtcctcccgcgaggaccaggcatcgctgtgtgaggacggcacggccagcgcctgctgtgagtgggtctcccaagactaggcctcaggacgcggggggagccatccccgccgccctcacaggacccaccaggcagcggagacatgtggaattagagtattttgaggtgtcctttctttacaaaataatggggtcttgggcatttcacatcactccatttctactgagactttcagaatcacacaggccctttccgtggatttcatttggggcaaagaaacaacgtagttttgtttttgttttcagcctatggaatgatttccttttgtctgtcttgttcaagttcagacgaagctactctggcatctgcacatttccgtgttacagcagctgcctgatgaattttatccacctccatttcagcatgtggctcgcgtggacaggtggacggacgctgtggccgcatggaaccttgagaacccagggacgagccagtgccgggaaggaactgccgggactcaccgagctgcacttaactgttctctttctggctattttttgttgtttgtttctttgtgttgactttgtccctggcaaaattttccactctgagtaaaacaagtctcctaagtattgtgtatgtttaaaacgacagaaccatttctacttcatttggaaaaagattcagtcttttatcacaggcccttttgaaactcagatcccaggtctctccgtggtatgtttgtatttggggtgtccctccggctctaggcggcctctgacccgctgtctactccccaccttcggtgagcggccgccatggtggagcagggtccgagccacgtcctgcagggcacgtctggggcatttcctgttttgtggtaggaaatgtccctgacctttcagaaccgaacccaatcctgaggctgactcctctacggaaaatgaggacaggacgggggtgagggaatgagagtgggaggtccctgcacctcctcgcccggctcctcaggaagaaaaccgctggc

SEQ ID NO: 421786 - DNA, 2966 bp, Homo sapiens
actccacagctgcgctcagctcagagccagcttcgtgtgcagagcccagcagagatggcggagccacttggcatccaagcaccttgccctgtttgtgtccacctggttctgccgtgcacattcaggttcccgagcacaaacatcaagataacgttcactgccctgtccagcgagaagagagagaagcaggaggcgtctgagtctccagtgaaggccgtacagccacacatctcgcccctgaccatcaacattccagacaccatggcccacctcatcagccctctgccctcccccacgggaaccatcagcgctgcaaactcctgcccctccagcccccggggagcggggtcttcagggtacaaggtgggccgagtgatgccatctgacctcaatttaatggctgacaactcacagcctgaaaatgaaaaggaagcttcaggtggagacagcccgaaggatgattcaaagccgccttactcctacgcgcagctgatagttcaggcgattacgatggctcccgacaaacagctcaccctgaacgggatttatacacacatcactaaaaattatccctactacaggactgcggacaagggctggcagaattcaattcgccacaatctctctctgaatcgttatttcatcaaagtgccgcgttcccaggaagaaccaggcaaaggctcgttctggaggatagacccagcctctgaaagcaaattaatagaacaggcttttaggaaacgacggcctaggggcgtgccctgctttagaacccctctgggaccgctctcttctaggagtgccccagcctctcccaatcacgcgggagtgctgtctgctcactctagtggcgcccagacccctgagagcctgtcgagggaaggttcgccggcccccctggagcctgagcctggcgctgcacagcccaaactcgctgtcatccaggaagcccggtttgcccagagcgccccagggtcacctctgtccagtcagccagtcttaatcaccgtccagcggcagctaccacaggccatcaagcctgtcacctacactgtggccaccccagtgaccacctcgacctcccagccacccgtcgtgcagacggttcacgtcgtccaccagatcccagcggtgtcggtcaccagtgtggccggactggccccagcgaacacgtacactgtctctggacaagctgtggtcaccccggcagccgtgctggcccctcctaaggcagaggcccaggagaatggagaccacagggaagtcaaagtgaaagtagagcctattcccgccattggccacgccacgctcggcactgccagccggatcattcagacggcacagaccaccccggtccagacggtgaccatagtacaacaggcacctctaggtcaacaccagctaccaataaaaactgtaacacaaaacggcactcacgtggcatcagtccccactgcggtccacggccaggtgaacaatgccgcggcgagtcctttgcacatgttggcaacacacgcatccgcatcggcctccctgcccacaaagcgccacaacggtgaccagccggagcagccggagctgaagcggatcaagacagaagacggcgagggcatcgtcattgccctgagcgtggacacgccaccggcagccgtaagggaaaagggtgtccagaactagcgaccgggagagcttttctttaacgatatcaactctgtggtgccaaaaggagacgcggcctcccgccagcactcgggggtgcagggccctgtggttggacttcacctctcagcactgaaaacccaaaacccagctggccttaacactccttaaagacagaagtcacacttgaacaaaacccacacacaacaaaacctgatttgggagacggtgtctccactgagcacctgctgggctgagcttctacctacgagtgaaactctgtcctcccgcgaggaccaggcatcgctgtgtgaggacggcacggccagcgcctgctgtgagtgggtctcccaagactaggcctcaggacgcggggggagccatccccgccgccctcacaggacccaccaggcagcggagacatgtggaattagagtattttgaggtgtcctttctttacaaaataatggggtcttgggcatttcacatcactccatttctactgagactttcagaatcacacaggccctttccgtggatttcatttggggcaaagaaacaacgtagttttgtttttgttttcagcctatggaatgatttccttttgtctgtcttgttcaagttcagacgaagctactctggcatctgcacatttccgtgttacagcagctgcctgatgaattttatccacctccatttcagcatgtggctcgcgtggacaggtggacggacgctgtggccgcatggaaccttgagaacccagggacgagccagtgccgggaaggaactgccgggactcaccgagctgcacttaactgttctctttctggctattttttgttgtttgtttctttgtgttgactttgtccctggcaaaattttccactctgagtaaaacaagtctcctaagtattgtgtatgtttaaaacgacagaaccatttctacttcatttggaaaaagattcagtcttttatcacaggcccttttgaaactcagatcccaggtctctccgtggtatgtttgtatttggggtgtccctccggctctaggcggcctctgacccgctgtctactccccaccttcggtgagcggccgccatggtggagcagggtccgagccacgtcctgcagggcacgtctggggcatttcctgttttgtggtaggaaatgtccctgacctttcagaaccgaacccaatcctgaggctgactcctctacggaaaatgaggacaggacgggggtgagggaatgagagtgggaggtccctgcacctcctcgcccggctcctcaggaagaaaaccgctggc

SEQ ID NO: 421787 - DNA, 3289 bp, Homo sapiens
  misc_feature (3087)..(3087): n is a, c, g, or t
  misc_feature (3191)..(3191): n is a, c, g, or t
gccccccccccacgcctcctcccctcctcccgcccgcgcgtgctcccgcccctcgccgccgctcgctcgctcgccggccggcctccgctcggccccctccctcagctccggtgcgcggcggccgacgacccgcggcctgggcctcggcgcgccaccggcgcccgcgcggagcggcccgggggccctcacgcaggcccatggcggcggcgcggcgcgctctcgggccgggcaccacgcgggcggcggggccgggggcggcggggccgggggcggcgggtccccgccgggcggctgggccgtggcgcgcctggagggccgcgagttcgagtatctgatgaagaagcgctcggtgaccatcggccgcaactcgtcgcagggctcggtggacgtgagcatgggccactcgagcttcatctcccggcgccacctcgagatcttcacgcccccgggcggcggcggccatggcggggccgctccggagctgccgcccgcgcagcccaggcccgacgccggcggcgacttctacctgcgctgcttgggcaagaacggggtattcgtggacggcgtgttccagaggcgcggggcgccgccgctgcagctgccgcgcgtgtgcacattcaggttcccgagcacaaacatcaagataacgttcactgccctgtccagcgagaagagagagaagcaggaggcgtctgagtctccagtgaaggccgtacagccacacatctcgcccctgaccatcaacattccagacaccatggcccacctcatcagccctctgccctcccccacgggaaccatcagcgctgcaaactcctgcccctccagcccccggggagcggggtcttcagggtacaaggtgggccgagtgatgccatctgacctcaatttaatggctgacaactcacagcctgaaaatgaaaaggaagcttcaggtggagacagcccgaaggatgattcaaagccgccttactcctacgcgcagctgatagttcaggcgattacgatggctcccgacaaacagctcaccctgaacgggatttatacacacatcactaaaaattatccctactacaggactgcggacaagggctggcagaattcaattcgccacaatctctctctgaatcgttatttcatcaaagtgccgcgttcccaggaagaaccaggcaaaggctcgttctggaggatagacccagcctctgaaagcaaattaatagaacaggcttttaggaaacgacggcctaggggcgtgccctgctttagaacccctctgggaccgctctcttctaggagtgccccagcctctcccaatcacgcgggagtgctgtctgctcactctagtggcgcccagacccctgagagcctgtcgagggaaggttcgccggcccccctggagcctgagcctggcgctgcacagcccaaactcgctgtcatccaggaagcccggtttgcccagagcgccccagggtcacctctgtccagtcagccagtcttaatcaccgtccagcggcagctaccacaggccatcaagcctgtcacctacactgtggccaccccagtgaccacctcgacctcccagccacccgtcgtgcagacggttcacgtcgtccaccagatcccagcggtgtcggtcaccagtgtggccggactggccccagcgaacacgtacactgtctctggacaagctgtggtcaccccggcagccgtgctggcccctcctaaggcagaggcccaggagaatggagaccacagggaagtcaaagtgaaagtagagcctattcccgccattggccacgccacgctcggcactgccagccggatcattcagacggcacagaccaccccggtccagacggtgaccatagtacaacaggcacctctaggtcaacaccagctaccaataaaaactgtaacacaaaacggcactcacgtggcatcagtccccactgcggtccacggccaggtgaacaatgccgcggcgagtcctttgcacatgttggcaacacacgcatccgcatcggcctccctgcccacaaagcgccacaacggtgaccagccggagcagccggagctgaagcggatcaagacagaagacggcgagggcatcgtcattgccctgagcgtggacacgccaccggcagccgtaagggaaaagggtgtccagaactagcgaccgggagagcttttctttaacgatatcaactctgtggtgccaaaaggagacgcggcctcccgccagcactcgggggtgcagggccctgtggttggacttcacctctcagcactgaaaacccaaaacccagctggccttaacactccttaaagacagaagtcacacttgaacaaaacccacacacaacaaaacctgatttgggagacggtgtctccactgagcacctgctgggctgagcttctacctacgagtgaaactctgtcctcccgcgaggaccaggcatcgctgtgtgaggacggcacggccagcgcctgctgtgagtgggtctcccaagactaggcctcaggacgcggggggagccatccccgccgccctcacaggacccaccaggcagcggagacatgtggaattagagtattttgaggtgtcctttctttacaaaataatggggtcttgggcatttcacatcactccatttctactgagactttcagaatcacacaggccctttccgtggatttcatttggggcaaagaaacaacgtagttttgtttttgttttcagcctatggaatgatttccttttgtctgtcttgttcaagttcagacgaagctactctggcatctgcacatttccgtgttacagcagctgcctgatgaattttatccacctccatttcagcatgtggctcgcgtggacaggtggacggacgctgtggccgcatggaaccttgagaacccagggacgagccagtgccgggaaggaactgccgggactcaccgagctgcacttaactgttctctttctggctattttttgttgtttgtttctttgtgttgactttgtccctggcaaaattttccactctgagtaaaacaagtctcctaagtattgtgtatgtttaaaatccnaaaaatagtatctggaggagaaagaaaatagaatgtcaatacatattttcttttgagaaatgttttatagaaactcttttatgataaaaggtctgctgtagatnaaaatgtagaattaggccaggtgcggtggctcatgcctgtcatcccagcactttgggaggccgagacgggcagatcatgaggtcaggagattgagaac

SEQ ID NO: 421788 - DNA, 2186 bp, Homo sapiens
gccccccccccacgcctcctcccctcctcccgcccgcgcgtgctcccgcccctcgccgccgctcgctcgctcgccggccggcctccgctcggccccctccctcagctccggtgcgcggcggccgacgacccgcggcctgggcctcggcgcgccaccggcgcccgcgcggagcggcccgggggccctcacgcaggcccatggcggcggcgcggcgcgctctcgggccgggcaccacgcgggcggcggggccgggggcggcggggccgggggcggcgggtccccgccgggcggctgggccgtggcgcgcctggagggccgcgagttcgagtatctgatgaagaagcgctcggtgaccatcggccgcaactcgtcgcagggctcggtggacgtgagcatgggccactcgagcttcatctcccggcgccacctcgagatcttcacgcccccgggcggcggcggccatggcggggccgctccggagctgccgcccgcgcagcccaggcccgacgccggcggcgacttctacctgcgctgcttgggcaagaacggggtattcgtggacggcgtgttccagaggcgcggggcgccgccgctgcagctgccgcgcgtgtgcacattcaggttcccgagcacaaacatcaagataacgttcactgccctgtccagcgagaagagagagaagcaggaggcgtctgagtctccagtgaaggccgtacagccacacatctcgcccctgaccatcaacattccagacaccatggcccacctcatcagccctctgccctcccccacgggaaccatcagcgctgcaaactcctgcccctccagcccccggggagcggggtcttcagggtacaaggtgggccgagtgatgccatctgacctcaatttaatggctgacaactcacagcctgaaaatgaaaaggaagcttcaggtggagacagcccgaaggatgattcaaagccgccttactcctacgcgcagctgatagttcaggcgattacgatggctcccgacaaacagctcaccctgaacgggatttatacacacatcactaaaaattatccctactacaggactgcggacaagggctggcagaattcaattcgccacaatctctctctgaatcgttatttcatcaaagtgccgcgttcccaggaagaaccaggcaaaggctcgttctggaggatagacccagcctctgaaagcaaattaatagaacaggcttttaggaaacgacggcctaggggcgtgccctgctttagaacccctctgggaccgctctcttctaggagtgccccagcctctcccaatcacgcgggagtgctgtctgctcactctagtggcgcccagacccctgagagcctgtcgagggaaggttcgccggcccccctggagcctgagcctggcgctgcacagcccaaactcgctgtcatccaggaagcccggtttgcccagagcgccccagggtcacctctgtccagtcagccagtcttaatcaccgtccagcggcagctaccacaggccatcaagcctgtcacctacactgtggccaccccagtgaccacctcgacctcccagccacccgtcgtgcagacggttcacgtcgtccaccagatcccagcggtgtcggtcaccagtgtggccggactggccccagcgaacacgtacactgtctctggacaagctgtggtcaccccggcagccgtgctggcccctcctaaggcagaggcccaggagaatggagaccacagggaagtcaaagtgaaagtagagcctattcccgccattggccacgccacgctcggcactgccagccggatcattcagacggcacagaccaccccggtccagacggtgaccatagtacaacaggcacctctaggtcaacaccagctaccaataaaaactgtaacacaaaacggcactcacgtggcatcagtccccactgcggtccacggccaggtgaacaatgccgcggcgagtcctttgcacatgttggcaacacacgcatccgcatcggcctccctgcccacaaagcgccacaacggtgaccagccggagcagccggagctgaagcggatcaagacagaagacggcgagggcatcgtcattgccctgagcgtggacacgccaccggcagccgtaaggggtccgctgtctgaagggatcctcaggggacagc

SEQ ID NO: 421789 - DNA, 2520 bp, Homo sapiens
gccccccccccacgcctcctcccctcctcccgcccgcgcgtgctcccgcccctcgccgccgctcgctcgctcgccggccggcctccgctcggccccctccctcagctccggtgcgcggcggccgacgacccgcggcctgggcctcggcgcgccaccggcgcccgcgcggagcggcccgggggccctcacgcaggcccatggcggcggcgcggcgcgctctcgggccgggcaccacgcgggcggcggggccgggggcggcggggccgggggcggcgggtccccgccgggcggctgggccgtggcgcgcctggagggccgcgagttcgagtatctgatgaagaagcgctcggtgaccatcggccgcaactcgtcgcagggctcggtggacgtgagcatgggccactcgagcttcatctcccggcgccacctcgagatcttcacgcccccgggcggcggcggccatggcggggccgctccggagctgccgcccgcgcagcccaggcccgacgccggcggcgacttctacctgcgctgcttgggcaagaacggggtattcgtggacggcgtgttccagaggcgcggggcgccgccgctgcagctgccgcgcgtgtgcacattcaggttcccgagcacaaacatcaagataacgttcactgccctgtccagcgagaagagagagaagcaggaggcgtctgagtctccagtgaaggccgtacagccacacatctcgcccctgaccatcaacattccagacaccatggcccacctcatcagccctctgccctcccccacgggaaccatcagcgctgcaaactcctgcccctccagcccccggggagcggggtcttcagggtacaaggtgggccgagtgatgccatctgacctcaatttaatggctgacaactcacagcctgaaaatgaaaaggaagcttcaggtggagacagcccgaaggatgattcaaagccgccttactcctacgcgcagctgatagttcaggcgattacgatggctcccgacaaacagctcaccctgaacgggatttatacacacatcactaaaaattatccctactacaggactgcggacaagggctggcagaattcaattcgccacaatctctctctgaatcgttatttcatcaaagtgccgcgttcccaggaagaaccaggcaaaggctcgttctggaggatagacccagcctctgaaagcaaattaatagaacaggcttttaggaaacgacggcctaggggcgtgccctgctttagaacccctctgggaccgctctcttctaggagtgccccagcctctcccaatcacgcgggagtgctgtctgctcactctagtggcgcccagacccctgagagcctgtcgagggaaggttcgccggcccccctggagcctgagcctggcgctgcacagcccaaactcgctgtcatccaggaagcccggtttgcccagagcgccccagggtcacctctgtccagtcagccagtcttaatcaccgtccagcggcagctaccacaggccatcaagcctgtcacctacactgtggccaccccagtgaccacctcgacctcccagccacccgtcgtgcagacggttcacgtcgtccaccagatcccagcggtgtcggtcaccagtgtggccggactggccccagcgaacacgtacactgtctctggacaagctgtggtcaccccggcagccgtgctggcccctcctaaggcagaggcccaggagaatggagaccacagggaagtcaaagtgaaagtagagcctattcccgccattggccacgccacgctcggcactgccagccggatcattcagacggcacagaccaccccggtccagacggtgaccatagtacaacaggcacctctaggtcaacaccagctaccaataaaaactgtaacacaaaacggcactcacgtggcatcagtccccactgcggtccacggccaggtgaacaatggtaagacgtgctggtcggtggctccccgtggctgtgggtactgggagcagagccccttctcactcgtggtttcggttctgactgtaacaattttagcttttgtctgaggcaatgtttgcatttcgaagctgcaggaaatctagtcatgctggggaagtggtcgtggagtcggccgtcacgggattcccgtgggaggacctgcctgaaaagagatgagagtttctaatacattgagagggaaaaatactctcgcctcttgtagatttcctgggtgtggcctggaagcggcctgaaacggcgggagccgccgcgtgtcttttcccttggcctcgcgcgccctgtggcctgtggcggtgctatgctgctgagggtgggagagaggctgcttttctgtgcgctttgctctcagagtccgtccgaggccggtgcacagaaaaccgcacggatgttctgacattgacaagtggagacaccagaacctccgcgccgacaccgggttatctaccttcgccctgccctgtggagtgtggaaagggtgggagtc

SEQ ID NO: 421790 - DNA, 2158 bp, Homo sapiens
gccccccccccacgcctcctcccctcctcccgcccgcgcgtgctcccgcccctcgccgccgctcgctcgctcgccggccggcctccgctcggccccctccctcagctccggtgcgcggcggccgacgacccgcggcctgggcctcggcgcgccaccggcgcccgcgcggagcggcccgggggccctcacgcaggcccatggcggcggcgcggcgcgctctcgggccgggcaccacgcgggcggcggggccgggggcggcggggccgggggcggcgggtccccgccgggcggctgggccgtggcgcgcctggagggccgcgagttcgagtatctgatgaagaagcgctcggtgaccatcggccgcaactcgtcgcagggctcggtggacgtgagcatgggccactcgagcttcatctcccggcgccacctcgagatcttcacgcccccgggcggcggcggccatggcggggccgctccggagctgccgcccgcgcagcccaggcccgacgccggcggcgacttctacctgcgctgcttgggcaagaacggggtattcgtggacggcgtgttccagaggcgcggggcgccgccgctgcagctgccgcgcgtgtgcacattcaggttcccgagcacaaacatcaagataacgttcactgccctgtccagcgagaagagagagaagcaggaggcgtctgagtctccagtgaaggccgtacagccacacatctcgcccctgaccatcaacattccagacaccatggcccacctcatcagccctctgccctcccccacgggaaccatcagcgctgcaaactcctgcccctccagcccccggggagcggggtcttcagggtacaaggtgggccgagtgatgccatctgacctcaatttaatggctgacaactcacagcctgaaaatgaaaaggaagcttcaggtggagacagcccgaaggatgattcaaagccgccttactcctacgcgcagctgatagttcaggcgattacgatggctcccgacaaacagctcaccctgaacgggatttatacacacatcactaaaaattatccctactacaggactgcggacaagggctggcagaattcaattcgccacaatctctctctgaatcgttatttcatcaaagtgccgcgttcccaggaagaaccaggcaaaggctcgttctggaggatagacccagcctctgaaagcaaattaatagaacaggcttttaggaaacgacggcctaggggcgtgccctgctttagaacccctctgggaccgctctcttctaggagtgccccagcctctcccaatcacgcgggagtgctgtctgctcactctagtggcgcccagacccctgagagcctgtcgagggaaggttcgccggcccccctggagcctgagcctggcgctgcacagcccaaactcgctgtcatccaggaagcccggtttgcccagagcgccccagggtcacctctgtccagtcagccagtcttaatcaccgtccagcggcagctaccacaggccatcaagcctgtcacctacactgtggccaccccagtgaccacctcgacctcccagccacccgtcgtgcagacggttcacgtcgtccaccagatcccagcggtgtcggtcaccagtgtggccggactggccccagcgaacacgtacactgtctctggacaagctgtggtcaccccggcagccgtgctggcccctcctaaggcagaggcccaggagaatggagaccacagggaagtcaaagtgaaagtagagcctattcccgccattggccacgccacgctcggcactgccagccggatcattcagacggcacagaccaccccggtccagacggtgaccatagtacaacaggcacctctaggtcaacaccacagctgcctgatgaattttatccacctccatttcagcatgtggctcgcgtggacaggtggacggacgctgtggccgcatggaaccttgagaacccagggacgagccagtgccgggaaggaactgccgggactcaccgagctgcacttaactgttctctttctggctattttttgttgtttgtttctttgtgttgactttgtccctggcaaaattttccactctgagtaaaacaagtctcctaagtattgtgtatgtttaaaa

SEQ ID NO: 421791 - DNA, 1908 bp, Homo sapiens
aagccgaaaaaatgcttaatatgttccagtaagggtattaagtaaaaattaaataaacgtattaagtttaacatattaaattaatttaacatttagactaacattaacatttaaattaataagtgaatatacttaatatattctagtacaggtatgcttggaaatagggcgtttccttttcatgaattgatttcgtacagcacagtggcttataaggaaccagcagtgtttttccctgagtaattatgaacttagtcaagatcagaagctgggttttggggttgagaagagttcatttatttaaataaagtttctatttaaaaacctttttaaaaagttaacatcataaatattctgataatttgcatagtagtaaaaattagaagttgaaattctacctaaagctgtagttgccgtcaattgtgtaacatgtgacaaaggttttcccatatgtcatttcatttgattctcaccacaaccatccaaggttgatgttattctcatttaacattgagttaacgaaagtagttgattcactctcgaagtccctgagtgtgagctcttcatcctagcactgtgaagtggtttgcctgctggggcctaaactcctcattccctttaacaaagcttcactgagtgctgcagttctcaaaatatgtaacagttaacacatttttcaaacaggttaggaagcaattcccatagccatcaatacttaaattcaggagtacttttttgtttgtttgttttgttttgtttttagagacaaggtctctttctgttgtccaggctggagtgtagtggtgtgatcatagctcactgcagcttctgtctcctaggctgaagctatcctcccacctcagcctcctgagaagctggggctacagggatgagccaccatgcccagctaattttttattttgattttttgagataagaggtctcaccatgttgcccaggcctgaggcaatctcctggtttcaagcaatcttcccacctcagcctccttaatgactgggattaaaggcatgagccactgcgcccagcaggaatggttattatattcattgagataaactgtagtatttgctgtttgaagtatttaaacataattggcatattacaatatgtgacactggccttaagattctaatttaaaatgcttaacagacttttagacttatgagtttcagttgaaaggtattttaaaatgttactaagtctgcaaaagtactgaaatgtttcagagaacttggaaagtcaccgtatgtttaatttattatgtttatgagatttaagcacttgggaaggtttatgctaatggggtcaagcatttgcaatgctgcttaaaagaatcatttttttaaatgtataaatgctattaagttgtttaaaggaatttgaattgtaaatgggattgttaaaacaaatttagtctgttcaactcaatgagggcatttcattttctaggaacaaaataccctcttagacattaaaaagccgcatgcctgttccctcagctatagttaactggaccatggtggtacaactgactcaacccttctctaagcagggatttgtaattgggatttataatgaaattcctgatctgggaaaatgggaggctgggaatgctatgtctaggtcatcagcggagaaagttggtttgtagagaatgaacaagaatgaaacctaagtgcaaagaaaataaagattatcctgctttaatagttcagactagaggagagagaaaccatcttagttcctgatgacttcctattgccctattctggttgtacctcttcccccaggggtccatgatatttttggattccctctaacacttgtttgcttagttgactgtgagtggttttctcttatttacaaccaaatgactctgaaaacact

SEQ ID NO: 421792 - DNA, 1678 bp, Homo sapiens
  misc_feature (3)..(3): n is a, c, g, or t
  misc_feature (6)..(6): n is a, c, g, or t
  misc_feature (1493)..(1493): n is a, c, g, or t
  misc_feature (1577)..(1577): n is a, c, g, or t
ggncgnctccggctgctcccattgagctgtctgctcgctgtgcccgctgtgcctgctgtgcccgcgctgtcgccgctgctaccgcgtctgctggacgcgggagacgccagcgagctggtgattggagccctgcggagagctcaagcgcccagctctgcccgaggagcccaggctgccccgtgagtcccatagttgctgcaggagtggagccatgagctgcgtcctgggtggtgtcatccccttggggctgctgttcctggtctgcggatcccaaggctacctcctgcccaacgtcactctcttagaggagctgctcagcaaataccagcacaacgagtctcactcccgggtccgcagagccatccccagggaggacaaggaggagatcctcatgctgcacaacaagcttcggggccaggtgcagcctcaggcctccaacatggagtacatgacctgggatgacgaactggagaagtctgctgcagcgtgggccagtcagtgcatctgggagcacgggcccaccagtctgctggtgtccatcgggcagaacctgggcgctcactggggcaggtatcgctctccggggttccatgtgcagtcctggtatgacgaggtgaaggactacacctacccctacccgagcgagtgcaacccctggtgtccagagaggtgctcggggcctatgtgcacgcactacacacagatagtttgggccaccaccaacaagatcggttgtgctgtgaacacctgccggaagatgactgtctggggagaagtttgggagaacgcggtctactttgtctgcaattattctccaaaggggaactggattggagaagccccctacaagaatggccggccctgctctgagtgcccacccagctatggaggcagctgcaggaacaacttgtgttaccgagaagaaacctacactccaaaacctgaaacggacgagatgaatgaggtggaaacggctcccattcctgaagaaaaccatgtttggctccaaccgagggtgatgagacccaccaagcccaagaaaacctctgcggtcaactacatgacccaagtcgtcagatgtgacaccaagatgaaggacaggtgcaaagggtccacgtgtaacaggtaccagtgcccagcaggctgcctgaaccacaaggcgaagatctttggaactctgttctatgaaagctcgtctagcatatgccgcgccgccatccactacgggatcctggatgacaagggaggcctggtggatatcaccaggaacgggaaggtccccttcttcgtgaagtctgagagacacggcgtgcagtccctcaggtaactactctgtgatcggggctctgtgaaacggttttcctgtttatgacggtgttgttgaaattttgaaaaataccacacaggccgggcgtggtggctcacacctgcactttgggaggcagaggcaggtggatcacctgaggtcaggagttcaagaccagcctgaccancatggtgaaagtccgtctctactaaaaatacaaaagttagccaggcgtggtggcaggcacctgtaatcccagctactctcaggnggctacggcagaagaaccgcttgaggccgaggcagaggttgcagtgagctaagatagtgtcactgcactccagcctggccaacacagcaaaactccgtctc

SEQ ID NO: 421793 - DNA, 816 bp, Homo sapiens
  misc_feature (3)..(3): n is a, c, g, or t
  misc_feature (6)..(6): n is a, c, g, or t
ggncgnctccggctgctcccattgagctgtctgctcgctgtgcccgctgtgcctgctgtgcccgcgctgtcgccgctgctaccgcgtctgctggacgcgggagacgccagcgagctggtgattggagccctgcggagagctcaagcgcccagctctgcccgaggagcccaggctgccccgtgagtcccatagttgctgcaggagtggagccatgagctgcgtcctgggtggtgtcatccccttggggctgctgttcctggtctgcggatcccaaggctacctcctgcccaacgtcactctcttagaggagctgctcagcaaataccagcacaacgagtctcactcccgggtccgcagagccatccccagggaggacaaggaggagatcctcatgctgcacaacaagcttcggggccaggtgcagcctcaggcctccaacatggagtacatgacctgggatgacgaactggagaagtctgctgcagcgtgggccagtcagtgcatctgggagcacgggcccaccagtctgctggtgtccatcgggcagaacctgggcgctcactggggcaggtaagagccacaagttcctctccggctgccgcaggaccccactgccgtgtgccgggctcagcacttgtgccccttatcaagtttagcctgcaaagagagtgagagagaccacccgtcccatcgatattctgggaaactgaggcttggcatccaggaacactcctgagtgactgacaaaatgtattcaagcttggttggctgaccccagacactgatgattgattaaagtttgtagtttgggttttc

SEQ ID NO: 421794 - DNA, 697 bp, Homo sapiens
  misc_feature (512)..(512): n is a, c, g, or t
  misc_feature (596)..(596): n is a, c, g, or t
gtttgtaaagcaactcagatgagtttttaaggtaagcaaccccaggaacaaatatgtggttacagacagaggcgagaggcaggagcagagtgagctttggcctgtccttcaggcttttagtgagttgaggacaaatgtttgggtatttctggtgaaacttgctgacagaggttgagaatgtgcctctggtcttctcttcccttcccgccagtcgtctagcatatgccgcgccgccatccactacgggatcctggatgacaagggaggcctggtggatatcaccaggaacgggaaggtccccttcttcgtgaagtctgagagacacggcgtgcagtccctcaggtaactactctgtgatcggggctctgtgaaacggttttcctgtttatgacggtgttgttgaaattttgaaaaataccacacaggccgggcgtggtggctcacacctgcactttgggaggcagaggcaggtggatcacctgaggtcaggagttcaagaccagcctgaccancatggtgaaagtccgtctctactaaaaatacaaaagttagccaggcgtggtggcaggcacctgtaatcccagctactctcaggnggctacggcagaagaaccgcttgaggccgaggcagaggttgcagtgagctaagatagtgtcactgcactccagcctggccaacacagcaaaactccgtctc

SEQ ID NO: 421795 - DNA, 3820 bp, Homo sapiens
gaggtgactctagaggatttccggtatgactgagcttgtggctgatctactaagtctgcaattattctccaaaggggaactggattggagaagccccctacaagaatggccggccctgctctgagtgcccacccagctatggaggcagctgcaggaacaacttgtgttaccgagaagaaacctacactccaaaacctgaaacggacgagatgaatgaggtggaaacggctcccattcctgaagaaaaccatgtttggctccaaccgagggtgatgagacccaccaagcccaagaaaacctctgcggtcaactacatgacccaagtcgtcagatgtgacaccaagatgaaggacaggtgcaaagggtccacgtgtaacaggtaccagtgcccagcaggctgcctgaaccacaaggcgaagatctttggaactctgttctatgaaagctcgtctagcatatgccgcgccgccatccactacgggatcctggatgacaagggaggcctggtggatatcaccaggaacgggaaggtccccttcttcgtgaagtctgagagacacggcgtgcagtccctcagcaaatacaaaccttccagctcattcatggtgtcaaaagtgaaagtgcaggatttggactgctacacgaccgttgctcagctgtgcccgtttgaaaagccagcaactcactgcccaagaatccattgtccggcacactgcaaagacgaaccttcctactgggctccggtgtttggaaccaacatctatgcagatacctcaagcatctgcaagacagccgtgcacgcgggagtcatcagcaacgagagtgggggtgacgtggacgtgatgcccgtggataaaaagaagacctacgtgggctcgctcaggaatggagttcagtctgaaagcctggggactcctcgggatggaaaggccttccggatctttgctgtcaggcagtgaatttccagcaccaggggagaaggggcgtcttcaggagggcttcggggttttgcttttatttttattttgtcattgcggggtatatggagagtcaggaaacttcctttgactgatgttcagtgtccatcactttgtggcctgtgggtgaggtgacatctcatcccctcactgaagcaacagcatcccaaggtgctcagccggactccctggtgcctgatcctgctggggcccgggggtctccatctggacgtcctctctcctttagagatctgagctgtctcttaaaggggacagttgcccaaaatgttccttgctatgtgttcttctgttggtggaggaagttgatttcaacctccctgccaaaagaacaaaccatttgaagctcacaattgtgaagcattcacggcgtcggaagaggccttttgagcaagcgccaatgagtttcaggaatgaagtagaaggtagttatttaaaaataaaaaacacagtccgtccctaccaatagaggaaaatggttttaatgtttgctggtcagacagacaaatgggctagagtaagagggctgcgggtatgagagaccccggctccgccctggcacgtgtccttgctggcggcccgccacaggcccccttcaatggccgcattcaggatggctctatacacagcagtgctggtttatgtagagttcagcagtcacttcagagatgtatcttgtctttgtcaggcccttcgtcttcatggcccacctgttttctgccgtgacctttggtcccattgaggactaaggatcgggaccctttctttaccccctacccgttgtggctcccaccctgcctcggactggtttacgtgtcctggttcacacccaggacttttctttgcaagcgaacctgtttgaagcccaagtcttaactcctggtctcgtaaggttccactgagacgagatgtctgagaacaaccaaagaaggcctgctctttgctgcttttaaaaaatgacaattaaatgtgcagattccccacgcacccgatgacctattttttcagccgtgggaggaatggagtctttggtacattcctcactgaggttagcagctcagtttgtggttatgaaaccgtctgtggcctcatgacagcgagagatgggaatacactagaaggatctcttttcctgttttcgtgaaacgactcttgccaaacgttcccgaggcgccaaggagtgtagtacaccctggctgccatcactctataaaagtgcttcatgagcccagaccaaaagcccacagtgaaatgaagtacccttttgtaaatagcatttttttgcagaaggtgaaaattccactctctaccaccgggccagccaatagatcactttggtgaatgctagtttcaaatttgattcaaaatatttcttaggtgaaagaactagcagaaagtcaaaaactaagatactgtagactggacaagaaattctacctgggcacctaggtgatgccttctttctttgattgcctttctaataaatgcagaatctgaaggtaaataggtttaaaacaaaacaaaaacccacccctttaaggagttggtaaaaagcagttcaactcttagcttgactgagctaaaattcacaggactacgtgctttgtgcattgtagtctagtcgtaattcataggtactgactcctcagccccaaatgtcggagaggaagaattcggtcagcctgtcaggtcgtgagtccagttaccaccaaacatctgggaaacttctgggtgctgggtgctctgctgctggacttttgtggctgtgtctgtgtctgcaagataaattagatcgccctgtggggtttgcagaattagtgaagggtccaggacgatcccagtgggctcgcttccaaagcatcccactcaagggagacttgaaacttccagtgtgagttgaccccatcatttaaaaataaagtccccgggttccttaatgcctccttcactgggccttcctagcaggatagaaagtccttgcccagagcaggacctggctgtctttttttttttttttttcccgagaccaagtttcactctgttgcccaaggtagagtgcagtggcgtgatctctgctcattgcaactgccgcctcccgggttcaagcaattctcatgcatcagcctcccaagtacctgggactacaggcgtgagctaccatgcccggctaatttttgtatttttagtagagatggggtttcattatgttggccaggctggtctcgaactccttacctcaggtgatccacccaccttggcctcccgaagtgctgggattacaggcatgagccactgcgcccggccatggacctggctgtctttatcatccccacaaacattttgaaactggaatatttgtcttcagaaaatggaaacaagactataaatgataagccctgtccctagcaccacctctcctgtgtgtggaatagaggcccctcgtgctaccaacacttaccctgtgtttaaaaagatcttgtaccaagccaacggcgttcctggctctcctgcccacaggatgaacattttcggcttccttaggagttttgccctaccgtattccaaagcgtgtgctggtttctcatattgtctgtaggctcactcagcccgcagtttatgtgtgtgcttttttctatgaaaaatgatgtattttgctacttcctgtgtacaaagttttattgtaaatgttttttgtgctttgcatgaacaggggccacgttgttgcaattgtttcagtagaactggtttgatttctaaaatgttcctgtaacatatcttttatgaacaaatctgaacaatttgtgaaataaaacattgaaaaccat

SEQ ID NO: 421796 - DNA, 3104 bp, Homo sapiens
atcgtgcagaagatcacctttcgtgcgatgatcaccttatcgtgcagaagatcacctcatcgtgcagaacatcacctcatcgtgtagaagatcatcagcaacgagagtgggggtgacgtggacgtgatgcccgtggataaaaagaagacctacgtgggctcgctcaggaatggagttcagtctgaaagcctggggactcctcgggatggaaaggccttccggatctttgctgtcaggcagtgaatttccagcaccaggggagaaggggcgtcttcaggagggcttcggggttttgcttttatttttattttgtcattgcggggtatatggagagtcaggaaacttcctttgactgatgttcagtgtccatcactttgtggcctgtgggtgaggtgacatctcatcccctcactgaagcaacagcatcccaaggtgctcagccggactccctggtgcctgatcctgctggggcccgggggtctccatctggacgtcctctctcctttagagatctgagctgtctcttaaaggggacagttgcccaaaatgttccttgctatgtgttcttctgttggtggaggaagttgatttcaacctccctgccaaaagaacaaaccatttgaagctcacaattgtgaagcattcacggcgtcggaagaggccttttgagcaagcgccaatgagtttcaggaatgaagtagaaggtagttatttaaaaataaaaaacacagtccgtccctaccaatagaggaaaatggttttaatgtttgctggtcagacagacaaatgggctagagtaagagggctgcgggtatgagagaccccggctccgccctggcacgtgtccttgctggcggcccgccacaggcccccttcaatggccgcattcaggatggctctatacacagcagtgctggtttatgtagagttcagcagtcacttcagagatgtatcttgtctttgtcaggcccttcgtcttcatggcccacctgttttctgccgtgacctttggtcccattgaggactaaggatcgggaccctttctttaccccctacccgttgtggctcccaccctgcctcggactggtttacgtgtcctggttcacacccaggacttttctttgcaagcgaacctgtttgaagcccaagtcttaactcctggtctcgtaaggttccactgagacgagatgtctgagaacaaccaaagaaggcctgctctttgctgcttttaaaaaatgacaattaaatgtgcagattccccacgcacccgatgacctattttttcagccgtgggaggaatggagtctttggtacattcctcactgaggttagcagctcagtttgtggttatgaaaccgtctgtggcctcatgacagcgagagatgggaatacactagaaggatctcttttcctgttttcgtgaaacgactcttgccaaacgttcccgaggcgccaaggagtgtagtacaccctggctgccatcactctataaaagtgcttcatgagcccagaccaaaagcccacagtgaaatgaagtacccttttgtaaatagcatttttttgcagaaggtgaaaattccactctctaccaccgggccagccaatagatcactttggtgaatgctagtttcaaatttgattcaaaatatttcttaggtgaaagaactagcagaaagtcaaaaactaagatactgtagactggacaagaaattctacctgggcacctaggtgatgccttctttctttgattgcctttctaataaatgcagaatctgaaggtaaataggtttaaaacaaaacaaaaacccacccctttaaggagttggtaaaaagcagttcaactcttagcttgactgagctaaaattcacaggactacgtgctttgtgcattgtagtctagtcgtaattcataggtactgactcctcagccccaaatgtcggagaggaagaattcggtcagcctgtcaggtcgtgagtccagttaccaccaaacatctgggaaacttctgggtgctgggtgctctgctgctggacttttgtggctgtgtctgtgtctgcaagataaattagatcgccctgtggggtttgcagaattagtgaagggtccaggacgatcccagtgggctcgcttccaaagcatcccactcaagggagacttgaaacttccagtgtgagttgaccccatcatttaaaaataaagtccccgggttccttaatgcctccttcactgggccttcctagcaggatagaaagtccttgcccagagcaggacctggctgtctttttttttttttttttcccgagaccaagtttcactctgttgcccaaggtagagtgcagtggcgtgatctctgctcattgcaactgccgcctcccgggttcaagcaattctcatgcatcagcctcccaagtacctgggactacaggcgtgagctaccatgcccggctaatttttgtatttttagtagagatggggtttcattatgttggccaggctggtctcgaactccttacctcaggtgatccacccaccttggcctcccgaagtgctgggattacaggcatgagccactgcgcccggccatggacctggctgtctttatcatccccacaaacattttgaaactggaatatttgtcttcagaaaatggaaacaagactataaatgataagccctgtccctagcaccacctctcctgtgtgtggaatagaggcccctcgtgctaccaacacttaccctgtgtttaaaaagatcttgtaccaagccaacggcgttcctggctctcctgcccacaggatgaacattttcggcttccttaggagttttgccctaccgtattccaaagcgtgtgctggtttctcatattgtctgtaggctcactcagcccgcagtttatgtgtgtgcttttttctatgaaaaatgatgtattttgctacttcctgtgtacaaagttttattgtaaatgttttttgtgctttgcatgaacaggggccacgttgttgcaattgtttcagtagaactggtttgatttctaaaatgttcctgtaacatatcttttatgaacaaatctgaacaatttgtgaaataaaacattgaaaaccat

SEQ ID NO: 421797 - DNA, 151 bp, Homo sapiens
aaacggctcccattcctgaagaaaaccatgtttggctccaaccgagggtgatgagacccaccaagcccaagaaaacctctgcggtcaactacatgagtgagtctaggccgtcctccgcccctcctgccctcccagccacctccaaagggga

SEQ ID NO: 421798 - DNA, 4566 bp, Homo sapiens
  misc_feature (3)..(3): n is a, c, g, or t
  misc_feature (6)..(6): n is a, c, g, or t
ggncgnctccggctgctcccattgagctgtctgctcgctgtgcccgctgtgcctgctgtgcccgcgctgtcgccgctgctaccgcgtctgctggacgcgggagacgccagcgagctggtgattggagccctgcggagagctcaagcgcccagctctgcccgaggagcccaggctgccccgtgagtcccatagttgctgcaggagtggagccatgagctgcgtcctgggtggtgtcatccccttggggctgctgttcctggtctgcggatcccaaggctacctcctgcccaacgtcactctcttagaggagctgctcagcaaataccagcacaacgagtctcactcccgggtccgcagagccatccccagggaggacaaggaggagatcctcatgctgcacaacaagcttcggggccaggtgcagcctcaggcctccaacatggagtacatgacctgggatgacgaactggagaagtctgctgcagcgtgggccagtcagtgcatctgggagcacgggcccaccagtctgctggtgtccatcgggcagaacctgggcgctcactggggcaggtatcgctctccggggttccatgtgcagtcctggtatgacgaggtgaaggactacacctacccctacccgagcgagtgcaacccctggtgtccagagaggtgctcggggcctatgtgcacgcactacacacagatagtttgggccaccaccaacaagatcggttgtgctgtgaacacctgccggaagatgactgtctggggagaagtttgggagaacgcggtctactttgtctgcaattattctccaaaggggaactggattggagaagccccctacaagaatggccggccctgctctgagtgcccacccagctatggaggcagctgcaggaacaacttgtgttaccgagaagaaacctacactccaaaacctgaaacggacgagatgaatgaggtggaaacggctcccattcctgaagaaaaccatgtttggctccaaccgagggtgatgagacccaccaagcccaagaaaacctctgcggtcaactacatgacccaagtcgtcagatgtgacaccaagatgaaggacaggtgcaaagggtccacgtgtaacaggtaccagtgcccagcaggctgcctgaaccacaaggcgaagatctttggaactctgttctatgaaagctcgtctagcatatgccgcgccgccatccactacgggatcctggatgacaagggaggcctggtggatatcaccaggaacgggaaggtccccttcttcgtgaagtctgagagacacggcgtgcagtccctcagcaaatacaaaccttccagctcattcatggtgtcaaaagtgaaagtgcaggatttggactgctacacgaccgttgctcagctgtgcccgtttgaaaagccagcaactcactgcccaagaatccattgtccggcacactgcaaagacgaaccttcctactgggctccggtgtttggaaccaacatctatgcagatacctcaagcatctgcaagacagccgtgcacgcgggagtcatcagcaacgagagtgggggtgacgtggacgtgatgcccgtggataaaaagaagacctacgtgggctcgctcaggaatggagttcagtctgaaagcctggggactcctcgggatggaaaggccttccggatctttgctgtcaggcagtgaatttccagcaccaggggagaaggggcgtcttcaggagggcttcggggttttgcttttatttttattttgtcattgcggggtatatggagagtcaggaaacttcctttgactgatgttcagtgtccatcactttgtggcctgtgggtgaggtgacatctcatcccctcactgaagcaacagcatcccaaggtgctcagccggactccctggtgcctgatcctgctggggcccgggggtctccatctggacgtcctctctcctttagagatctgagctgtctcttaaaggggacagttgcccaaaatgttccttgctatgtgttcttctgttggtggaggaagttgatttcaacctccctgccaaaagaacaaaccatttgaagctcacaattgtgaagcattcacggcgtcggaagaggccttttgagcaagcgccaatgagtttcaggaatgaagtagaaggtagttatttaaaaataaaaaacacagtccgtccctaccaatagaggaaaatggttttaatgtttgctggtcagacagacaaatgggctagagtaagagggctgcgggtatgagagaccccggctccgccctggcacgtgtccttgctggcggcccgccacaggcccccttcaatggccgcattcaggatggctctatacacagcagtgctggtttatgtagagttcagcagtcacttcagagatgtatcttgtctttgtcaggcccttcgtcttcatggcccacctgttttctgccgtgacctttggtcccattgaggactaaggatcgggaccctttctttaccccctacccgttgtggctcccaccctgcctcggactggtttacgtgtcctggttcacacccaggacttttctttgcaagcgaacctgtttgaagcccaagtcttaactcctggtctcgtaaggttccactgagacgagatgtctgagaacaaccaaagaaggcctgctctttgctgcttttaaaaaatgacaattaaatgtgcagattccccacgcacccgatgacctattttttcagccgtgggaggaatggagtctttggtacattcctcactgaggttagcagctcagtttgtggttatgaaaccgtctgtggcctcatgacagcgagagatgggaatacactagaaggatctcttttcctgttttcgtgaaacgactcttgccaaacgttcccgaggcgccaaggagtgtagtacaccctggctgccatcactctataaaagtgcttcatgagcccagaccaaaagcccacagtgaaatgaagtacccttttgtaaatagcatttttttgcagaaggtgaaaattccactctctaccaccgggccagccaatagatcactttggtgaatgctagtttcaaatttgattcaaaatatttcttaggtgaaagaactagcagaaagtcaaaaactaagatactgtagactggacaagaaattctacctgggcacctaggtgatgccttctttctttgattgcctttctaataaatgcagaatctgaaggtaaataggtttaaaacaaaacaaaaacccacccctttaaggagttggtaaaaagcagttcaactcttagcttgactgagctaaaattcacaggactacgtgctttgtgcattgtagtctagtcgtaattcataggtactgactcctcagccccaaatgtcggagaggaagaattcggtcagcctgtcaggtcgtgagtccagttaccaccaaacatctgggaaacttctgggtgctgggtgctctgctgctggacttttgtggctgtgtctgtgtctgcaagataaattagatcgccctgtggggtttgcagaattagtgaagggtccaggacgatcccagtgggctcgcttccaaagcatcccactcaagggagacttgaaacttccagtgtgagttgaccccatcatttaaaaataaagtccccgggttccttaatgcctccttcactgggccttcctagcaggatagaaagtccttgcccagagcaggacctggctgtctttttttttttttttttcccgagaccaagtttcactctgttgcccaaggtagagtgcagtggcgtgatctctgctcattgcaactgccgcctcccgggttcaagcaattctcatgcatcagcctcccaagtacctgggactacaggcgtgagctaccatgcccggctaatttttgtatttttagtagagatggggtttcattatgttggccaggctggtctcgaactccttacctcaggtgatccacccaccttggcctcccgaagtgctgggattacaggcatgagccactgcgcccggccatggacctggctgtctttatcatccccacaaacattttgaaactggaatatttgtcttcagaaaatggaaacaagactataaatgataagccctgtccctagcaccacctctcctgtgtgtggaatagaggcccctcgtgctaccaacacttaccctgtgtttaaaaagatcttgtaccaagccaacggcgttcctggctctcctgcccacaggatgaacattttcggcttccttaggagttttgccctaccgtattccaaagcgtgtgctggtttctcatattgtctgtaggctcactcagcccgcagtttatgtgtgtgcttttttctatgaaaaatgatgtattttgctacttcctgtgtacaaagttttattgtaaatgttttttgtgctttgcatgaacaggggccacgttgttgcaattgtttcagtagaactggtttgatttctaaaatgttcctgtaacatatcttttatgaacaaatctgaacaatttgtgaaataaaacattgaaaaccat

SEQ ID NO: 421799 - DNA, 4396 bp, Homo sapiens
cggttatccgcctactcggcctccaaaatgctgggataacaggcatgagccattacgcccgcccttttttttgggggacagggtctccctctgtcgcccaggctggagtgcagtggcacgatcttggctcaccgcaacctctgcctcctgggttcaagcgattcgcctgcctcagcctcctgagtagctgggactataggtgcctgccaccacgcccggctaatttttgtttttttagtagagatggggtttcaccatgttggtcaggctggtctcaaactcctgacctcatgatccgcccacctcagcctcccaaaatgctgagatgacaggcgtgagccaccgcaccggcccacttgctttgctttttaagaaaatgtatgtatcttcaatgggttagggactaatatctgcttccccaacccttcacctcgtacctctttagtgccagcaccttatacatccaggccaaatgatatcacccttttgtgccttatccctcgagctgtgacacacaaatgtcatcttttcagatagtttgggccaccaccaacaagatcggttgtgctgtgaacacctgccggaagatgactgtctggggagaagtttgggagaacgcggtctactttgtctgcaattattctccaaaggggaactggattggagaagccccctacaagaatggccggccctgctctgagtgcccacccagctatggaggcagctgcaggaacaacttgtgttaccgagaagaaacctacactccaaaacctgaaacggacgagatgaatgaggtggaaacggctcccattcctgaagaaaaccatgtttggctccaaccgagggtgatgagacccaccaagcccaagaaaacctctgcggtcaactacatgacccaagtcgtcagatgtgacaccaagatgaaggacaggtgcaaagggtccacgtgtaacaggtaccagtgcccagcaggctgcctgaaccacaaggcgaagatctttggaactctgttctatgaaagctcgtctagcatatgccgcgccgccatccactacgggatcctggatgacaagggaggcctggtggatatcaccaggaacgggaaggtccccttcttcgtgaagtctgagagacacggcgtgcagtccctcagcaaatacaaaccttccagctcattcatggtgtcaaaagtgaaagtgcaggatttggactgctacacgaccgttgctcagctgtgcccgtttgaaaagccagcaactcactgcccaagaatccattgtccggcacactgcaaagacgaaccttcctactgggctccggtgtttggaaccaacatctatgcagatacctcaagcatctgcaagacagccgtgcacgcgggagtcatcagcaacgagagtgggggtgacgtggacgtgatgcccgtggataaaaagaagacctacgtgggctcgctcaggaatggagttcagtctgaaagcctggggactcctcgggatggaaaggccttccggatctttgctgtcaggcagtgaatttccagcaccaggggagaaggggcgtcttcaggagggcttcggggttttgcttttatttttattttgtcattgcggggtatatggagagtcaggaaacttcctttgactgatgttcagtgtccatcactttgtggcctgtgggtgaggtgacatctcatcccctcactgaagcaacagcatcccaaggtgctcagccggactccctggtgcctgatcctgctggggcccgggggtctccatctggacgtcctctctcctttagagatctgagctgtctcttaaaggggacagttgcccaaaatgttccttgctatgtgttcttctgttggtggaggaagttgatttcaacctccctgccaaaagaacaaaccatttgaagctcacaattgtgaagcattcacggcgtcggaagaggccttttgagcaagcgccaatgagtttcaggaatgaagtagaaggtagttatttaaaaataaaaaacacagtccgtccctaccaatagaggaaaatggttttaatgtttgctggtcagacagacaaatgggctagagtaagagggctgcgggtatgagagaccccggctccgccctggcacgtgtccttgctggcggcccgccacaggcccccttcaatggccgcattcaggatggctctatacacagcagtgctggtttatgtagagttcagcagtcacttcagagatgtatcttgtctttgtcaggcccttcgtcttcatggcccacctgttttctgccgtgacctttggtcccattgaggactaaggatcgggaccctttctttaccccctacccgttgtggctcccaccctgcctcggactggtttacgtgtcctggttcacacccaggacttttctttgcaagcgaacctgtttgaagcccaagtcttaactcctggtctcgtaaggttccactgagacgagatgtctgagaacaaccaaagaaggcctgctctttgctgcttttaaaaaatgacaattaaatgtgcagattccccacgcacccgatgacctattttttcagccgtgggaggaatggagtctttggtacattcctcactgaggttagcagctcagtttgtggttatgaaaccgtctgtggcctcatgacagcgagagatgggaatacactagaaggatctcttttcctgttttcgtgaaacgactcttgccaaacgttcccgaggcgccaaggagtgtagtacaccctggctgccatcactctataaaagtgcttcatgagcccagaccaaaagcccacagtgaaatgaagtacccttttgtaaatagcatttttttgcagaaggtgaaaattccactctctaccaccgggccagccaatagatcactttggtgaatgctagtttcaaatttgattcaaaatatttcttaggtgaaagaactagcagaaagtcaaaaactaagatactgtagactggacaagaaattctacctgggcacctaggtgatgccttctttctttgattgcctttctaataaatgcagaatctgaaggtaaataggtttaaaacaaaacaaaaacccacccctttaaggagttggtaaaaagcagttcaactcttagcttgactgagctaaaattcacaggactacgtgctttgtgcattgtagtctagtcgtaattcataggtactgactcctcagccccaaatgtcggagaggaagaattcggtcagcctgtcaggtcgtgagtccagttaccaccaaacatctgggaaacttctgggtgctgggtgctctgctgctggacttttgtggctgtgtctgtgtctgcaagataaattagatcgccctgtggggtttgcagaattagtgaagggtccaggacgatcccagtgggctcgcttccaaagcatcccactcaagggagacttgaaacttccagtgtgagttgaccccatcatttaaaaataaagtccccgggttccttaatgcctccttcactgggccttcctagcaggatagaaagtccttgcccagagcaggacctggctgtctttttttttttttttttcccgagaccaagtttcactctgttgcccaaggtagagtgcagtggcgtgatctctgctcattgcaactgccgcctcccgggttcaagcaattctcatgcatcagcctcccaagtacctgggactacaggcgtgagctaccatgcccggctaatttttgtatttttagtagagatggggtttcattatgttggccaggctggtctcgaactccttacctcaggtgatccacccaccttggcctcccgaagtgctgggattacaggcatgagccactgcgcccggccatggacctggctgtctttatcatccccacaaacattttgaaactggaatatttgtcttcagaaaatggaaacaagactataaatgataagccctgtccctagcaccacctctcctgtgtgtggaatagaggcccctcgtgctaccaacacttaccctgtgtttaaaaagatcttgtaccaagccaacggcgttcctggctctcctgcccacaggatgaacattttcggcttccttaggagttttgccctaccgtattccaaagcgtgtgctggtttctcatattgtctgtaggctcactcagcccgcagtttatgtgtgtgcttttttctatgaaaaatgatgtattttgctacttcctgtgtacaaagttttattgtaaatgttttttgtgctttgcatgaacaggggccacgttgttgcaattgtttcagtagaactggtttgatttctaaaatgttcctgtaacatatcttttatgaacaaatctgaacaatttgtgaaataaaacattgaaaaccat

SEQ ID NO: 421800 - DNA, 3375 bp, Homo sapiens
tctcttaagtgcccctacgtggggtacgaggagcctgctgggtcgtagtcccagctctattcaagggcccagggaacccataggccctggtagtctagtggcccattgcacagcctggtagcctgaggcccaggcgtgctgggacctgaccctttcccccttgctcctgttcacagtgcaggatttggactgctacacgaccgttgctcagctgtgcccgtttgaaaagccagcaactcactgcccaagaatccattgtccggcacactgcaaagacgaaccttcctactgggctccggtgtttggaaccaacatctatgcagatacctcaagcatctgcaagacagccgtgcacgcgggagtcatcagcaacgagagtgggggtgacgtggacgtgatgcccgtggataaaaagaagacctacgtgggctcgctcaggaatggagttcagtctgaaagcctggggactcctcgggatggaaaggccttccggatctttgctgtcaggcagtgaatttccagcaccaggggagaaggggcgtcttcaggagggcttcggggttttgcttttatttttattttgtcattgcggggtatatggagagtcaggaaacttcctttgactgatgttcagtgtccatcactttgtggcctgtgggtgaggtgacatctcatcccctcactgaagcaacagcatcccaaggtgctcagccggactccctggtgcctgatcctgctggggcccgggggtctccatctggacgtcctctctcctttagagatctgagctgtctcttaaaggggacagttgcccaaaatgttccttgctatgtgttcttctgttggtggaggaagttgatttcaacctccctgccaaaagaacaaaccatttgaagctcacaattgtgaagcattcacggcgtcggaagaggccttttgagcaagcgccaatgagtttcaggaatgaagtagaaggtagttatttaaaaataaaaaacacagtccgtccctaccaatagaggaaaatggttttaatgtttgctggtcagacagacaaatgggctagagtaagagggctgcgggtatgagagaccccggctccgccctggcacgtgtccttgctggcggcccgccacaggcccccttcaatggccgcattcaggatggctctatacacagcagtgctggtttatgtagagttcagcagtcacttcagagatgtatcttgtctttgtcaggcccttcgtcttcatggcccacctgttttctgccgtgacctttggtcccattgaggactaaggatcgggaccctttctttaccccctacccgttgtggctcccaccctgcctcggactggtttacgtgtcctggttcacacccaggacttttctttgcaagcgaacctgtttgaagcccaagtcttaactcctggtctcgtaaggttccactgagacgagatgtctgagaacaaccaaagaaggcctgctctttgctgcttttaaaaaatgacaattaaatgtgcagattccccacgcacccgatgacctattttttcagccgtgggaggaatggagtctttggtacattcctcactgaggttagcagctcagtttgtggttatgaaaccgtctgtggcctcatgacagcgagagatgggaatacactagaaggatctcttttcctgttttcgtgaaacgactcttgccaaacgttcccgaggcgccaaggagtgtagtacaccctggctgccatcactctataaaagtgcttcatgagcccagaccaaaagcccacagtgaaatgaagtacccttttgtaaatagcatttttttgcagaaggtgaaaattccactctctaccaccgggccagccaatagatcactttggtgaatgctagtttcaaatttgattcaaaatatttcttaggtgaaagaactagcagaaagtcaaaaactaagatactgtagactggacaagaaattctacctgggcacctaggtgatgccttctttctttgattgcctttctaataaatgcagaatctgaaggtaaataggtttaaaacaaaacaaaaacccacccctttaaggagttggtaaaaagcagttcaactcttagcttgactgagctaaaattcacaggactacgtgctttgtgcattgtagtctagtcgtaattcataggtactgactcctcagccccaaatgtcggagaggaagaattcggtcagcctgtcaggtcgtgagtccagttaccaccaaacatctgggaaacttctgggtgctgggtgctctgctgctggacttttgtggctgtgtctgtgtctgcaagataaattagatcgccctgtggggtttgcagaattagtgaagggtccaggacgatcccagtgggctcgcttccaaagcatcccactcaagggagacttgaaacttccagtgtgagttgaccccatcatttaaaaataaagtccccgggttccttaatgcctccttcactgggccttcctagcaggatagaaagtccttgcccagagcaggacctggctgtctttttttttttttttttcccgagaccaagtttcactctgttgcccaaggtagagtgcagtggcgtgatctctgctcattgcaactgccgcctcccgggttcaagcaattctcatgcatcagcctcccaagtacctgggactacaggcgtgagctaccatgcccggctaatttttgtatttttagtagagatggggtttcattatgttggccaggctggtctcgaactccttacctcaggtgatccacccaccttggcctcccgaagtgctgggattacaggcatgagccactgcgcccggccatggacctggctgtctttatcatccccacaaacattttgaaactggaatatttgtcttcagaaaatggaaacaagactataaatgataagccctgtccctagcaccacctctcctgtgtgtggaatagaggcccctcgtgctaccaacacttaccctgtgtttaaaaagatcttgtaccaagccaacggcgttcctggctctcctgcccacaggatgaacattttcggcttccttaggagttttgccctaccgtattccaaagcgtgtgctggtttctcatattgtctgtaggctcactcagcccgcagtttatgtgtgtgcttttttctatgaaaaatgatgtattttgctacttcctgtgtacaaagttttattgtaaatgttttttgtgctttgcatgaacaggggccacgttgttgcaattgtttcagtagaactggtttgatttctaaaatgttcctgtaacatatcttttatgaacaaatctgaacaatttgtgaaataaaacattgaaaaccat

SEQ ID NO: 421801 - DNA, 1218 bp, Homo sapiens
  misc_feature (3)..(3): n is a, c, g, or t
  misc_feature (6)..(6): n is a, c, g, or t
ggncgnctccggctgctcccattgagctgtctgctcgctgtgcccgctgtgcctgctgtgcccgcgctgtcgccgctgctaccgcgtctgctggacgcgggagacgccagcgagctggtgattggagccctgcggagagctcaagcgcccagctctgcccgaggagcccaggctgccccgtgagtcccatagttgctgcaggagtggagccatgagctgcgtcctgggtggtgtcatccccttggggctgctgttcctggtctgcggatcccaaggctacctcctgcccaacgtcactctcttagaggagctgctcagcaaataccagcacaacgagtctcactcccgggtccgcagagccatccccagggaggacaaggaggagatcctcatgctgcacaacaagcttcggggccaggtgcagcctcaggcctccaacatggagtacatgacctgggatgacgaactggagaagtctgctgcagcgtgggccagtcagtgcatctgggagcacgggcccaccagtctgctggtgtccatcgggcagaacctgggcgctcactggggcaggtatcgctctccggggttccatgtgcagtcctggtatgacgaggtgaaggactacacctacccctacccgagcgagtgcaacccctggtgtccagagaggtgctcggggcctatgtgcacgcactacacacagatagtttgggccaccaccaacaagatcggttgtgctgtgaacacctgccggaagatgactgtctggggagaagtttgggagaacgcggtctactttgtctgcaattattctccaaaggggaactggattggagaagccccctacaagaatggccggccctgctctgagtgcccacccagctatggaggcagctgcaggaacaacttgtgttaccgagaagaaacctacactccaaaacctgaaacggacgagatgaatgaggtggaaacggctcccattcctgaagaaaaccatgtttggctccaaccgagggtgatgagacccaccaagcccaagaaaacctctgcggtcaactacatgacccaagtcgtcagatgtgacaccaagatgaaggacaggtgcaaagggtccacgtgtaacaggtaccagtgcccagcaggctgcctgaaccacaaggcgaagatctttggaactctgttctatgaaagctcgtctagcatctgctctcaatggct

SEQ ID NO: 421802 - DNA, 4904 bp, Homo sapiens
gatgaacccttgtcaggggccgtgtctgcgggaggccgaaggatcccgggtgacatgctttctttgggtgcgaggcagcgtctcggcagaaagaatattgcgagtattactgagggtacatgaaggagagaagcccctttggttcggccttggactaagcccttgttctcaggtgaacttgcagtgtgatcttgagtaaggtcagtctcctctctcacctcagtggcccgaaacctcaggaggtggcagaggttttctaatgactctcccagctctgacatcctctgacttcactctgggagaacgtgggctggtggactcctggcagaagccgacacacagttgggccataacaaagagccctggtacggggcacgttcccgcccccgggaggttttggaaacactgtgaggcagggggcggggcttgagcgggccgcagccagtcaccaaagggccgggcgctgggggcggggcctcgcgcgagcggcggcggtagcggcggcagcggctgcggccaagctgggtccgagcatcccgcggctctggagccgcccggcccggacatggcgaccgtccgggcctctctgcgaggtgcgctgctccttctgctggccgtggcgggggtcgcggaggtggcagggggcctggctccgggcagtgcgggtgcattgtgttgtaatcattcaaaggataaccaaatgtgccgtgatgtatgtgaacagattttctcctcaaaaagtgaatcccgactaaaacatctgttgcagcgagccccagattattgcccagagacaatggttgaaatttggaattgtatgaattcatctttgccaggtgtgtttaagaagtctgatggctgggttggcttaggctgctgtgaactggctattgccttggagtgtcgacaggcatgcaagcaggcatcttcaaagaatgatatttccaaagtttgcagaaaagaatatgagaatgctcttttcagttgcattagcagaaatgaaatgggctcggtttgttgcagttatgcaggtcatcacacaaactgccgagaatactgtcaagccatttttcgaacagactcttctcctggtccatctcagataaaagcagtggaaaattattgcgcctctattagtccacaattaatacattgtgtgaacaattatactcaatcttatccaatgaggaacccaacggatagtttatattgctgtgacagagctgaagaccatgcttgccaaaatgcctgcaagagaatcctgatgtccaagaaaacggaaatggagattgttgatggtctcatcgagggttgtaagacccagcccttgcctcaagatcctctttggcaatgttttcttgaaagctcacaatctgttcaccctggagtcactgtacaccctcctccctctacaggcctcgatggggctaaattgcattgttgttctaaagcaaacacttcaacatgtagggaactctgcactaaactttacagcatgagctggggcaatacacagagttggcaagagtttgatcgcttttgtgaatataatccagtggaagtgtccatgttgacctgtttagcggatgtccgggaaccttgccagttgggctgtagaaaccttacttactgtactaattttaacaacaggccaacagaacttttcaggagttgtaatgcacagtcagatcaaggagccatgaatgacatgaagttgtgggagaaaggaagcataaagatgccatttatcaatatacctgttcttgatattaaaaagtgccagccagagatgtggaaagcaatagcttgttcactgcagattaaaccttgtcatagtaaatctcggggaagtattatttgcaaatcagattgtgtggagattcttaaaaaatgtggagaccagaacaaattccctgaagaccacacagctgaaagtatttgtgagcttctgtcacctacagatgatctgaagaattgtatacctttggatacatacctcaggccaagtactttaggtaacattgtagaagaagtgactcatccctgtaacccaaatccttgccctgccaatgagctctgtgaagtaaaccgaaaaggatgtccatctggagatccctgtcttccatacttttgtgttcaaggttgcaaactgggagaagcttctgatttcattgtccgtcaagggacactaatccaggtgccatcatctgcaggggaagttggttgttataaaatctgttcatgtggacaaagtggactcttagaaaactgtatggaaatgcactgtatagacctccagaagtcttgtattgttggaggaaaaagaaaaagtcatggaacatcctttagtattgactgcaatgtctgttcttgttttgctggcaatttggtgtgctctacccgcctttgcctcagtgagcacagttcagaagatgaccgtcgtaccttcacaggtctgccctgtaactgtgcagatcagtttgtccctgtatgtgggcagaatgggcgcacttaccccagtgcctgcattgctcgctgtgtgggcctccaagaccatcagtttgagtttggatcatgcatgtcaaaggatccatgtaatcctaatccctgccaaaaaaaccaaaggtgcatacccaaaccacaggtctgcctgacgacttttgataaatttggatgtagccagtatgagtgtgtaccaagacagctcgcgtgtgaccaggtccaagatcctgtttgtgacacagaccacatggagcacaacaatctctgcactttataccaaagaggaaaaagcctctcttacaaaggtccctgccagcccttttgcagagcaaccgagcccgtatgtgggcacaatggtgagacctacagcagtgtgtgtgctgcctactcggatcgcgtggcagtcgattactatggggactgccaggccgtcggagtcctctcagagcacagctccgtcgccgagtgtgcttctgtcaagtgtccttcgctcttggcagctggatgcaaacccatcatcccaccgggtgcttgttgcccattatgtgctgggatgttaagagttttatttgacaaagaaaaactggatactattgctaaggtaacaaataaaaagccaataacagttctggaaatacttcagaaaatccgcatgcacgtgtctgtcccacagtgtgatgtgtttggatacttcagcattgaatcagaaattgtgatcctgatcattcccgtcgatcactatccaaaagctctgcagattgaagcctgcaataaagaagcagagaagattgagtcccttatcaactctgacagcccgactttggcgtcccatgtccctctctctgccctcatcatttcccaggtacaggtctccagcagtgtgccatcggccggtgtcagggccaggccttcttgccactccctcctccttcccctcagcttgggccttgccttgcacttgctctggacatataactgactgcccacggaaagtgcagaatgctcctccacctcactctcctgccttgaaaaagacattcaggactgctggtttgtagttgaatattggccaaggaaaggcacatgtcacctctattcgccacacagtatttttttttttaatccgccaatattagtaggatttttgttttgtttttacaaatgttaaaatgtgttgttccaaatactaatgaaaacagaatgtctcttcctggtagaccactgccatatgatttacatttcctcaccataagggtcccccactctaaagcaaatttatcgctgggaaatgagatgaccactttttagaaagataattcactgtactatcaggttcacaaacttcatttcagagttctttttgaagtatttaaggttcccgttgcatttgttttgtttacagataattacctactctggctagaagctaggggtcccagtgaagagccactgccattaaagaatatgaaacatagataaaacatctttgaaattatgtaaattatgtaaattatcaggcaaatttgcattaaattacagaaatttaattcagaaccccaactactgtgttatgcaaaagcaagctgattaaatgacactcatataattatatgttgtaagcaacaggctcactggtcacggatttgtgtctgtgacttttgtgaaagggagaagtgacattgcatcaaagcatcttgcattatgcaatttttatattaaccagatatatattcatcggtattcatccaagttaaatgtagagtttttaaacatcaatctttaaaccaattgctgctacttatataattgccaaaaagtgaaataatgtgtagttcatgtaaataatacattatatttctattttattatgaagaaggtgaatagccatatttgtaaaatgacaatcatgtgtgttaacccagtgctttccattcgtgaaaacacatttgctttttgtgatatgcacaatgtagataagtgttctgtctgactttcttttttgatatagaagtataaagaattgtggtttatatatttaaaagtgtcaagctgagtattaaaatgtatgcatgttgtctaagaaattgaatactttgaatgtgtttcacagtttgaaataagctatttgatgtaatacttcttgtgtgtatgcacatgaacttagattttacatgaagtattttttcagtattatatgtaccctctgaaatacatagggatatgcgtattataccaaaatgttgctgaaaaatgggcacttaaagctttcagaatatgtcagtgctgatgtagcatgcttgttgcaattgccttttttctgtataaatgtctttaatgcaatatactggaaagcttttctattttaataaaaataatttttatatgatcatgcatgcttctaa

SEQ ID NO: 421803 - DNA, 2281 bp, Homo sapiens
  misc_feature (111)..(111): n is a, c, g, or t
  misc_feature (1469)..(1469): n is a, c, g, or t
  misc_feature (1537)..(1537): n is a, c, g, or t
catgcacacatatgtttattgcagcactattcacagtagcaaagacttagaaccaacccaaatgcccatcagtgacagactgaataaagaaaatgtggcacatctacaccntggaatactatgcagccataaaaaaggatgagttcatgtcctttgcagggacatggatgaagctggaaaccatcattctcagcaaactaacacaagaacagaaaacaaaatactgcatgttctcactcataagtgggagttgaactatgagaacacatggacacagggaggggaacatcacacaccagggcctgtcagggagttgggggctaggggagggatagcattaggagaaatacctaatgtagatgacaggttgatgggttcagcaaaccaccatggcatgtgtatacctatgtaacaaatctgcacattctgcacatgtatcccagaacttaaagtacaataaaaacaaacaaaaaaaacagctaattaagccacttatattctgaaaatgtaggtttatattgctgtgacagagctgaagaccatgcttgccaaaatgcctgcaagagaatcctgatgtccaagaaaacggaaatggagattgttgatggtctcatcgagggttgtaagacccagcccttgcctcaagatcctctttggcaatgttttcttgaaagctcacaatctgttcaccctggagtcactgtacaccctcctccctctacaggcctcgatggggctaaattgcattgttgttctaaagcaaacacttcaacatgtaggttagtatttcattttcctttaccaaaatcagtagaaaatggcattttaattaatgattttaagcctagcaaacgtgtgttatattcttacgtggtataggtttagcatttagaaaatataaaatattatttcatccaacaaatgtgtattgagcattgtgtaccgtatacaaaacattgttctgtatattgagtgctaaaagctctgtgttttggggtgtggaggattagcattggcagggtagtaaatatttaagatgatgcaatagatgaattctatccttatagagatcattaagtaagcttacagtttagaagatgttttgatctgacatctaagggacattctctttattaaattatgaaactttgaactttttattatattggtggataacctgggttagcacttataaccagagttaggtggtagcatattggcattcatcttggtgatacacttagagatgaaaaattaacaatacaaatataggatgtaggaattgcagtctagagacaaaaacaaatggagatacctaagatcatggtagaacacaggtacaatagaaatgtgctttattagagatatttggggtaaaaagggaccccatgttactcggatatcctgaaatgaatataagataccaggcgtaaaacaatctttcctgtggtttctaaattggatggacntttagcaaaaaattttgcctagaatagctcatcagactttggtaattgtcaatcaaactttggcaaantttttaaaagacatgaaggtcgggcgcggtggctcatgcctgtaatcccaacacttcaggaggctgaggcaggggatcacctgagatcaggagtttgagaccagcctggccaatatggtgaaaccctgtctctactaaaaaatatacaaaatttagcggggcgtggtggcacatgcctgtaattccagctacttgagaggctgaggcagaagaatcacttggacctgggaggcagaggttgcagtgagccgtgattgcgccactgcactccagcctgagtgacacagtgaagactccgtctcaaaataaattaattaattaattaaagacatgaaaaagagcgagactctgtctccaaataaataaatgaaagacgtgaaaaatctccaaagaaaattaacaaaaaggcttaaagggaaattaaattaggcttgtaattaaggaaattagattgcttgtagaagttaataaatatatttatgggaaggatgctgagtgtttctttgaatgcccacaaaaaagtttacacctacgtagagtcactagaggttggaatggccgtgttgtcccgaaagagcttcagtaaggaaggcttttccttctctctaaccttgatacagggttttatggtttgctgaaggcttgcattttcatcagatttcatcttcataaaaccttcacaggtgactgtgatcgcccagagtctgtcctcaggggccatcatttctttgcacacatttttcc

SEQ ID NO: 421804 - DNA, 1802 bp, Homo sapiens
gatgaacccttgtcaggggccgtgtctgcgggaggccgaaggatcccgggtgacatgctttctttgggtgcgaggcagcgtctcggcagaaagaatattgcgagtattactgagggtacatgaaggagagaagcccctttggttcggccttggactaagcccttgttctcaggtgaacttgcagtgtgatcttgagtaaggtcagtctcctctctcacctcagtggcccgaaacctcaggaggtggcagaggttttctaatgactctcccagctctgacatcctctgacttcactctgggagaacgtgggctggtggactcctggcagaagccgacacacagttgggccataacaaagagccctggtacggggcacgttcccgcccccgggaggttttggaaacactgtgaggcagggggcggggcttgagcgggccgcagccagtcaccaaagggccgggcgctgggggcggggcctcgcgcgagcggcggcggtagcggcggcagcggctgcggccaagctgggtccgagcatcccgcggctctggagccgcccggcccggacatggcgaccgtccgggcctctctgcgaggtgcgctgctccttctgctggccgtggcgggggtcgcggaggtggcagggggcctggctccgggcagtgcgggtgagtaacctccagagcaacggttcgaagctgtcgggagcggccgccacagcgctccaagatggcgcggggcagggggcgggggtgcgcgcgacccccagaccctgcccacgtccggcgaccccgggaccccaggtctcagcgctccagaggctggtgccgaggcggggcgagtgaggaactctctccgccccaagatcttctgggcggtgactcgggtttgaggccttggtctgtcacccaccgacacgggccccctcttcggcactgaccccttcgcttgcctctgctgcttgtcagaaaagggtgcgatgcccccgcccaggatcgtcgcgaggtttagatgggatttcggatacgcagccgccctaccgcggccctagttagttattgttacttgttacttgacccgcacttggttcataacgaccttggtggcggtgagcactgacggtccccacagcccgcgtggtgggtcctggactcgggcaggagacattaaaaatcagtaaaccctgtcccccgggggctggcaggcttgaggagagaaattcttgctctacaagaactaaaccaaggatggataggaaactgttaagtgcttattgattgcttcccgcttgctggccttttgagtgcacgccgactccttccgtccaaaagctctctcggtaggagatggggtacagcaggagattgaagtaactcgaattcaaggcagaaatgtccagaggaaatgaagggccatgtatgagtgcacagagggagagaggacatcgacctaggatgagtggaaagtggagtgattccccctagctgtactagacattgaaagatggctaggacgtgtgcatgcaaaagtggtgaagtgcattgcttacagggagacaggcagagacaccttaaaaaaaaaaaaaaaaaaaagcaaagtcagccgggtgcggtaggctctcccctgtaatcccagcactttgggaggtggaggcgggcggatcccttgagcccaggagttcgaggccatcctgcttaacatagtgaaaccccgtttctactaaaaatacaaaaattagccgggcatggtggtgtatgcctgttgttccagctacccgcgaggctgagatacgaggattgctcgag

SEQ ID NO: 421805 - DNA, 3193 bp, Homo sapiens
gatgaacccttgtcaggggccgtgtctgcgggaggccgaaggatcccgggtgacatgctttctttgggtgcgaggcagcgtctcggcagaaagaatattgcgagtattactgagggtacatgaaggagagaagcccctttggttcggccttggactaagcccttgttctcaggtgaacttgcagtgtgatcttgagtaaggtcagtctcctctctcacctcagtggcccgaaacctcaggaggtggcagaggttttctaatgactctcccagctctgacatcctctgacttcactctgggagaacgtgggctggtggactcctggcagaagccgacacacagttgggccataacaaagagccctggtacggggcacgttcccgcccccgggaggttttggaaacactgtgaggcagggggcggggcttgagcgggccgcagccagtcaccaaagggccgggcgctgggggcggggcctcgcgcgagcggcggcggtagcggcggcagcggctgcggccaagctgggtccgagcatcccgcggctctggagccgcccggcccggacatggcgaccgtccgggcctctctgcgaggtgcgctgctccttctgctggccgtggcgggggtcgcggaggtggcagggggcctggctccgggcagtgcgggtgcattgtgttgtaatcattcaaaggataaccaaatgtgccgtgatgtatgtgaacagattttctcctcaaaaagtgaatcccgactaaaacatctgttgcagcgagccccagattattgcccagagacaatggttgaaatttggaattgtatgaattcatctttgccaggtgtgtttaagaagtctgatggctgggttggcttaggctgctgtgaactggctattgccttggagtgtcgacaggcatgcaagcaggcatcttcaaagaatgatatttccaaagtttgcagaaaagaatatgagaatgctcttttcagttgcattagcagaaatgaaatgggctcggtttgttgcagttatgcaggtcatcacacaaactgccgagaatactgtcaagccatttttcgaacagactcttctcctggtccatctcagataaaagcagtggaaaattattgcgcctctattagtccacaattaatacattgtgtgaacaattatactcaatcttatccaatgaggaacccaacggatatgtttgaattttttgccaatgagcaattattacttttgtaattaaaaagtcataacaatgagaagagagcctgatatcttttaaaaattagggcctcctgatgaagctgcacctgaaatggctcttcagagtctccgctttgtacatcctggaatccattttcttcacctagaggtgaccagatttataaaaactgactgattgaccaaactgaccaaagactgatttataagatgtcaatgttttgatttacactgtgatattgaaagaggctctgtggcttatgtctgtaatctcagcgctttgtgatgctgaggcaggagaattgcttgaggccaagagtttgagaccagcctgggtaacaaagtgagaacccagctctacaaaaaaataataataataattagctgggtgtggtgacacacccagctcctcaggaggctgatgctggaggatcgcttgagcccaagagttcaaggttgcagtgagccatcatcacttcactgcactccagccagggcaacaaagcaagaccctgcctcggggggaaaaaaaaagatgaaaagaaagaaagacttgttttttgtaactcagtagcagtactgtgtgccttgtttggccaccatctaaatcagaactctaatggcttttgacatcctttggtgtagctgtgtggtcaaaatcagaggatgaagcattgccccaataaccttcatttgttttaaaggcagatctgtgctctctgacatttagtctatacgagatactgctggagctaaggagatggcagctcaataaaaaagcagaaagaggttttaagggtagaacaaccgtctccatctttgccaatacagaggaatctggaaaagaaggcgccaaacagatatgcacagatttcttccaaagtcagagaaaactacttcaaagaagcccttctgaattctgtaatatggttgaaagtgtttttttatttctgattctttgagaaaattaaaggcagagccaaactgatatcttgtcagagttcgctactgtactatttatgttacaacttagattaattagcataagatatataaaagctttatgtggtcctggaatgtaatgaaatattgtgtctggaattggttccttccggtgggttcttggtctcgctgacttcaagagtgaagccacagaccctcgcgtgagtgttacagctcttaaaggtggcatccagagttgtttgttcctcccagtgggttcgtggtctcgctgacttcaggagtgaagccgcagaccttcgcagtgagtgttacagctcatgaaggtagtgccgacccaaagagtgagcagcaacaagatttattgtgaagagtgaaagaacaaagcttccacagcatggaaagggactggagcaggttgccactgctggctcgggtggccagcttttattcccttatttggccccgcccacatctgctgattggtccgttttacagagtgctgattggtctatttttacagagtgctgattgctacctttacaaacctttagctagccagaaaagttctccaagtccccacctgacccagaggcccagccggcttcacctctcaatatggtgtttgtgtttgttgctataaaaattagtcatttctctcatgtcaagaacataatcccttttaggtaattgtttctagcaggaaataattccagtttcatctacaataccttttctaggaatatcaaatacctctcctgtgaggacttcttaggtgtaggatggcctttcatttttgtaaggatggtgctaaagatcccatgattggagacagtggtgaattctggtaatagataccttgtccacctaaagctcctcacctttttgctacactgcaaagtaatagagaatttggtagggcctgtattctgcaaatactgacatataactaagagtagtaatggcttccactacactgccatgttctgtgctaagcagagcatgaca

SEQ ID NO: 421806 - DNA, 4980 bp, Homo sapiens
gatgaacccttgtcaggggccgtgtctgcgggaggccgaaggatcccgggtgacatgctttctttgggtgcgaggcagcgtctcggcagaaagaatattgcgagtattactgagggtacatgaaggagagaagcccctttggttcggccttggactaagcccttgttctcaggtgaacttgcagtgtgatcttgagtaaggtcagtctcctctctcacctcagtggcccgaaacctcaggaggtggcagaggttttctaatgactctcccagctctgacatcctctgacttcactctgggagaacgtgggctggtggactcctggcagaagccgacacacagttgggccataacaaagagccctggtacggggcacgttcccgcccccgggaggttttggaaacactgtgaggcagggggcggggcttgagcgggccgcagccagtcaccaaagggccgggcgctgggggcggggcctcgcgcgagcggcggcggtagcggcggcagcggctgcggccaagctgggtccgagcatcccgcggctctggagccgcccggcccggacatggcgaccgtccgggcctctctgcgaggtgcgctgctccttctgctggccgtggcgggggtcgcggaggtggcagggggcctggctccgggcagtgcgggtgcattgtgttgtaatcattcaaaggataaccaaatgtgccgtgatgtatgtgaacagcattcatggattttaccgtctcagctatttgcagattttctcctcaaaaagtgaatcccgactaaaacatctgttgcagcgagccccagattattgcccagagacaatggttgaaatttggaattgtatgaattcatctttgccaggtgtgtttaagaagtctgatggctgggttggcttaggctgctgtgaactggctattgccttggagtgtcgacaggcatgcaagcaggcatcttcaaagaatgatatttccaaagtttgcagaaaagaatatgagcctgtcctccgttattttagtgtgcttccttctcttgtctggatttctgcattgccctaggaagtctgccagtatgtgttgatgaaggacaagacaggaaagaatgctcttttcagttgcattagcagaaatgaaatgggctcggtttgttgcagttatgcaggtcatcacacaaactgccgagaatactgtcaagccatttttcgaacagactcttctcctggtccatctcagataaaagcagtggaaaattattgcgcctctattagtccacaattaatacattgtgtgaacaattatactcaatcttatccaatgaggaacccaacggatagtttatattgctgtgacagagctgaagaccatgcttgccaaaatgcctgcaagagaatcctgatgtccaagaaaacggaaatggagattgttgatggtctcatcgagggttgtaagacccagcccttgcctcaagatcctctttggcaatgttttcttgaaagctcacaatctgttcaccctggagtcactgtacaccctcctccctctacaggcctcgatggggctaaattgcattgttgttctaaagcaaacacttcaacatgtagggaactctgcactaaactttacagcatgagctggggcaatacacagagttggcaagagtttgatcgcttttgtgaatataatccagtggaagtgtccatgttgacctgtttagcggatgtccgggaaccttgccagttgggctgtagaaaccttacttactgtactaattttaacaacaggccaacagaacttttcaggagttgtaatgcacagtcagatcaaggagccatgaatgacatgaagttgtgggagaaaggaagcataaagatgccatttatcaatatacctgttcttgatattaaaaagtgccagccagagatgtggaaagcaatagcttgttcactgcagattaaaccttgtcatagtaaatctcggggaagtattatttgcaaatcagattgtgtggagattcttaaaaaatgtggagaccagaacaaattccctgaagaccacacagctgaaagtatttgtgagcttctgtcacctacagatgatctgaagaattgtatacctttggatacatacctcaggccaagtactttaggtaacattgtagaagaagtgactcatccctgtaacccaaatccttgccctgccaatgagctctgtgaagtaaaccgaaaaggatgtccatctggagatccctgtcttccatacttttgtgttcaaggttgcaaactgggagaagcttctgatttcattgtccgtcaagggacactaatccaggtgccatcatctgcaggggaagttggttgttataaaatctgttcatgtggacaaagtggactcttagaaaactgtatggaaatgcactgtatagacctccagaagtcttgtattgttggaggaaaaagaaaaagtcatggaacatcctttagtattgactgcaatgtctgttcttgttttgctggcaatttggtgtgctctacccgcctttgcctcagtgagcacagttcagaagatgaccgtcgtaccttcacaggtctgccctgtaactgtgcagatcagtttgtccctgtatgtgggcagaatgggcgcacttaccccagtgcctgcattgctcgctgtgtgggcctccaagaccatcagtttgagtttggatcatgcatgtcaaaggatccatgtaatcctaatccctgccaaaaaaaccaaaggtgcatacccaaaccacaggtctgcctgacgacttttgataaatttggatgtagccagtatgagtgtgtaccaagacagctcgcgtgtgaccaggtccaagatcctgtttgtgacacagaccacatggagcacaacaatctctgcactttataccaaagaggaaaaagcctctcttacaaaggtccctgccagcccttttgcagagcaaccgagcccgtatgtgggcacaatggtgagacctacagcagtgtgtgtgctgcctactcggatcgcgtggcagtcgattactatggggactgccaggccgtcggagtcctctcagagcacagctccgtcgccgagtgtgcttctgtcaagtgtccttcgctcttggcagctggatgcaaacccatcatcccaccgggtgcttgttgcccattatgtgctgggatgttaagagttttatttgacaaagaaaaactggatactattgctaaggtaacaaataaaaagccaataacagttctggaaatacttcagaaaatccgcatgcacgtgtctgtcccacagtgtgatgtgtttggatacttcagcattgaatcagaaattgtgatcctgatcattcccgtcgatcactatccaaaagctctgcagattgaagcctgcaataaagaagcagagaagattgagtcccttatcaactctgacagcccgactttggcgtcccatgtccctctctctgccctcatcatttcccaggtacaggtctccagcagtgtgccatcggccggtgtcagggccaggccttcttgccactccctcctccttcccctcagcttgggccttgccttgcacttgctctggacatataactgactgcccacggaaagtgcagaatgctcctccacctcactctcctgccttgaaaaagacattcaggactgctggtttgtagttgaatattggccaaggaaaggcacatgtcacctctattcgccacacagtatttttttttttaatccgccaatattagtaggatttttgttttgtttttacaaatgttaaaatgtgttgttccaaatactaatgaaaacagaatgtctcttcctggtagaccactgccatatgatttacatttcctcaccataagggtcccccactctaaagcaaatttatcgctgggaaatgagatgaccactttttagaaagataattcactgtactatcaggttcacaaacttcatttcagagttctttttgaagtatttaaggttcccgttgcatttgttttgtttacagataattacctactctggctagaagctaggggtcccagtgaagagccactgccattaaagaatatgaaacatagataaaacatctttgaaattatgtaaattatgtaaattatcaggcaaatttgcattaaattacagaaatttaattcagaaccccaactactgtgttatgcaaaagcaagctgattaaatgacactcatataattatatgttgtaagcaacaggctcactggtcacggatttgtgtctgtgacttttgtgaaagggagaagtgacattgcatcaaagcatcttgcattatgcaatttttatattaaccagatatatattcatcggtattcatccaagttaaatgtagagtttttaaacatcaatctttaaaccaattgctgctacttatataattgccaaaaagtgaaataatgtgtagttcatgtaaataatacattatatttctattttattatgaagaaggtgaatagccatatttgtaaaatgacaatcatgtgtgttaacccagtgctttccattcgtgaaaacacatttgctttttgtgatatgcacaatgtagataagtgttctgtctgactttcttttttgatatagaagtataaagaattgtggtttatatatttaaaagtgtcaagctgagtattaaaatgtatgcatgttgtctaagaaattgaatactttgaatgtgtttcacagtttgaaataagttttcagtattatatgtaccctctgaaatacatagggatatgcgtattataccaaaatgttgctgaaaaatgggcacttaaagctttcagaatatgtcagtgctgatgtagcatgcttgttgcaattgccttttttctgtataaatgtctttaatgcaatatactggaaagcttttctattttaataaaaataatttttatatgatcatgcatgcttctaa

SEQ ID NO: 421807 - DNA, 1851 bp, Homo sapiens
gatgaacccttgtcaggggccgtgtctgcgggaggccgaaggatcccgggtgacatgctttctttgggtgcgaggcagcgtctcggcagaaagaatattgcgagtattactgagggtacatgaaggagagaagcccctttggttcggccttggactaagcccttgttctcaggtgaacttgcagtgtgatcttgagtaaggtcagtctcctctctcacctcagtggcccgaaacctcaggaggtggcagaggttttctaatgactctcccagctctgacatcctctgacttcactctgggagaacgtgggctggtggactcctggcagaagccgacacacagttgggccataacaaagagccctggtacggggcacgttcccgcccccgggaggttttggaaacactgtgaggcagggggcggggcttgagcgggccgcagccagtcaccaaagggccgggcgctgggggcggggcctcgcgcgagcggcggcggtagcggcggcagcggctgcggccaagctgggtccgagcatcccgcggctctggagccgcccggcccggacatggcgaccgtccgggcctctctgcgaggtgcgctgctccttctgctggccgtggcgggggtcgcggaggtggcagggggcctggctccgggcagtgcgggtgcattgtgttgtaatcattcaaaggataaccaaatgtgccgtgatgtatgtgaacagcattcatggattttaccgtctcagctatttgcagattttctcctcaaaaagtgaatcccgactaaaacatctgttgcagcgagccccagattattgcccagagacaatggttgaaatttggaattgtatgaattcatctttgccaggtgtgtttaagaagtctgatggctgggttggcttaggctgctgtgaactggctattgccttggagtgtcgacaggcatgcaagcaggcatcttcaaagaatgatatttccaaagtttgcagaaaagaatatgagcctgtcctccgttattttagtgtgcttccttctcttgtctggatttctgcattgccctaggaagtctgccagtatgtgttgatgaaggacaagacaggaaagaatgctcttttcagttgcattagcagaaatgaaatgggctcggtttgttgcagttatgcaggtcatcacacaaactgccgagaatactgtcaagccatttttcgaacagactcttctcctggtccatctcagataaaagcagtggaaaattattgcgcctctattagtccacaattaatacattgtgtgaacaattatactcaatcttatccaatgaggaacccaacggatagtttatattgctgtgacagagctgaagaccatgcttgccaaaatgcctgcaagagaatcctgatgtccaagaaaacggaaatggagattgttgatggtctcatcgagggttgtaagacccagcccttgcctcaagatcctctttggcaatgttttcttgaaagctcacaatctgttcaccctggagtcactgtacaccctcctccctctacaggcctcgatggggctaaattgcattgttgttctaaagcaaacacttcaacatgtagggaactctgcactaaactttacagcatgagctggggcaatacacagagttggcaagagtttgatcgcttttgtgaatataatccagtggaagtgtccatgttgacctgtttagcggatgtccgggaaccttgccagttgggctgtagaaaccttacttactgtactaattttaacaacaggtaagacaaattattatacatggaatggaaatattttatcattaattataaataagtgaaatacc

SEQ ID NO: 421808 - DNA, 154 bp, Homo sapiens
ggttgttaatttctgtttatttgtttttcttcaatttacagaatgctcttttcagttgcattagcagaaatgaaagtaagtatatttgtcaatggttgtacaaacagtccaaagatataattagccatctgaagcaatgtgcacagcaggattc

SEQ ID NO: 421809 - DNA, 571 bp, Homo sapiens
gtgaaagttctattacataatctttaatagtgatttagtacctataagacttttatcaagtgtatatctaatgttataaaacaatgtcatagaacagtaccatctctctcagctaatttttgcttgtacaggttgcaaactgggagaagcttctgatttcattgtccgtcaagggacactaatccaggtgccatcatctgcaggggaagttggttgttataaaatctgttcatgtggacaaagtggactcttagaaaactgtatggaaatgcactgtatagacctccagaagtcttgtattgttggaggaaaaagaaaaagtgagtcttaagctctgattttgtttttaatatgagattagttatttttactttgtaggaagaatactggatagattctgaccacagagtaaggtctgcatatcagatactccagggcagtattttcaaactatacagagcactaggacttctaaggaagtctttagaagtcccctcaataaggggctaatggctaataataattaatatttattgaattctaatcatgtgctaaacacaaagctaagtct

SEQ ID NO: 421810 - DNA, 474 bp, Homo sapiens
ttggtgaaagttctattacataatctttaatagtgatttagtacctataagacttttatcaagtgtatatctaatgttataaaacaatgtcatagaacagtaccatctctctcagctaatttttgcttgtacaggttgcaaactgggagaagcttctgatttcattgtccgtcaagggacactaatccaggtgccatcatctgcaggggaagttggttgttataaaatctgttcatgtggacaaagtggactcttagaaaactgtatggaaatgcactgtatagacctccagaagtcttgtattgttggaggaaaaagaaaaagtgagtcttaagctctgattttgtttttaatatgagattagttatttttactttgtaggaagaatactggatagattctgaccacagagtaaggtctgcatatcagatactccagggcagtattttcaaactatacagagcactaggactt

SEQ ID NO: 421811 - DNA, 407 bp, Homo sapiens
attttgaggccctgctgtctgaaccagttttcttatggacagctgctttgacttttagtagtagccttgaaacatctggcatgctatctctttttattgctacttatgaccaaaacatttaaacattttgtttttaaggtgtgtttaagaagtctgatggctgggttggcttaggctgctgtgaactggctattgccttggagtgtcgacaggcatgcaagcaggtaacactgggtagtcaggctctcaaacatcatggagtgcagtttggttttagctgtgcacatgtcttgggccttgcccacctcctagctttgcagaggtaacccgtaaaaactgcaaatttagcattttttgtatagaccatttccttttagacttgctgtttttttatttatggctgctgc

SEQ ID NO: 421812 - DNA, 497 bp, Homo sapiens
ccctgtctctaaaaaatagtgaagtccaagatgtattaagcaaaaaaaaagtaaatcacagaactaaaaatatagtgtgatatatttttagtttatacctaattgtttcactttatatattttccacagtgtttgaattttttgccaatgagcaattattacttttgtaattaaaaagtcataacaatgagaagagagcctgatatcttttaaaaattagggcctcctgatgaagctgcacctgaaatggctcttcagagtctccgctttgtacatcctggaatccattttcttcacctagaggtgaccagatttataaaaactgactgattgaccaaactgaccaaagactgatttataagatgtcaatgttttgatttacactgtgatattgaaagaggctctgtggcttatgtctgtaatctcagcgctttgtgatgctgaggcaggagaattgcttgaggccaagagtttgagaccagcctgggtaacaaagt

SEQ ID NO: 421813 - DNA, 450 bp, Homo sapiens
aaaagaaagaaagacttgttttttgtaactcagtagcagtactgtgtgccttgtttggccaccatctaaatcagaactctaatggcttttgacatcctttggtgtagctgtgtggtcaaaatcagaggatgaagcattgccccaataaccttcatttgttttaaaggcagatctgtgctctctgacatttagtctatacgagatactgctggagctaaggagatggcagctcaataaaaaagcagaaagaggttttaagggtagaacaaccgtctccatctttgccaatacagaggaatctggaaaagaaggcgccaaacagatatgcacagatttcttccaaagtcagagaaaactacttcaaagaagcccttctgaattctgtaatatggttgaaagtgtttttttatttctgattctttgagaaaattaaaggcagagccaaactga

SEQ ID NO: 421814 - DNA, 5040 bp, Homo sapiens
gatgaacccttgtcaggggccgtgtctgcgggaggccgaaggatcccgggtgacatgctttctttgggtgcgaggcagcgtctcggcagaaagaatattgcgagtattactgagggtacatgaaggagagaagcccctttggttcggccttggactaagcccttgttctcaggtgaacttgcagtgtgatcttgagtaaggtcagtctcctctctcacctcagtggcccgaaacctcaggaggtggcagaggttttctaatgactctcccagctctgacatcctctgacttcactctgggagaacgtgggctggtggactcctggcagaagccgacacacagttgggccataacaaagagccctggtacggggcacgttcccgcccccgggaggttttggaaacactgtgaggcagggggcggggcttgagcgggccgcagccagtcaccaaagggccgggcgctgggggcggggcctcgcgcgagcggcggcggtagcggcggcagcggctgcggccaagctgggtccgagcatcccgcggctctggagccgcccggcccggacatggcgaccgtccgggcctctctgcgaggtgcgctgctccttctgctggccgtggcgggggtcgcggaggtggcagggggcctggctccgggcagtgcgggtgcattgtgttgtaatcattcaaaggataaccaaatgtgccgtgatgtatgtgaacagcattcatggattttaccgtctcagctatttgcagattttctcctcaaaaagtgaatcccgactaaaacatctgttgcagcgagccccagattattgcccagagacaatggttgaaatttggaattgtatgaattcatctttgccaggtgtgtttaagaagtctgatggctgggttggcttaggctgctgtgaactggctattgccttggagtgtcgacaggcatgcaagcaggcatcttcaaagaatgatatttccaaagtttgcagaaaagaatatgagcctgtcctccgttattttagtgtgcttccttctcttgtctggatttctgcattgccctaggaagtctgccagtatgtgttgatgaaggacaagacaggaaagaatgctcttttcagttgcattagcagaaatgaaatgggctcggtttgttgcagttatgcaggtcatcacacaaactgccgagaatactgtcaagccatttttcgaacagactcttctcctggtccatctcagataaaagcagtggaaaattattgcgcctctattagtccacaattaatacattgtgtgaacaattatactcaatcttatccaatgaggaacccaacggatagtttatattgctgtgacagagctgaagaccatgcttgccaaaatgcctgcaagagaatcctgatgtccaagaaaacggaaatggagattgttgatggtctcatcgagggttgtaagacccagcccttgcctcaagatcctctttggcaatgttttcttgaaagctcacaatctgttcaccctggagtcactgtacaccctcctccctctacaggcctcgatggggctaaattgcattgttgttctaaagcaaacacttcaacatgtagggaactctgcactaaactttacagcatgagctggggcaatacacagagttggcaagagtttgatcgcttttgtgaatataatccagtggaagtgtccatgttgacctgtttagcggatgtccgggaaccttgccagttgggctgtagaaaccttacttactgtactaattttaacaacaggccaacagaacttttcaggagttgtaatgcacagtcagatcaaggagccatgaatgacatgaagttgtgggagaaaggaagcataaagatgccatttatcaatatacctgttcttgatattaaaaagtgccagccagagatgtggaaagcaatagcttgttcactgcagattaaaccttgtcatagtaaatctcggggaagtattatttgcaaatcagattgtgtggagattcttaaaaaatgtggagaccagaacaaattccctgaagaccacacagctgaaagtatttgtgagcttctgtcacctacagatgatctgaagaattgtatacctttggatacatacctcaggccaagtactttaggtaacattgtagaagaagtgactcatccctgtaacccaaatccttgccctgccaatgagctctgtgaagtaaaccgaaaaggatgtccatctggagatccctgtcttccatacttttgtgttcaaggttgcaaactgggagaagcttctgatttcattgtccgtcaagggacactaatccaggtgccatcatctgcaggggaagttggttgttataaaatctgttcatgtggacaaagtggactcttagaaaactgtatggaaatgcactgtatagacctccagaagtcttgtattgttggaggaaaaagaaaaagtcatggaacatcctttagtattgactgcaatgtctgttcttgttttgctggcaatttggtgtgctctacccgcctttgcctcagtgagcacagttcagaagatgaccgtcgtaccttcacaggtctgccctgtaactgtgcagatcagtttgtccctgtatgtgggcagaatgggcgcacttaccccagtgcctgcattgctcgctgtgtgggcctccaagaccatcagtttgagtttggatcatgcatgtcaaaggatccatgtaatcctaatccctgccaaaaaaaccaaaggtgcatacccaaaccacaggtctgcctgacgacttttgataaatttggatgtagccagtatgagtgtgtaccaagacagctcgcgtgtgaccaggtccaagatcctgtttgtgacacagaccacatggagcacaacaatctctgcactttataccaaagaggaaaaagcctctcttacaaaggtccctgccagcccttttgcagagcaaccgagcccgtatgtgggcacaatggtgagacctacagcagtgtgtgtgctgcctactcggatcgcgtggcagtcgattactatggggactgccaggccgtcggagtcctctcagagcacagctccgtcgccgagtgtgcttctgtcaagtgtccttcgctcttggcagctggatgcaaacccatcatcccaccgggtgcttgttgcccattatgtgctgggatgttaagagttttatttgacaaagaaaaactggatactattgctaaggtaacaaataaaaagccaataacagttctggaaatacttcagaaaatccgcatgcacgtgtctgtcccacagtgtgatgtgtttggatacttcagcattgaatcagaaattgtgatcctgatcattcccgtcgatcactatccaaaagctctgcagattgaagcctgcaataaagaagcagagaagattgagtcccttatcaactctgacagcccgactttggcgtcccatgtccctctctctgccctcatcatttcccaggtacaggtctccagcagtgtgccatcggccggtgtcagggccaggccttcttgccactccctcctccttcccctcagcttgggccttgccttgcacttgctctggacatataactgactgcccacggaaagtgcagaatgctcctccacctcactctcctgccttgaaaaagacattcaggactgctggtttgtagttgaatattggccaaggaaaggcacatgtcacctctattcgccacacagtatttttttttttaatccgccaatattagtaggatttttgttttgtttttacaaatgttaaaatgtgttgttccaaatactaatgaaaacagaatgtctcttcctggtagaccactgccatatgatttacatttcctcaccataagggtcccccactctaaagcaaatttatcgctgggaaatgagatgaccactttttagaaagataattcactgtactatcaggttcacaaacttcatttcagagttctttttgaagtatttaaggttcccgttgcatttgttttgtttacagataattacctactctggctagaagctaggggtcccagtgaagagccactgccattaaagaatatgaaacatagataaaacatctttgaaattatgtaaattatgtaaattatcaggcaaatttgcattaaattacagaaatttaattcagaaccccaactactgtgttatgcaaaagcaagctgattaaatgacactcatataattatatgttgtaagcaacaggctcactggtcacggatttgtgtctgtgacttttgtgaaagggagaagtgacattgcatcaaagcatcttgcattatgcaatttttatattaaccagatatatattcatcggtattcatccaagttaaatgtagagtttttaaacatcaatctttaaaccaattgctgctacttatataattgccaaaaagtgaaataatgtgtagttcatgtaaataatacattatatttctattttattatgaagaaggtgaatagccatatttgtaaaatgacaatcatgtgtgttaacccagtgctttccattcgtgaaaacacatttgctttttgtgatatgcacaatgtagataagtgttctgtctgactttcttttttgatatagaagtataaagaattgtggtttatatatttaaaagtgtcaagctgagtattaaaatgtatgcatgttgtctaagaaattgaatactttgaatgtgtttcacagtttgaaataagctatttgatgtaatacttcttgtgtgtatgcacatgaacttagattttacatgaagtattttttcagtattatatgtaccctctgaaatacatagggatatgcgtattataccaaaatgttgctgaaaaatgggcacttaaagctttcagaatatgtcagtgctgatgtagcatgcttgttgcaattgccttttttctgtataaatgtctttaatgcaatatactggaaagcttttctattttaataaaaataatttttatatgatcatgcatgcttctaa

SEQ ID NO: 421815 - DNA, 2466 bp, Homo sapiens
gatgaacccttgtcaggggccgtgtctgcgggaggccgaaggatcccgggtgacatgctttctttgggtgcgaggcagcgtctcggcagaaagaatattgcgagtattactgagggtacatgaaggagagaagcccctttggttcggccttggactaagcccttgttctcaggtgaacttgcagtgtgatcttgagtaaggtcagtctcctctctcacctcagtggcccgaaacctcaggaggtggcagaggttttctaatgactctcccagctctgacatcctctgacttcactctgggagaacgtgggctggtggactcctggcagaagccgacacacagttgggccataacaaagagccctggtacggggcacgttcccgcccccgggaggttttggaaacactgtgaggcagggggcggggcttgagcgggccgcagccagtcaccaaagggccgggcgctgggggcggggcctcgcgcgagcggcggcggtagcggcggcagcggctgcggccaagctgggtccgagcatcccgcggctctggagccgcccggcccggacatggcgaccgtccgggcctctctgcgaggtgcgctgctccttctgctggccgtggcgggggtcgcggaggtggcagggggcctggctccgggcagtgcgggtgcattgtgttgtaatcattcaaaggataaccaaatgtgccgtgatgtatgtgaacagattttctcctcaaaaagtgaatcccgactaaaacatctgttgcagcgagccccagattattgcccagagacaatggttgaaatttggaattgtatgaattcatctttgccaggtgtgtttaagaagtctgatggctgggttggcttaggctgctgtgaactggctattgccttggagtgtcgacaggcatgcaagcaggcatcttcaaagaatgatatttccaaagtttgcagaaaagaatatgagaatgctcttttcagttgcattagcagaaatgaaatgggctcggtttgttgcagttatgcaggtcatcacacaaactgccgagaatactgtcaagccatttttcgaacagactcttctcctggtccatctcagataaaagcagtggaaaattattgcgcctctattagtccacaattaatacattgtgtgaacaattatactcaatcttatccaatgaggaacccaacggatagcagatctgtgctctctgacatttagtctatacgagatactgctggagctaaggagatggcagctcaataaaaaagcagaaagaggttttaagggtagaacaaccgtctccatctttgccaatacagaggaatctggaaaagaaggcgccaaacagatatgcacagatttcttccaaagtcagagaaaactacttcaaagaagcccttctgaattctgtaatatggttgaaagtgtttttttatttctgattctttgagaaaattaaaggcagagccaaactgatatcttgtcagagttcgctactgtactatttatgttacaacttagattaattagcataagatatataaaagctttatgtggtcctggaatgtaatgaaatattgtgtctggaattggttccttccggtgggttcttggtctcgctgacttcaagagtgaagccacagaccctcgcgtgagtgttacagctcttaaaggtggcatccagagttgtttgttcctcccagtgggttcgtggtctcgctgacttcaggagtgaagccgcagaccttcgcagtgagtgttacagctcatgaaggtagtgccgacccaaagagtgagcagcaacaagatttattgtgaagagtgaaagaacaaagcttccacagcatggaaagggactggagcaggttgccactgctggctcgggtggccagcttttattcccttatttggccccgcccacatctgctgattggtccgttttacagagtgctgattggtctatttttacagagtgctgattgctacctttacaaacctttagctagccagaaaagttctccaagtccccacctgacccagaggcccagccggcttcacctctcaatatggtgtttgtgtttgttgctataaaaattagtcatttctctcatgtcaagaacataatcccttttaggtaattgtttctagcaggaaataattccagtttcatctacaataccttttctaggaatatcaaatacctctcctgtgaggacttcttaggtgtaggatggcctttcatttttgtaaggatggtgctaaagatcccatgattggagacagtggtgaattctggtaatagataccttgtccacctaaagctcctcacctttttgctacactgcaaagtaatagagaatttggtagggcctgtattctgcaaatactgacatataactaagagtagtaatggcttccactacactgccatgttctgtgctaagcagagcatgaca

SEQ ID NO: 421816 - DNA, 1114 bp, Homo sapiens
ggagaaaacaggaacaatagaacaatatgctgagctacatttgctgcaatctgttgctattcagagtttaagtttcaggagaaaacaggaacaatagaacactctgcctgttatttttgttgtaatcaagcttttccacagttcttgaaaagtactatgtttcaaatttcaggaacaccagcgttagctgtaaaagttgcagcaatttattggctagtcatagaaaatttttgaacttttaactgtattttaattgatgtttattaaaaacactttgctatcagatatttggcataaatctgtactcttcattatagttttggggggagagaagattcagtcagaaaacttattcaaagtacctaagtattataaaggagtcaaaaaggtacaaagagaaaaggtcaagacatttttcaaatgagggaaaactaacaggatttatcactagtaaacctgctctaaaagaattcaagggaagctttttaaaaagaagggaagttatagcagaaggaaacttagaatggcaggaataaagaaggcataatgtatagggtaaatataatagacttctcttgaggttttaaaaattacatttgttatttgaaagaaaaaaattaacgttgttgtatgtgattctctgtagaggatatacagtttttttttgttgttcttgtttctgtttttttaaggtgaagtctctgtcacccaagctgaagtgcagttctgtgatcatggctcactgcagcttcaccctgggttcaggtgatcctcccacttcagcctcttcagtaactgggactacaggcatgtactaccacgtccagctaattttttttttcttttttttttagagatggggtctcactctgttgcccaggctaatgccaaactgctaacctcaagatattaatactatacagtagactataagaaattaagtattgtgtatcatccctagagcgacacagatttttccctaaaaaactacagattattttcaaaagcattaataaattaaggtggaatactaaaaaagattcaggtaacccaggaacgagaaacagaataaaacaatagtaaacctaaattttattttatttcattaatacag

SEQ ID NO: 421817 - DNA, 661 bp, Homo sapiens
tgcccagtcgcggaagagcagctgttttggcgtccgtttgctgcggtaggaacatggcggatcggctcacgcagcttcaggacgctgtgaattcggtgaggaatttcattcgattagcctctgtctttctctttcttgaggtaaagcaagggaggaaaggggcccaagaggcaaaacttgaaagtggggagcggactgagagacagggcttcggcataaagcgctctctcgggaggcgccaccgcgaactcggaggtttgaggccggctgccgggcggtgcttgaaggtgcgggagggagcagactctttcgcttgaggagaccgggaagatcgttcttgtccgggtgaggccgccaggacttgtgggctgcgcggtcctgtcgtgttccctgaggacagttttattttcttgtcagtggtgcttacgggttctctttcttttgggggttgggaggagaagcaggagcttttttctttcctcatcaattttaatccaccaagggagatctcatgctctggatgactgggtttttgtaatgaaatgtcagccgagagtattccttcaccagcgctttcaggttggtgcgggagcgatgctgaggtgaggtgagagattttctttcatcttagctcgttcctttgggcccagagtatccttcc

SEQ ID NO: 421818 - DNA, 592 bp, Homo sapiens
tgcccagtcgcggaagagcagctgttttggcgtccgtttgctgcggtaggaacatggcggatcggctcacgcagcttcaggacgctgtgaattcgagtatgcccagctttttgcagcactgattgcacgaacagcaaaagacattgatgttttgatagattccttacccagtgaagaatctacagctgctttacagacagggtctcgctttgccacacaggctggagtgcaatggcacagtcatagctcactgcaacctcagccttccacatttgccaagagccctgatccaggtgaagtgtgtaaaccttgcacgtggaattcccagcaaagaagctgtagggatcgggatagggcctgggaagtgtctgacttacagaaacccaccatgtcttgttctctgctggagacctctgcttctccatcttgtgaacatccacaggccccctgcaccgtaatcttgccctcttactgttgactcagtcctcatggaagttataaaagaacttgtgtggattagcttgctaaatacatccaagatttgaagaactgaaaacaaaatcagtattaaacctgctttttaaaaatgtaa

SEQ ID NO: 421819 - DNA, 1798 bp, Homo sapiens
  misc_feature (1763)..(1763): n is a, c, g, or t
tgcccagtcgcggaagagcagctgttttggcgtccgtttgctgcggtaggaacatggcggatcggctcacgcagcttcaggacgctgtgaattcgcttgcagatcagttttgtaatgccattggagtattgcagcaatgtggtcctcctgcctctttcaataatattcagacagcaattaacaaagaccagccagctaaccctacagaagagtatgcccagctttttgcagcactgattgcacgaacagcaaaagacattgatgttttgatagattccttacccagtgaagaatctacagctgctttacaggctgctagcttgtataagctagaagaagaaaaccatgaagctgctacatgtctggaggatgttgtttatcgaggagacatgcttctggagaagatacaaagcgcacttgctgatattgcacagtcacagctgaagacaagaagtggtacccatagccagtctcttccagactcatagcatcagtggataccatgtggctgagaaaagaactgtttgagtgccattaagaattctgcatcagacttagatacaagccttaccaacaattacagaaacattaaacactatgacacattacctttttagctatttttaatagtcttctattttcactcttgataagcttataaaatcatgattgaatcagctttaaagcatcataccatcattttttaactgagtgaaattattaaggcatgtaatacattaatgaacataatataaggaaacatatgtaaaattctgttatgacataatttatgtctccattttgttgtattggccagtacttttacaaatcaaaacatctctcaagccaaaggagaagacagtaagaacagacataagggacattttagtttaggctagtgtcctgcctcttagaggtggcattgtgtaaatctgagctttgagcaagaaagttttggaaattgtgttgcttttaagaaatagagttagtgtggctggataagaaagtcacatttatgcaaatgtttcttctgctagaacctcatacctgttctagttcatctccacgtttattttaccaagagatcctctgtcaagagaatttcctggctgttgtgaaagaatttttctacatcctgaactatttttcctatttcttttcaccttgctttttttcatccttaatttgcttgtcatcacaatgaagtatgttttttgaatcatcaattctttctcattctccatttatctgaaggttcttttgcccttattaacctctcaacttttattgctgtattctagtcagaccagaacatacttccactacatcagttacttggcatcatttcacctcagtttattattgccaaataataatttgtgtcagcattttcaactatggttattcatccaacccttggatctctttgagtctactgataatctccactggaaaggtggaattgaaatgtggtccacattttaactagctatttcctggggctgtatttttcagaatatgctgagctacatttgctgcaatctgttgctattcagagtttaagtttcaggagaaaacaggaacaatagaacactctgcctgttatttttgttgtaatcaagcttttccacagttcttgaaaagtactatgtttcaaatttcaggaacaccagcgttagctgtaaaagttgcagcaatttattggctagtcatagaaaatttttgaacttttaactgtattttaattgatgtttattaaaccncccctctttttattacgtagaaaacaaccaaacac

SEQ ID NO: 421820 - DNA, 2552 bp, Homo sapiens
tgcccagtcgcggaagagcagctgttttggcgtccgtttgctgcggtaggaacatggcggatcggctcacgcagcttcaggacgctgtgaattcgcttgcagatcagttttgtaatgccattggagtattgcagcaatgtggtcctcctgcctctttcaataatattcagacagcaattaacaaagaccagccagctaaccctacagaagagtatgcccagctttttgcagcactgattgcacgaacagcaaaagacattgatgttttgatagattccttacccagtgaagaatctacagctgctttacaggctgctagcttgtataagctagaagaagaaaaccatgaagctgctacatgtctggaggatgttgtttatcgaggagacatgcttctggagaagatacaaagcgcacttgctgatattgcacagtcacagctgaagacaagaagtggtacccatagccagtctcttccagactcatagcatcagtggataccatgtggctgagataccaacaattacagaaacattaaacactatgacacattacctttttagctatttttaatagtcttctattttcactcttgataagcttataaaatcatgattgaatcagctttaaagcatcataccatcattttttaactgagtgaaattattaaggcatgtaatacattaatgaacataatataaggaaacatatgtaaaattctgttatgacataatttatgtctccattttgttgtattggccagtacttttacaaatcaaaacatctctcaagccaaaggagaagacagtaagaacagacataagggacattttagtttaggctagtgtcctgcctcttagaggtggcattgtgtaaatctgagctttgagcaagaaagttttggaaattgtgttgcttttaagaaatagagttagtgtggctggataagaaagtcacatttatgcaaatgtttcttctgctagaacctcatacctgttctagttcatctccacgtttattttaccaagagatcctctgtcaagagaatttcctggctgttgtgaaagaatttttctacatcctgaactatttttcctatttcttttcaccttgctttttttcatccttaatttgcttgtcatcacaatgaagtatgttttttgaatcatcaattctttctcattctccatttatctgaaggttcttttgcccttattaacctctcaacttttattgctgtattctagtcagaccagaacatacttccactacatcagttacttggcatcatttcacctcagtttattattgccaaataataatttgtgtcagcattttcaactatggttattcatccaacccttggatctctttgagtctactgataatctccactggaaaggtggaattgaaatgtggtccacattttaactagctatttcctggggctgtatttttcagaatatgctgagctacatttgctgcaatctgttgctattcagagtttaagtttcaggagaaaacaggaacaatagaacactctgcctgttatttttgttgtaatcaagcttttccacagttcttgaaaagtactatgtttcaaatttcaggaacaccagcgttagctgtaaaagttgcagcaatttattggctagtcatagaaaatttttgaacttttaactgtattttaattgatgtttattaaaaacactttgctatcagatatttggcataaatctgtactcttcattatagttttggggggagagaagattcagtcagaaaacttattcaaagtacctaagtattataaaggagtcaaaaaggtacaaagagaaaaggtcaagacatttttcaaatgagggaaaactaacaggatttatcactagtaaacctgctctaaaagaattcaagggaagctttttaaaaagaagggaagttatagcagaaggaaacttagaatggcaggaataaagaaggcataatgtatagggtaaatataatagacttctcttgaggttttaaaaattacatttgttatttgaaagaaaaaaattaacgttgttgtatgtgattctctgtagaggatatacagtttttttttgttgttcttgtttctgtttttttaaggtgaagtctctgtcacccaagctgaagtgcagttctgtgatcatggctcactgcagcttcaccctgggttcaggtgatcctcccacttcagcctcttcagtaactgggactacaggcatgtactaccacgtccagctaattttttttttcttttttttttagagatggggtctcactctgttgcccaggctaatgccaaactgctaacctcaagatattaatactatacagtagactataagaaattaagtattgtgtatcatccctagagcgacacagatttttccctaaaaaactacagattattttcaaaagcattaataaattaaggtggaatactaaaaaagattcaggtaacccaggaacgagaaacagaataaaacaatagtaaacctaaattttattttatttcattaatacag

SEQ ID NO: 421821 - DNA, 2606 bp, Homo sapiens
tgcccagtcgcggaagagcagctgttttggcgtccgtttgctgcggtaggaacatggcggatcggctcacgcagcttcaggacgctgtgaattcgcttgcagatcagttttgtaatgccattggagtattgcagcaatgtggtcctcctgcctctttcaataatattcagacagcaattaacaaagaccagccagctaaccctacagaagagtatgcccagctttttgcagcactgattgcacgaacagcaaaagacattgatgttttgatagattccttacccagtgaagaatctacagctgctttacaggctgctagcttgtataagctagaagaagaaaaccatgaagctgctacatgtctggaggatgttgtttatcgaggagacatgcttctggagaagatacaaagcgcacttgctgatattgcacagtcacagctgaagacaagaagtggtacccatagccagtctcttccagactcatagcatcagtggataccatgtggctgagaaaagaactgtttgagtgccattaagaattctgcatcagacttagatacaagccttaccaacaattacagaaacattaaacactatgacacattacctttttagctatttttaatagtcttctattttcactcttgataagcttataaaatcatgattgaatcagctttaaagcatcataccatcattttttaactgagtgaaattattaaggcatgtaatacattaatgaacataatataaggaaacatatgtaaaattctgttatgacataatttatgtctccattttgttgtattggccagtacttttacaaatcaaaacatctctcaagccaaaggagaagacagtaagaacagacataagggacattttagtttaggctagtgtcctgcctcttagaggtggcattgtgtaaatctgagctttgagcaagaaagttttggaaattgtgttgcttttaagaaatagagttagtgtggctggataagaaagtcacatttatgcaaatgtttcttctgctagaacctcatacctgttctagttcatctccacgtttattttaccaagagatcctctgtcaagagaatttcctggctgttgtgaaagaatttttctacatcctgaactatttttcctatttcttttcaccttgctttttttcatccttaatttgcttgtcatcacaatgaagtatgttttttgaatcatcaattctttctcattctccatttatctgaaggttcttttgcccttattaacctctcaacttttattgctgtattctagtcagaccagaacatacttccactacatcagttacttggcatcatttcacctcagtttattattgccaaataataatttgtgtcagcattttcaactatggttattcatccaacccttggatctctttgagtctactgataatctccactggaaaggtggaattgaaatgtggtccacattttaactagctatttcctggggctgtatttttcagaatatgctgagctacatttgctgcaatctgttgctattcagagtttaagtttcaggagaaaacaggaacaatagaacactctgcctgttatttttgttgtaatcaagcttttccacagttcttgaaaagtactatgtttcaaatttcaggaacaccagcgttagctgtaaaagttgcagcaatttattggctagtcatagaaaatttttgaacttttaactgtattttaattgatgtttattaaaaacactttgctatcagatatttggcataaatctgtactcttcattatagttttggggggagagaagattcagtcagaaaacttattcaaagtacctaagtattataaaggagtcaaaaaggtacaaagagaaaaggtcaagacatttttcaaatgagggaaaactaacaggatttatcactagtaaacctgctctaaaagaattcaagggaagctttttaaaaagaagggaagttatagcagaaggaaacttagaatggcaggaataaagaaggcataatgtatagggtaaatataatagacttctcttgaggttttaaaaattacatttgttatttgaaagaaaaaaattaacgttgttgtatgtgattctctgtagaggatatacagtttttttttgttgttcttgtttctgtttttttaaggtgaagtctctgtcacccaagctgaagtgcagttctgtgatcatggctcactgcagcttcaccctgggttcaggtgatcctcccacttcagcctcttcagtaactgggactacaggcatgtactaccacgtccagctaattttttttttcttttttttttagagatggggtctcactctgttgcccaggctaatgccaaactgctaacctcaagatattaatactatacagtagactataagaaattaagtattgtgtatcatccctagagcgacacagatttttccctaaaaaactacagattattttcaaaagcattaataaattaaggtggaatactaaaaaagattcaggtaacccaggaacgagaaacagaataaaacaatagtaaacctaaattttattttatttcattaatacag

SEQ ID NO: 421822 - DNA, 1880 bp, Homo sapiens
tgcccagtcgcggaagagcagctgttttggcgtccgtttgctgcggtaggaacatggcggatcggctcacgcagcttcaggacgctgtgaattcgcttgcagatcagttttgtaatgccattggagtattgcagcaatgtggtcctcctgcctctttcaataatattcagacagcaattaacaaagaccagccagctaaccctacagaagagtatgcccagctttttgcagcactgattgcacgaacagcaaaagacattgatgttttgatagattccttacccagtgaagaatctacagctgctttacaggctgctagcttgtataagctagaagaagaaaaccatgaagctgctacatgtctggaggatgttgtttatcgaggagacatgcttctggagaagatacaaagcgcacttgctgatattgcacagtcacagctgaagacaagaagtggtacccatagccagtctcttccagactcatagcatcagtggataccatgtggctgagaaaagaactgtttgagtgccattaagaattctgcatcagacttagatacaagccttaccaacaattacagaaacattaaacactatgacacattacctttttagctatttttaatagtcttctattttcactcttgataagcttataaaatcatgattgaatcagctttaaagcatcataccatcattttttaactgagtgaaattattaaggcatgtaatacattaatgaacataatataaggaaacatatgtaaaattctgttatgacataatttatgtctccattttgttgtattggccagtacttttacaaatcaaaacatctctcaagccaaaggagaagacagtaagaacagacataagggacattttagtttaggctagtgtcctgcctcttagaggtggcattgtgtaaatctgagctttgagcaagaaagttttggaaattgtgttgcttttaagaaatagagttagtgtggctggataagaaagtcacatttatgcaaatgtttcttctgctagaacctcatacctgttctagttcatctccacgtttattttaccaagagatcctctgtcaagagaatttcctggctgttgtgaaagaatttttctacatcctgaactatttttcctatttcttttcaccttgctttttttcatccttaatttgcttgtcatcacaatgaagtatgttttttgaatcatcaattctttctcattctccatttatctgaaggttcttttgcccttattaacctctcaacttttattgctgtattctagtcagaccagaacatacttccactacatcagttacttggcatcatttcacctcagtttattattgccaaataataatttgtgtcagcattttcaactatggttattcatccaacccttggatctctttgagtctactgataatctccactggaaaggtggaattgaaatgtggtccacattttaactagctatttcctggggctgtatttttcagaatatgctgagctacatttgctgcaatctgttgctattcagagtttaagtttcaggagaaaacaggaacaatagaacactctgcctgttatttttgttgtaatcaagcttttccacagttcttgaaaagtactatgtttcaaatttcaggaacaccagcgttagctgtaaaagttgcagcaatttattggctagtcatagaaaatttttgaacttttaactgtattttaattgatgtttattaaaacaggcagagtgttctattgttcctgttttctcctgaaacttaaactctgaatagcaacagattgcagcaaatgtagctcagcatattctgaaaaatacagccccaggaaatagctagtt

SEQ ID NO: 421823 - DNA, 530 bp, Homo sapiens
tgcccagtcgcggaagagcagctgttttggcgtccgtttgctgcggtaggaacatggcggatcggctcacgcagcttcaggacgctgtgaattcgcttgcagatcagttttgtaatgccattggagtattgcagcaatgtggtcctcctgcctctttcaataatattcagacagcaattaacaaagaccagccagctaaccctacagaagagtatgcccagctttttgcagcactgattgcacgaacagcaaaagacattgatgttttgatagattccttacccagtgaagaatctacagctgctttacaggtaagcctctattcctttgagaattttaccagtaatagagaattttgaattaaaggaggtagatttagtaccttttgtctgtgtccatttgtgctgctataacaacatacctgagacagtaatttataaagaacagaaatttattttctcacagttctggagtctgggaagtccaacatggccacactggatgaaggtcaagatgtgggcatgtcgatc

SEQ ID NO: 421824 - DNA, 3527 bp, Homo sapiens
caattatttttcaatgtcagaagttattagagccactggcaaagctcatggttgaatatgacatttttctgcttttccctctaagaagtttttgagaatgttaatgttgaagtatgcaggctggacctaccagcaagtttaacacgttaattaggttaaaaagaatattaaaaggcaataattaaatatttcaattattttgtaattataatggtatcaaataagatgcaaaagaagttgatgcttattggtgcttaagagaattacaatactggttttatgagcatcttttctctgcaacagttaaactgcctcagagtttgtgaattgctgcaattcctggaatggaaacaggaattagggtcactggttgattggcacaggatctttccatcgtttctgctcctgacctctctctcttgcctttccttcccccagacaccctcttggtttccattcctttagttccctctgctttagaacacagattacatgttggaaagaaaaatggattaatggtaaaatttctaaaagctaaattgtacagtggggtctcacttcctagaagaaactattggtaatatttctttctaaaggtaatagtattaattgtatctggttttcttcaaaacttaactataatttccttgtcagggtgctcagtagctcttggtttgactttgggctaagggatgtgaaattttagctccttcccaccacctgtttcccctcactcccacccccagccaatattcttcataagcaaaaattatggttaagctaagctgaatgggttatattcaaagtaagtacagacggcaaataggcagacaaatacaggaatgtctttacaattagcccaccatggactgttttgagtctctgcatggtttccataattcattatgatgtatctttatgctctttcactgctcttctgtgcgttggagtttagcaattcagtgagactggggagtgtctcaagaatggaacctttgccttcaaggttgggtcatcaaaaatccctctaaaggatctaactgtaatgaactgtttttatttttgccattagtgcaagtatcaactggcagcctcaaacagctttagactatgtctcaggtctctcatagttatacttagaactgctctttcttgaagctaaaagaggtttttggagtaaagatctgcttcatgtctgctagcatggtatctgctgttcaacctagtatagagcatgtgaaatgcaactgtcctttaatggaattcagccaaactccaaaaatactgagttgcttctagttatctaaagtagtacagaatcactatcccgatgaagaagtggggtttttcagaagattgtaaactcatttccatggcacagatacaaatcatcgtcaggacttgttagccagtccatgtctcattgataggatgtagcctgccatctgcatagatggtttaacatggtgctgtttttgaaaacttgctgtggaaataaatttgacagaagagtagttatttgtaaagctgtcctagaaagaggttaattcttttggtatatgaatatttctcctccaatccttttaattaggtggttcagcttatcttgtattttctgagtcataactatactctagggccaagacctactataaaatctggggtcctaaccagagagttgtttagatcaatatgatatgctttgccaacatgatctaagaaggtattcattctttctgggtttgagaagagttgacgaaagtgtaagattatactctcatgctaaaataaggtataggctaagtgaaatactgtaaatgggttggttagaattaaagtttagaactctaaatcttatgcttatttttaaagtaaaaagttgcctcactgtcatgaaatcctgttactttcattaaaaaaaaaaatcctgtaaaatggtcaaattggataatgtaagagataatgatggctttgaggcatttcatactttaccagtttacatttggctagcagactggtaaggtttagggttctctccactaatggaaaattaaatgctaaacgtcctaagaattatgttgttttcaaggctttgactcagatttgtactttgatgtatgaaagtgaatatcaaacttgtttatagaaaagactatatagaaaaataagtctgtgttgtgtatagtgatacatgttttatgtttacccaatgcctgtactaaatcttgtgcttggctttgaattatatatgtgtttacctatgacttttttttgaaataaacagaacagtcatctaaaaacataaggttttggaaaggagatgctttttcaattcttaccatctgattaggtggaatgttttatagacttttggtgttgaaaaaaaaaaagtttgataacaatgcattttgcttggaataccccccaatccagaaaagttggtgacttctctccattgtatatatgtacatagttttcattactagattgtaagctcctcaagggcaggaattgttttatctttgttgttcctgcagcacctaatgtaaagtgccttgcacagggtaggtgctcatgacgtgtagaatgagtgagtaacttcctgcctcatcaggatgaaatgtggttcacttcccctgtgttcaacactacaaagctactcctgccagaagagggcagagttctttcttgggtttgaactggcttttttgggttgaaccagatcatcccacatccttagcactacttaaccttcttttcctgaagattacatatcagtgtcctgcgtttttatctaatattagagctgaggttcctaggaaaattttgaagtggggaagattatggagaaaatgaaatggaaatttggggagggtggtttgtcagtataaggccctgtggggtaatcatattttagttattacttgttaaaagggtaacagaacctctgtttctttaccaagtcgctggttggccatttctccaattgatgaactaccattggttttagctctttctcatttgggattcccctcaattgcttacatgattctggtacttagagtctaatagagttgctgtgaatatgtagtgctgtacataatggcagttttgtaaatgtgagataaccttgaatatgttgtggtttgtatacagagccattagtattgttattttggccacttttttattcaaaataaataacataattatttgtaaaaaaaaaaaaaaaaaaaaaacaaaacaaaacacaacaccaaacacacaacaccaacgacacacaaactaccagaaaaacaagaaacaaaccaaacgagaaaaagcaaacaacaacaacaaacagaaacacgcaaacgggggaggacgatggaaagatacacccaccgcgcccacaaccccacgagaccagaccacacccgacgaagagaaagggcaacctcgatcggctcaacaaaaaagaacgtcggccgatcataacgcgtgtagagacgaaaagcaaacgctcgcagaagagactaggtggggga

SEQ ID NO: 421825 - DNA, 3346 bp, Homo sapiens
caattatttttcaatgtcagaagttattagagccactggcaaagctcatggttgaatatgacatttttctgcttttccctctaagaagtttttgagaatgttaatgttgaagtatgcaggctggacctaccagcaagtttaacacgttaattaggttaaaaagaatattaaaaggcaataattaaatatttcaattattttgtaattataatggtatcaaataagatgcaaaagaagttgatgcttattggtgcttaagagaattacaatactggttttatgagcatcttttctctgcaacagttaaactgcctcagagtttgtgaattgctgcaattcctggaatggaaacaggaattagggtcactggttgattggcacaggatctttccatcgtttctgctcctgacctctctctcttgcctttccttcccccagacaccctcttggtttccattcctttagttccctctgctttagaacacagattacatgttggaaagaaaaatggattaatggtaaaatttctaaaagctaaattgtacagtggggtctcacttcctagaagaaactattggtaatatttctttctaaaggtaatagtattaattgtatctggttttcttcaaaacttaactataatttccttgtcagggtgctcagtagctcttggtttgactttgggctaagggatgtgaaattttagctccttcccaccacctgtttcccctcactcccacccccagccaatattcttcataagcaaaaattatggttaagctaagctgaatgggttatattcaaagtaagtacagacggcaaataggcagacaaatacaggaatgtctttacaattagcccaccatggactgttttgagtctctgcatggtttccataattcattatgatgtatctttatgctctttcactgctcttctgtgcgttggagtttagcaattcagtgagactggggagtgtctcaagaatggaacctttgccttcaaggttgggtcatcaaaaatccctctaaaggatctaactgtaatgaactgtttttatttttgccattagtgcaagtatcaactggcagcctcaaacagctttagactatgtctcaggtctctcatagttatacttagaactgctctttcttgaagctaaaagaggtttttggagtaaagatctgcttcatgtctgctagcatggtatctgctgttcaacctagtatagagcatgtgaaatgcaactgtcctttaatggaattcagccaaactccaaaaatactgagttgcttctagttatctaaagtagtacagaatcactatcccgatgaagaagtggggtttttcagaagattgtaaactcatttccatggcacagatacaaatcatcgtcaggacttgttagccagtccatgtctcattgataggatgtagcctgccatctgcatagatggtttaacatggtgctgtttttgaaaacttgctgtggaaataaatttgacagaagagtagttatttgtaaagctgtcctagaaagaggttaattcttttggtatatgaatatttctcctccaatccttttaattaggtggttcagcttatcttgtattttctgagtcataactatactctagggccaagacctactataaaatctggggtcctaaccagagagttgtttagatcaatatgatatgctttgccaacatgatctaagaaggtattcattctttctgggtttgagaagagttgacgaaagtgtaagattatactctcatgctaaaataaggtataggctaagtgaaatactgtaaatgggttggttagaattaaagtttagaactctaaatcttatgcttatttttaaagtaaaaagttgcctcactgtcatgaaatcctgttactttcattaaaaaaaaaaatcctgtaaaatggtcaaattggataatgtaagagataatgatggctttgaggcatttcatactttaccagtttacatttggctagcagactggtaaggtttagggttctctccactaatggaaaattaaatgctaaacgtcctaagaattatgttgttttcaaggctttgactcagatttgtactttgatgtatgaaagtgaatatcaaacttgtttatagaaaagactatatagaaaaataagtctgtgttgtgtatagtgatacatgttttatgtttacccaatgcctgtactaaatcttgtgcttggctttgaattatatatgtgtttacctatgacttttttttgaaataaacagaacagtcatctaaaaacataaggttttggaaaggagatgctttttcaattcttaccatctgattaggtggaatgttttatagacttttggtgttgaaaaaaaaaaagtttgataacaatgcattttgcttggaataccccccaatccagaaaagttggtgacttctctccattgtatatatgtacatagttttcattactagattgtaagctcctcaagggcaggaattgttttatctttgttgttcctgcagcacctaatgtaaagtgccttgcacagggtaggtgctcatgacgtgtagaatgagtgagtaacttcctgcctcatcaggatgaaatgtggttcacttcccctgtgttcaacactacaaagctactcctgccagaagagggcagagttctttcttgggtttgaactggcttttttgggttgaaccagatcatcccacatccttagcactacttaaccttcttttcctgaagattacatatcagtgtcctgcgtttttatctaatattagagctgaggttcctaggaaaattttgaagtggggaagattatggagaaaatgaaatggaaatttggggagggtggtttgtcagtataaggccctgtggggtaatcatattttagttattacttgttaaaagggtaacagaacctctgtttctttaccaagtcgctggttggccatttctccaattgatgaactaccattggttttagctctttctcatttgggattcccctcaattgcttacatgattctggtacttagagtctaatagagttgctgtgaatatgtagtgctgtacataatggcagttttgtaaatgtgagataaccttgaatatgttgtggtttgtatacagagccattagtattgttattttggccacttttttattcttaacataattatctgtaactccttccactccgtccctctctatctcttcacccattcatcttcccttactctcctacgctcctctcttctcacctactctctcttcctcccttcttcatatctatttcccttctccttctcctttattccct

SEQ ID NO: 421826 - DNA, 570 bp, Homo sapiens
ggtatcacattttctctgcctggggttaatttgttcttattattctaggtaagaaattgatagcttgttatgcttggtactcattctgaaatccctgtgtgtccaccaggcagacttcaagcaatctctacctactattatatctgccaaaactaccaattatttttcaatgtcagaagttattagagccactggcaaagctcatggttgaatatgacatttttctgcttttccctctaagaagtttttgagaatgttaatgttgaagtatgcaggctggacctaccagcaagtttaacacgttaattaggttaaaaagaatattaaaaggcaataattaaatatttcaattattttgtaattataatggtatcaaataagatgcaaaagaagttgatgcttattggtgcttaagagaattacaatactggttttatgagcatcttttctctgcaacagttaaactgcctcagagtttgtgaattgctgcaattcctggaatggaaacaggaattagggtcactggttgattggcacaggatctttccatcgtttctgctcctgacctct

SEQ ID NO: 421827 - DNA, 2659 bp, Homo sapiens
gggtagacccacgagtccgcccacgggtctgcatggctgcaggaggtcccggcgcggggtctgcggccccggtctcctccacatcctcccttcccctggctgctctcaacatgcgagtgcggcgccgcctgtctctgttcttgaacgtgcggacacaggtggcggccgactggaccgcgctggcggaggagatggactttgagtacttggagatccggcaactggagacacaagcggaccccactggcaggctgctggacgcctggcagggacgccctggcgcctctgtaggccgactgctcgagctgcttaccaagctgggccgcgacgacgtgctgctggagctgggacccagcattgaggaggattgccaaaagtatatcttgaagcagcagcaggaggaggctgagaagcctttacaggtggccgctgtagacagcagtgtcccacggacagcagagctggcgggcatcaccacacttgatgaccccctggggcatatgcctgagcgtttcgatgccttcatctgctattgccccagcgacatccagtttgtgcaggagatgatccggcaactggaacagacaaactatcgactgaagttgtgtgtgtctgaccgcgatgtcctgcctggcacctgtgtctggtctattgctagtgagctcatcgaaaagaggtgccgccggatggtggtggttgtctctgatgattacctgcagagcaaggaatgtgacttccagaccaaatttgcactcagcctctctccaggtgcccatcagaagcgactgatccccatcaagtacaaggcaatgaagaaagagttccccagcatcctgaggttcatcactgtctgcgactacaccaacccctgcaccaaatcttggttctggactcgccttgccaaggccttgtccctgccctgaagactgttctgaggccctgggtgtgtgtgtatctgtctgcctgtccatgtacttctgccctgcctcctcctttcgttgtaggaggaatctgtgctctacttacctctcaattcctggagatgccaacttcacagacacgtctgcagcagctggacatcacatttcatgtcctgcatggaaccagtggctgtgagtggcatgtccacttgctggattatcagccaggacactatagaacaggaccagctgagactaagaaggaccagcagagccagctcagctctgagccattcacacatcttcaccctcagtttcctcacttgaggagtgggatggggagaacagagagtagctgtgtttgaatccctgtaggaaatggtgaagcatagctctgggtctcctgggggagaccaggcttggctgcgggagagctggctgttgctggactacatgctggccactgctgtgaccacgacactgctggggcagcttcttccacagtgatgcctactgatgcttcagtgcctctgcacaccgcccattccacttcctccttccccacagggcaggtggggaagcagtttggcccagcccaaggagaccccaccttgagccttatttcctaatgggtccacctctcatctgcatctttcacacctcccagcttctgcccaaccttcagcagtgacaagtccccaagagactcgcctgagcagcttgggctgcttttcatttccacctgtcaggatgcctgtggtcatgctctcagctccacctggcatgagaagggatcctggcctctggcatattcatcaagtatgagttctggggatgagtcactgtaatgatgtgagcagggagccttcctccctgggccacctgcagagagctttcccaccaactttgtaccttgattgccttacaaagttatttgtttacaaacagcgaccatataaaagcctcctgccccaaagcttgtgggcacatgggcacatacagactcacatacagacacacacatatatgtacagacatgtactctcacacacacaggcaccagcatacacacgtttttctaggtacagctcccaggaacagctaggtgggaaagtcccatcactgagggagcctaaccatgtccctgaacaaaaattgggcactcatctattccttttctcttgtgtccctactcattgaaaccaaactctggaaaggacccaatgtaccagtatttatacctctaatgaagcacagagagaggaagagagctgcttaaactcacacaacaatgaactgcagacacagctgttctctccctctctccttcccagagcaatttatactttaccctcaggctgtcctctggggagaaggtgccatggtcttaggtgtctgtgccccaggacagaccctaggaccctaaatccaatagaaaatgcatatctttgctccactttcagccaggctggagcaaggtaccttttcttaggatcttgggagggaatggatgcccctctctgcatgatcttgttgaggcatttagctgccatgcacctgtccccctttaatactgggcattttaaagccatctcaagaggcatcttctacatgttttgtacgcattaaaataatttcaaagatatctgagaaaagccgatatttgccattcttcctatatcctggaatatatcttgcatcctgagtttataataataaataatattctaccttggaaa

SEQ ID NO: 421828 - DNA, 630 bp, Homo sapiens
  misc_feature (79)..(79): n is a, c, g, or t
gcatttagctgccatgcacctgtccccctttaatactgggcattttaaagccatctcaagaggcatcttctacatgttntgtacgcattaaaaccaaactctggaaaggacccaatgtaccagtatttatacctctaatgaagcacagagagaggaagagagctgcttaaactcacacaacaatgaactgcagacacagctgttctctccctctctccttcccagagcaatttatactttaccctcaggctgtcctctggggagaaggtgccatggtcttaggtgtctgtgccccaggacagaccctaggaccctaaatccaatagaaaatgcatatctttgctccactttcagccaggctggagcaaggtaccttttcttaggatcttgggagggaatggatgcccctctctgcatgatcttgttgaggcatttagctgccatgcacctgtccccctttaatactgggcattttaaagccatctcaagaggcatcttctacatgttttgtacgcattaaaataatttcaaagatatctgagaaaagccgatatttgccattcttcctatatcctggaatatatcttgcatcctgagtttataataataaataatattctaccttggaaa

SEQ ID NO: 421829 - DNA, 3067 bp, Homo sapiens
acttgtcccctcctcgccatcctcgagggcaggaccgtatgaacccctcagattcctccgtggaagaactgtggctccaccagatcccaaaaagcaaggcccgtttcctacaacccccgaaggagggtcgtcctcactccgccgccaacctactagcaccatcaccagaccctcgagggcggtgccgtggacctctccagatctcaaaaggcagattcctacttcttacgccccccacatcacccgcctcgagacctcaagggtagaggtgggcacccccgcctccgcacttttgctcggggctccagattgtagggcagggcggcgcttctcggaaagcgaaagccggcggggcggggcgggtgccgcaggagaaagaggaagcgctggcagacaatgcgacccgaccgcgctgaggctccaggaccgcccgccatggctgcaggaggtcccggcgcggggtctgcggccccggtctcctccacatcctcccttcccctggctgctctcaacatgcgagtgcggcgccgcctgtctctgttcttgaacgtgcggacacaggtggcggccgactggaccgcgctggcggaggagatggactttgagtacttggagatccggcaactggagacacaagcggaccccactggcaggctgctggacgcctggcagggacgccctggcgcctctgtaggccgactgctcgagctgcttaccaagctgggccgcgacgacgtgctgctggagctgggacccagcattgaggaggattgccaaaagtatatcttgaagcagcagcaggaggaggctgagaagcctttacaggtggccgctgtagacagcagtgtcccacggacagcagagctggcgggcatcaccacacttgatgaccccctggggcatatgcctgagcgtttcgatgccttcatctgctattgccccagcgacatccagtttgtgcaggagatgatccggcaactggaacagacaaactatcgactgaagttgtgtgtgtctgaccgcgatgtcctgcctggcacctgtgtctggtctattgctagtgagctcatcgaaaagaggtgccgccggatggtggtggttgtctctgatgattacctgcagagcaaggaatgtgacttccagaccaaatttgcactcagcctctctccaggtgcccatcagaagcgactgatccccatcaagtacaaggcaatgaagaaagagttccccagcatcctgaggttcatcactgtctgcgactacaccaacccctgcaccaaatcttggttctggactcgccttgccaaggccttgtccctgccctgaagactgttctgaggccctgggtgtgtgtgtatctgtctgcctgtccatgtacttctgccctgcctcctcctttcgttgtaggaggaatctgtgctctacttacctctcaattcctggagatgccaacttcacagacacgtctgcagcagctggacatcacatttcatgtcctgcatggaaccagtggctgtgagtggcatgtccacttgctggattatcagccaggacactatagaacaggaccagctgagactaagaaggaccagcagagccagctcagctctgagccattcacacatcttcaccctcagtttcctcacttgaggagtgggatggggagaacagagagtagctgtgtttgaatccctgtaggaaatggtgaagcatagctctgggtctcctgggggagaccaggcttggctgcgggagagctggctgttgctggactacatgctggccactgctgtgaccacgacactgctggggcagcttcttccacagtgatgcctactgatgcttcagtgcctctgcacaccgcccattccacttcctccttccccacagggcaggtggggaagcagtttggcccagcccaaggagaccccaccttgagccttatttcctaatgggtccacctctcatctgcatctttcacacctcccagcttctgcccaaccttcagcagtgacaagtccccaagagactcgcctgagcagcttgggctgcttttcatttccacctgtcaggatgcctgtggtcatgctctcagctccacctggcatgagaagggatcctggcctctggcatattcatcaagtatgagttctggggatgagtcactgtaatgatgtgagcagggagccttcctccctgggccacctgcagagagctttcccaccaactttgtaccttgattgccttacaaagttatttgtttacaaacagcgaccatataaaagcctcctgccccaaagcttgtgggcacatgggcacatacagactcacatacagacacacacatatatgtacagacatgtactctcacacacacaggcaccagcatacacacgtttttctaggtacagctcccaggaacagctaggtgggaaagtcccatcactgagggagcctaaccatgtccctgaacaaaaattgggcactcatctattccttttctcttgtgtccctactcattgaaaccaaactctggaaaggacccaatgtaccagtatttatacctctaatgaagcacagagagaggaagagagctgcttaaactcacacaacaatgaactgcagacacagctgttctctccctctctccttcccagagcaatttatactttaccctcaggctgtcctctggggagaaggtgccatggtcttaggtgtctgtgccccaggacagaccctaggaccctaaatccaatagaaaatgcatatctttgctccactttcagccaggctggagcaaggtaccttttcttaggatcttgggagggaatggatgcccctctctgcatgatcttgttgaggcatttagctgccatgcacctgtccccctttaatactgggcattttaaagccatctcaagaggcatcttctacatgttttgtacgcattaaaataatttcaaagatatctgagaaaagccgatatttgccattcttcctatatcctggaatatatcttgcatcctgagtctgtattaactgcttgggggatcctctagagtcgtaa

SEQ ID NO: 421830 - DNA, 3043 bp, Homo sapiens
acttgtcccctcctcgccatcctcgagggcaggaccgtatgaacccctcagattcctccgtggaagaactgtggctccaccagatcccaaaaagcaaggcccgtttcctacaacccccgaaggagggtcgtcctcactccgccgccaacctactagcaccatcaccagaccctcgagggcggtgccgtggacctctccagatctcaaaaggcagattcctacttcttacgccccccacatcacccgcctcgagacctcaagggtagaggtgggcacccccgcctccgcacttttgctcggggctccagattgtagggcagggcggcgcttctcggaaagcgaaagccggcggggcggggcgggtgccgcaggagaaagaggaagcgctggcagacaatgcgacccgaccgcgctgaggctccaggaccgcccgccatggctgcaggaggtcccggcgcggggtctgcggccccggtctcctccacatcctcccttcccctggctgctctcaacatgcgagtgcggcgccgcctgtctctgttcttgaacgtgcggacacaggtggcggccgactggaccgcgctggcggaggagatggactttgagtacttggagatccggcaactggagacacaagcggaccccactggcaggctgctggacgcctggcagggacgccctggcgcctctgtaggccgactgctcgagctgcttaccaagctgggccgcgacgacgtgctgctggagctgggacccagcattgaggaggattgccaaaagtatatcttgaagcagcagcaggaggaggctgagaagcctttacaggtggccgctgtagacagcagtgtcccacggacagcagagctggcgggcatcaccacacttgatgaccccctggggcatatgcctgagcgtttcgatgccttcatctgctattgccccagcgacatccagtttgtgcaggagatgatccggcaactggaacagacaaactatcgactgaagttgtgtgtgtctgaccgcgatgtcctgcctggcacctgtgtctggtctattgctagtgccgccggatggtggtggttgtctctgatgattacctgcagagcaaggaatgtgacttccagaccaaatttgcactcagcctctctccaggtgcccatcagaagcgactgatccccatcaagtacaaggcaatgaagaaagagttccccagcatcctgaggttcatcactgtctgcgactacaccaacccctgcaccaaatcttggttctggactcgccttgccaaggccttgtccctgccctgaagactgttctgaggccctgggtgtgtgtgtatctgtctgcctgtccatgtacttctgccctgcctcctcctttcgttgtaggaggaatctgtgctctacttacctctcaattcctggagatgccaacttcacagacacgtctgcagcagctggacatcacatttcatgtcctgcatggaaccagtggctgtgagtggcatgtccacttgctggattatcagccaggacactatagaacaggaccagctgagactaagaaggaccagcagagccagctcagctctgagccattcacacatcttcaccctcagtttcctcacttgaggagtgggatggggagaacagagagtagctgtgtttgaatccctgtaggaaatggtgaagcatagctctgggtctcctgggggagaccaggcttggctgcgggagagctggctgttgctggactacatgctggccactgctgtgaccacgacactgctggggcagcttcttccacagtgatgcctactgatgcttcagtgcctctgcacaccgcccattccacttcctccttccccacagggcaggtggggaagcagtttggcccagcccaaggagaccccaccttgagccttatttcctaatgggtccacctctcatctgcatctttcacacctcccagcttctgcccaaccttcagcagtgacaagtccccaagagactcgcctgagcagcttgggctgcttttcatttccacctgtcaggatgcctgtggtcatgctctcagctccacctggcatgagaagggatcctggcctctggcatattcatcaagtatgagttctggggatgagtcactgtaatgatgtgagcagggagccttcctccctgggccacctgcagagagctttcccaccaactttgtaccttgattgccttacaaagttatttgtttacaaacagcgaccatataaaagcctcctgccccaaagcttgtgggcacatgggcacatacagactcacatacagacacacacatatatgtacagacatgtactctcacacacacaggcaccagcatacacacgtttttctaggtacagctcccaggaacagctaggtgggaaagtcccatcactgagggagcctaaccatgtccctgaacaaaaattgggcactcatctattccttttctcttgtgtccctactcattgaaaccaaactctggaaaggacccaatgtaccagtatttatacctctaatgaagcacagagagaggaagagagctgcttaaactcacacaacaatgaactgcagacacagctgttctctccctctctccttcccagagcaatttatactttaccctcaggctgtcctctggggagaaggtgccatggtcttaggtgtctgtgccccaggacagaccctaggaccctaaatccaatagaaaatgcatatctttgctccactttcagccaggctggagcaaggtaccttttcttaggatcttgggagggaatggatgcccctctctgcatgatcttgttgaggcatttagctgccatgcacctgtccccctttaatactgggcattttaaagccatctcaagaggcatcttctacatgttttgtacgcattaaaataatttcaaagatatctgagaaaagccgatatttgccattcttcctatatcctggaatatatcttgcatcctgagtttataataataaataatattctaccttggaaa

SEQ ID NO: 421831 - DNA, 2420 bp, Homo sapiens
agagggagaaccatgcgggtcccgttccttcttaataaccggtcgcggttattaagaaggactggagaaaggtccggataggcggagatgggaaggaagcagcttaggcagaggctttcagaggaggattgccaaaagtatatcttgaagcagcagcaggaggaggctgagaagcctttacaggtggccgctgtagacagcagtgtcccacggacagcagagctggcgggcatcaccacacttgatgaccccctggggcatatgcctgagcgtttcgatgccttcatctgctattgccccagcgacatccagtttgtgcaggagatgatccggcaactggaacagacaaactatcgactgaagttgtgtgtgtctgaccgcgatgtcctgcctggcacctgtgtctggtctattgctagtgagctcatcgaaaagaggtgccgccggatggtggtggttgtctctgatgattacctgcagagcaaggaatgtgacttccagaccaaatttgcactcagcctctctccaggtgcccatcagaagcgactgatccccatcaagtacaaggcaatgaagaaagagttccccagcatcctgaggttcatcactgtctgcgactacaccaacccctgcaccaaatcttggttctggactcgccttgccaaggccttgtccctgccctgaagactgttctgaggccctgggtgtgtgtgtatctgtctgcctgtccatgtacttctgccctgcctcctcctttcgttgtaggaggaatctgtgctctacttacctctcaattcctggagatgccaacttcacagacacgtctgcagcagctggacatcacatttcatgtcctgcatggaaccagtggctgtgagtggcatgtccacttgctggattatcagccaggacactatagaacaggaccagctgagactaagaaggaccagcagagccagctcagctctgagccattcacacatcttcaccctcagtttcctcacttgaggagtgggatggggagaacagagagtagctgtgtttgaatccctgtaggaaatggtgaagcatagctctgggtctcctgggggagaccaggcttggctgcgggagagctggctgttgctggactacatgctggccactgctgtgaccacgacactgctggggcagcttcttccacagtgatgcctactgatgcttcagtgcctctgcacaccgcccattccacttcctccttccccacagggcaggtggggaagcagtttggcccagcccaaggagaccccaccttgagccttatttcctaatgggtccacctctcatctgcatctttcacacctcccagcttctgcccaaccttcagcagtgacaagtccccaagagactcgcctgagcagcttgggctgcttttcatttccacctgtcaggatgcctgtggtcatgctctcagctccacctggcatgagaagggatcctggcctctggcatattcatcaagtatgagttctggggatgagtcactgtaatgatgtgagcagggagccttcctccctgggccacctgcagagagctttcccaccaactttgtaccttgattgccttacaaagttatttgtttacaaacagcgaccatataaaagcctcctgccccaaagcttgtgggcacatgggcacatacagactcacatacagacacacacatatatgtacagacatgtactctcacacacacaggcaccagcatacacacgtttttctaggtacagctcccaggaacagctaggtgggaaagtcccatcactgagggagcctaaccatgtccctgaacaaaaattgggcactcatctattccttttctcttgtgtccctactcattgaaaccaaactctggaaaggacccaatgtaccagtatttatacctctaatgaagcacagagagaggaagagagctgcttaaactcacacaacaatgaactgcagacacagctgttctctccctctctccttcccagagcaatttatactttaccctcaggctgtcctctggggagaaggtgccatggtcttaggtgtctgtgccccaggacagaccctaggaccctaaatccaatagaaaatgcatatctttgctccactttcagccaggctggagcaaggtaccttttcttaggatcttgggagggaatggatgcccctctctgcatgatcttgttgaggcatttagctgccatgcacctgtccccctttaatactgggcattttaaagccatctcaagaggcatcttctacatgttttgtacgcattaaaataatttcaaagatatctgagaaaagccgatatttgccattcttcctatatcctggaatatatcttgcatcctgagtttataataataaataatattctaccttggaaa

SEQ ID NO: 421832 - DNA, 2135 bp, Homo sapiens
atgaagccctgccctggggtccagatactgggcatctcctcctagctgtgcactgtccagcctgggcacagtgggcccttcctgaagctattcccaggggatatgctgaactaagttgccacaggacctgcagcctgcccactctcccctaggtgccgccggatggtggtggttgtctctgatgattacctgcagagcaaggaatgtgacttccagaccaaatttgcactcagcctctctccaggtgcccatcagaagcgactgatccccatcaagtacaaggcaatgaagaaagagttccccagcatcctgaggttcatcactgtctgcgactacaccaacccctgcaccaaatcttggttctggactcgccttgccaaggccttgtccctgccctgaagactgttctgaggccctgggtgtgtgtgtatctgtctgcctgtccatgtacttctgccctgcctcctcctttcgttgtaggaggaatctgtgctctacttacctctcaattcctggagatgccaacttcacagacacgtctgcagcagctggacatcacatttcatgtcctgcatggaaccagtggctgtgagtggcatgtccacttgctggattatcagccaggacactatagaacaggaccagctgagactaagaaggaccagcagagccagctcagctctgagccattcacacatcttcaccctcagtttcctcacttgaggagtgggatggggagaacagagagtagctgtgtttgaatccctgtaggaaatggtgaagcatagctctgggtctcctgggggagaccaggcttggctgcgggagagctggctgttgctggactacatgctggccactgctgtgaccacgacactgctggggcagcttcttccacagtgatgcctactgatgcttcagtgcctctgcacaccgcccattccacttcctccttccccacagggcaggtggggaagcagtttggcccagcccaaggagaccccaccttgagccttatttcctaatgggtccacctctcatctgcatctttcacacctcccagcttctgcccaaccttcagcagtgacaagtccccaagagactcgcctgagcagcttgggctgcttttcatttccacctgtcaggatgcctgtggtcatgctctcagctccacctggcatgagaagggatcctggcctctggcatattcatcaagtatgagttctggggatgagtcactgtaatgatgtgagcagggagccttcctccctgggccacctgcagagagctttcccaccaactttgtaccttgattgccttacaaagttatttgtttacaaacagcgaccatataaaagcctcctgccccaaagcttgtgggcacatgggcacatacagactcacatacagacacacacatatatgtacagacatgtactctcacacacacaggcaccagcatacacacgtttttctaggtacagctcccaggaacagctaggtgggaaagtcccatcactgagggagcctaaccatgtccctgaacaaaaattgggcactcatctattccttttctcttgtgtccctactcattgaaaccaaactctggaaaggacccaatgtaccagtatttatacctctaatgaagcacagagagaggaagagagctgcttaaactcacacaacaatgaactgcagacacagctgttctctccctctctccttcccagagcaatttatactttaccctcaggctgtcctctggggagaaggtgccatggtcttaggtgtctgtgccccaggacagaccctaggaccctaaatccaatagaaaatgcatatctttgctccactttcagccaggctggagcaaggtaccttttcttaggatcttgggagggaatggatgcccctctctgcatgatcttgttgaggcatttagctgccatgcacctgtccccctttaatactgggcattttaaagccatctcaagaggcatcttctacatgttttgtacgcattaaaataatttcaaagatatctgagaaaagccgatatttgccattcttcctatatcctggaatatatcttgcatcctgagtttataataataaataatattctaccttggaaa

SEQ ID NO: 421833 - DNA, 1070 bp, Homo sapiens
atgttacagtgactcatccccagaactcatacttgattgaatatgccatgatggccaggatctccttctcatgccaggtggagctgagagcatgacgacaggcatcctgacaggtggaaatgaaaagcagcccaagctgctcaggcgagtctcttggggacttgtcagtgctgaaggtggggcaaaagcagggagccttcctccctgggccacctgcagagagctttcccaccaactttgtaccttgattgccttacaaagttatttgtttacaaacagcgaccatataaaagcctcctgccccaaagcttgtgggcacatgggcacatacagactcacatacagacacacacatatatgtacagacatgtactctcacacacacaggcaccagcatacacacgtttttctaggtacagctcccaggaacagctaggtgggaaagtcccatcactgagggagcctaaccatgtccctgaacaaaaattgggcactcatctattccttttctcttgtgtccctactcattgaaaccaaactctggaaaggacccaatgtaccagtatttatacctctaatgaagcacagagagaggaagagagctgcttaaactcacacaacaatgaactgcagacacagctgttctctccctctctccttcccagagcaatttatactttaccctcaggctgtcctctggggagaaggtgccatggtcttaggtgtctgtgccccaggacagaccctaggaccctaaatccaatagaaaatgcatatctttgctccactttcagccaggctggagcaaggtaccttttcttaggatcttgggagggaatggatgcccctctctgcatgatcttgttgaggcatttagctgccatgcacctgtccccctttaatactgggcattttaaagccatctcaagaggcatcttctacatgttttgtacgcattaaaataatttcaaagatatctgagaaaagccgatatttgccattcttcctatatcctggaatatatcttgcatcctgagtttataataataaataatattctaccttggaaa

SEQ ID NO: 421834 - DNA, 2389 bp, Homo sapiens
acttgtcccctcctcgccatcctcgagggcaggaccgtatgaacccctcagattcctccgtggaagaactgtggctccaccagatcccaaaaagcaaggcccgtttcctacaacccccgaaggagggtcgtcctcactccgccgccaacctactagcaccatcaccagaccctcgagggcggtgccgtggacctctccagatctcaaaaggcagattcctacttcttacgccccccacatcacccgcctcgagacctcaagggtagaggtgggcacccccgcctccgcacttttgctcggggctccagattgtagggcagggcggcgcttctcggaaagcgaaagccggcggggcggggcgggtgccgcaggagaaagaggaagcgctggcagacaatgcgacccgaccgcgctgaggctccaggaccgcccgccatggctgcaggaggtcccggcgcggggtctgcggccccggtctcctccacatcctcccttcccctggctgctctcaacatgcgagtgcggcgccgcctgtctctgttcttgaacgtgcggacacaggtggcggccgactggaccgcgctggcggaggagatggactttgagtacttggagatccggcaactggagacacaagcggaccccactggcaggctgctggacgcctggcagggacgccctggcgcctctgtaggccgactgctcgagctgcttaccaagctgggccgcgacgacgtgctgctggagctgggacccagcattgaggaggattgccaaaagtatatcttgaagcagcagcaggaggaggctgagaagcctttacaggtggccgctgtagacagcagtgtcccacggacagcagagctggcgggcatcaccacacttgatgaccccctggggcatatgcctgagcgtttcgatgccttcatctgctattgccccagcgacatccagtttgtgcaggagatgatccggcaactggaacagacaaactatcgactgaagttgtgtgtgtctgaccgcgatgtcctgcctggcacctgtgtctggtctattgctagtgagctcatcgaaaagaggtgccgccggatggtggtggttgtctctgatgattacctgcagagcaaggaatgtgacttccagaccaaatttgcactcagcctctctccaggtgcccatcagaagcgactgatccccatcaagtacaaggcaatgaagaaagagttccccagcatcctgaggttcatcactgtctgcgactacaccaacccctgcaccaaatcttggttctggactcgccttgccaaggccttgtccctgccctgaagactgttctgaggccctgggtgtgtgtgtatctgtctgcctgtccatgtacttctgccctgcctcctcctttcgttgtaggaggaatctgtgctctacttacctctcaattcctggagatgccaacttcacagacacgtctgcagcagctggacatcacatttcatgtcctgcatggaaccagtggctgtgagtggcatgtccacttgctggattatcagccaggacactatagaacaggaccagctgagactaagaaggaccagcagagccagctcagctctgagccattcacacatcttcaccctcagtttcctcacttgaggagtgggatggggagaacagagagtagctgtgtttgaatccctgtaggaaatggtgaagcatagctctgggtctcctgggggagaccaggcttggctgcgggagagctggctgttgctggactacatgctggccactgctgtgaccacgacactgctggggcagcttcttccacagtgatgcctactgatgcttcagtgcctctgcacaccgcccattccacttcctccttccccacagggcaggtggggaagcagtttggcccagcccaaggagaccccaccttgagccttatttcctaatgggtccacctctcatctgcatctttcacacctcccagcttctgcccaaccttcagcagtgacaagtccccaagagactcgcctgagcagcttgggctgcttttcatttccacctgtcaggatgcctgtggtcatgctctcagctccacctggcatgagaagggatcctggcctctggcatattcatcaagtatgagttctggggatgagtcactgtaatgatgtgagcagggagccttcctccctgggccacctgcagagagctttcccaccaactttgtaccttgtgtgtggtgtgttgtgggggtgtgtgtgtgtggtgtctatggtgtgtaatgtgtggtgtgggtgtggtgtgtggtatgtggtgtgtgtgatgtgtgtggtgggtgtgtgtagtgtgtgggtgtgtgtggtgtgtggcaggtgtgtggtgg

SEQ ID NO: 421835 - DNA, 1882 bp, Homo sapiens
acttgtcccctcctcgccatcctcgagggcaggaccgtatgaacccctcagattcctccgtggaagaactgtggctccaccagatcccaaaaagcaaggcccgtttcctacaacccccgaaggagggtcgtcctcactccgccgccaacctactagcaccatcaccagaccctcgagggcggtgccgtggacctctccagatctcaaaaggcagattcctacttcttacgccccccacatcacccgcctcgagacctcaagggtagaggtgggcacccccgcctccgcacttttgctcggggctccagattgtagggcagggcggcgcttctcggaaagcgaaagccggcggggcggggcgggtgccgcaggagaaagaggaagcgctggcagacaatgcgacccgaccgcgctgaggctccaggaccgcccgccatggctgcaggaggtcccggcgcggggtctgcggccccggtctcctccacatcctcccttcccctggctgctctcaacatgcgagtgcggcgccgcctgtctctgttcttgaacgtgcggacacaggtggcggccgactggaccgcgctggcggaggagatggactttgagtacttggagatccggcaactggagacacaagcggaccccactggcaggctgctggacgcctggcagggacgccctggcgcctctgtaggccgactgctcgagctgcttaccaagctgggccgcgacgacgtgctgctggagctgggacccagcattgaggaggattgccaaaagtatatcttgaagcagcagcaggaggaggctgagaagcctttacaggtggccgctgtagacagcagtgtcccacggacagcagagctggcgggcatcaccacacttgatgaccccctggggcatatgcctgagcgtttcgatgccttcatctgctattgccccagcgacatccagtttgtgcaggagatgatccggcaactggaacagacaaactatcgactgaagttgtgtgtgtctgaccgcgatgtcctgcctggcacctgtgtctggtctattgctagtgagctcatcgaaaagaggtgccgccggatggtggtggttgtctctgatgattacctgcagagcaaggaatgtgacttccagaccaaatttgcactcagcctctctccaggtgcccatcagaagcgactgatccccatcaagtacaaggcaatgaagaaagagttccccagcatcctgaggttcatcactgtctgcgactacaccaacccctgcaccaaatcttggttctggactcgccttgccaaggccttgtccctgccctgaagactgttctgaggccctgggtgtgtgtgtatctgtctgcctgtccatgtacttctgccctgcctcctcctttcgttgtaggaggaatctgtgctctacttacctctcaattcctggagatgccaacttcacagacacgtctgcagcagctggacatcacatttcatgtcctgcatggaaccagtggctgtgagtggcatgtccacttgctggattatcagccaggacactatagaacaggaccagctgagactaagaaggaccagcagagccagctcagctctgagccattcacacatcttcaccctcagtttcctcacttgaggagtgggatggggagaacagagagtagctgtgtttgaatccctgtaggaaatggtgaagcatagctctgggtctcctgggggagaccaggcttggctgcgggagagctggctgttgctggactacatgctggccactgctgtgaccacgacactgctggggcctggtctgcttccccctgaactgtaattctctgtccatgtttcatgcctatgtctacgcgacctaagcg

SEQ ID NO: 421836 - DNA, 1645 bp, Homo sapiens
acttgtcccctcctcgccatcctcgagggcaggaccgtatgaacccctcagattcctccgtggaagaactgtggctccaccagatcccaaaaagcaaggcccgtttcctacaacccccgaaggagggtcgtcctcactccgccgccaacctactagcaccatcaccagaccctcgagggcggtgccgtggacctctccagatctcaaaaggcagattcctacttcttacgccccccacatcacccgcctcgagacctcaagggtagaggtgggcacccccgcctccgcacttttgctcggggctccagattgtagggcagggcggcgcttctcggaaagcgaaagccggcggggcggggcgggtgccgcaggagaaagaggaagcgctggcagacaatgcgacccgaccgcgctgaggctccaggaccgcccgccatggctgcaggaggtcccggcgcggggtctgcggccccggtctcctccacatcctcccttcccctggctgctctcaacatgcgagtgcggcgccgcctgtctctgttcttgaacgtgcggacacaggtggcggccgactggaccgcgctggcggaggagatggactttgagtacttggagatccggcaactggagacacaagcggaccccactggcaggctgctggacgcctggcagggacgccctggcgcctctgtaggccgactgctcgagctgcttaccaagctgggccgcgacgacgtgctgctggagctgggacccagcattgaggaggattgccaaaagtatatcttgaagcagcagcaggaggaggctgagaagcctttacaggtggccgctgtagacagcagtgtcccacggacagcagagctggcgggcatcaccacacttgatgaccccctggggcatatgcctgagcgtttcgatgccttcatctgctattgccccagcgacatccagtttgtgcaggagatgatccggcaactggaacagacaaactatcgactgaagttgtgtgtgtctgaccgcgatgtcctgcctggcacctgtgtctggtctattgctagtgagctcatcgaaaagaggtgccgccggatggtggtggttgtctctgatgattacctgcagagcaaggaatgtgacttccagaccaaatttgcactcagcctctctccaggtgcccatcagaagcgactgatccccatcaggagggtgagcccggggcaggggtgacccctgcctccacacccccctcctgccgctatcgccgtttaactggcgactccggtattgagctctgcccttgtcctgcctccggtgagggtgagccagtcaaggaggtgagggttagtgccaccctgacagatctggaggactactccccgtgtgcactacccccagagtctgtaccgcagatctttcccatggggctgtcttccagtgaaggggacatcccataagtagttttgagagggtggatgggttacttgcccaccagaaacagccctagtcccaactccttgcgttcctttggcccctccctgactacctagaatctgcctgaaagggctggagaggggcagtattgggggactgtgcaagctttaccccggcaggacatcacggcatgcttgatgtctggatcagcaat

SEQ ID NO: 421837 - DNA, 827 bp, Homo sapiens
tgaggctccaggaccgcccgccatggctgcaggaggtcccggcgcggggtctgcggccccggtctcctccacatcctcccttcccctggctgctctcaacatgcgagtgcggcgccgcctgtctctgttcttgaacgtgcggacacaggtggcggccgactggaccgcgctggcggaggagatggactttgagtacttggagatccggcaactggagacacaagcggaccccactggcaggctgctggacgcctggcagggacgccctggcgcctctgtaggccgactgctcgagctgcttaccaagctgggccgcgacgacgtgctgctggagctgggacccagcattggtgaggacgtccccttcctggcctcgtacctggggggtgaggaggctgactttccgcggcctcagcatcctgtctcccatggagagaccccatttcctgcctcgggggcccgaagaagcctgcagagggagaaccatgcgggtcccgttccttcttaataaccggtcgcggttattaagaaggactggagaaaggtccggataggcggagatgggaaggaagcagcttaggcagaggctttcaggtagggccaggagtcagaatcaggcttctgtgggggcatctgggctgtttcaagtagagcaacaggacaggtggggcgattgacagtggactgtcttagaaacctcaagtcctggggaaatgcagcccttctttctactcactggcacttacataatatacatgcataggcgttggatacagccgcccacagacaggcacaccttgctgagttggaatcactgcaccataacc

SEQ ID NO: 421838 - DNA, 3062 bp, Homo sapiens
acttgtcccctcctcgccatcctcgagggcaggaccgtatgaacccctcagattcctccgtggaagaactgtggctccaccagatcccaaaaagcaaggcccgtttcctacaacccccgaaggagggtcgtcctcactccgccgccaacctactagcaccatcaccagaccctcgagggcggtgccgtggacctctccagatctcaaaaggcagattcctacttcttacgccccccacatcacccgcctcgagacctcaagggtagaggtgggcacccccgcctccgcacttttgctcggggctccagattgtagggcagggcggcgcttctcggaaagcgaaagccggcggggcggggcgggtgccgcaggagaaagaggaagcgctggcagacaatgcgacccgaccgcgctgaggctccaggaccgcccgccatggctgcaggaggtcccggcgcggggtctgcggccccggtctcctccacatcctcccttcccctggctgctctcaacatgcgagtgcggcgccgcctgtctctgttcttgaacgtgcggacacaggtggcggccgactggaccgcgctggcggaggagatggactttgagtacttggagatccggcaactggagacacaagcggaccccactggcaggctgctggacgcctggcagggacgccctggcgcctctgtaggccgactgctcgagctgcttaccaagctgggccgcgacgacgtgctgctggagctgggacccagcattgaggaggattgccaaaagtatatcttgaagcagcagcaggaggaggctgagaagcctttacaggtggccgctgtagacagcagtgtcccacggacagcagagctggcgggcatcaccacacttgatgaccccctggggcatatgcctgagcgtttcgatgccttcatctgctattgccccagcgacatccagtttgtgcaggagatgatccggcaactggaacagacaaactatcgactgaagttgtgtgtgtctgaccgcgatgtcctgcctggcacctgtgtctggtctattgctagtgagctcatcgaaaagaggtgccgccggatggtggtggttgtctctgatgattacctgcagagcaaggaatgtgacttccagaccaaatttgcactcagcctctctccaggtgcccatcagaagcgactgatccccatcaagtacaaggcaatgaagaaagagttccccagcatcctgaggttcatcactgtctgcgactacaccaacccctgcaccaaatcttggttctggactcgccttgccaaggccttgtccctgccctgaagactgttctgaggccctgggtgtgtgtgtatctgtctgcctgtccatgtacttctgccctgcctcctcctttcgttgtaggaggaatctgtgctctacttacctctcaattcctggagatgccaacttcacagacacgtctgcagcagctggacatcacatttcatgtcctgcatggaaccagtggctgtgagtggcatgtccacttgctggattatcagccaggacactatagaacaggaccagctgagactaagaaggaccagcagagccagctcagctctgagccattcacacatcttcaccctcagtttcctcacttgaggagtgggatggggagaacagagagtagctgtgtttgaatccctgtaggaaatggtgaagcatagctctgggtctcctgggggagaccaggcttggctgcgggagagctggctgttgctggactacatgctggccactgctgtgaccacgacactgctggggcagcttcttccacagtgatgcctactgatgcttcagtgcctctgcacaccgcccattccacttcctccttccccacagggcaggtggggaagcagtttggcccagcccaaggagaccccaccttgagccttatttcctaatgggtccacctctcatctgcatctttcacacctcccagcttctgcccaaccttcagcagtgacaagtccccaagagactcgcctgagcagcttgggctgcttttcatttccacctgtcaggatgcctgtggtcatgctctcagctccacctggcatgagaagggatcctggcctctggcatattcatcaagtatgagttctggggatgagtcactgtaatgatgtgagcagggagccttcctccctgggccacctgcagagagctttcccaccaactttgtaccttgattgccttacaaagttatttgtttacaaacagcgaccatataaaagcctcctgccccaaagcttgtgggcacatgggcacatacagactcacatacagacacacacatatatgtacagacatgtactctcacacacacaggcaccagcatacacacgtttttctaggtacagctcccaggaacagctaggtgggaaagtcccatcactgagggagcctaaccatgtccctgaacaaaaattgggcactcatctattccttttctcttgtgtccctactcattgaaaccaaactctggaaaggacccaatgtaccagtatttatacctctaatgaagcacagagagaggaagagagctgcttaaactcacacaacaatgaactgcagacacagctgttctctccctctctccttcccagagcaatttatactttaccctcaggctgtcctctggggagaaggtgccatggtcttaggtgtctgtgccccaggacagaccctaggaccctaaatccaatagaaaatgcatatctttgctccactttcagccaggctggagcaaggtaccttttcttaggatcttgggagggaatggatgcccctctctgcatgatcttgttgaggcatttagctgccatgcacctgtccccctttaatactgggcattttaaagccatctcaagaggcatcttctacatgttttgtacgcattaaaataatttcaaagatatctgagaaaagccgatatttgccattcttcctatatcctggaatatatcttgcatcctgagtttataataataaataatattctaccttggaaa

SEQ ID NO: 421839 - DNA, 3688 bp, Homo sapiens
acttgtcccctcctcgccatcctcgagggcaggaccgtatgaacccctcagattcctccgtggaagaactgtggctccaccagatcccaaaaagcaaggcccgtttcctacaacccccgaaggagggtcgtcctcactccgccgccaacctactagcaccatcaccagaccctcgagggcggtgccgtggacctctccagatctcaaaaggcagattcctacttcttacgccccccacatcacccgcctcgagacctcaagggtagaggtgggcacccccgcctccgcacttttgctcggggctccagattgtagggcagggcggcgcttctcggaaagcgaaagccggcggggcggggcgggtgccgcaggagaaagaggaagcgctggcagacaatgcgacccgaccgcgctgaggctccaggaccgcccgccatggctgcaggaggtcccggcgcggggtctgcggccccggtctcctccacatcctcccttcccctggctgctctcaacatgcgagtgcggcgccgcctgtctctgttcttgaacgtgcggacacaggtggcggccgactggaccgcgctggcggaggagatggactttgagtacttggagatccggcaactggagacacaagcggaccccactggcaggctgctggacgcctggcagggacgccctggcgcctctgtaggccgactgctcgagctgcttaccaagctgggccgcgacgacgtgctgctggagctgggacccagcattgaggaggattgccaaaagtatatcttgaagcagcagcaggaggaggctgagaagcctttacaggtggccgctgtagacagcagtgtcccacggacagcagagctggcgggcatcaccacacttgatgaccccctggggcatatgcctgagcgtttcgatgccttcatctgctattgccccagcgacatccagtttgtgcaggagatgatccggcaactggaacagacaaactatcgactgaagttgtgtgtgtctgaccgcgatgtcctgcctggcacctgtgtctggtctattgctagtgagctcatcgaaaagaggtgccgccggatggtggtggttgtctctgatgattacctgcagagcaaggaatgtgacttccagaccaaatttgcactcagcctctctccaggtgcccatcagaagcgactgatccccatcaagtacaaggcaatgaagaaagagttccccagcatcctgaggttcatcactgtctgcgactacaccaacccctgcaccaaatcttggttctggactcgccttgccaaggccttgtccctgccctgaagactgttctgaggccctgggtgtgtgtgtatctgtctgcctgtccatgtacttctgccctgcctcctcctttcgttgtaggaggaatctgtgctctacttacctctcaattcctggagatgccaacttcacagacacgtctgcagcagctggacatcacatttcatgtcctgcatggaaccagtggctgtgagtggcatgtccacttgctggattatcagccaggacactatagaacaggaccagctgagactaagaaggaccagcagagccagctcagctctgagccattcacacatcttcaccctcagtttcctcacttgaggagtgggatggggagaacagagagtagctgtgtttgaatccctgtaggaaatggtgaagcatagctctgggtctcctgggggagaccaggcttggctgcgggagagctggctgttgctggactacatgctggccactgctgtgaccacgacactgctggggcagcttcttccacagtgatgcctactgatgcttcagtgcctctgcacaccgcccattccacttcctccttccccacagggcaggtggggaagcagtttggcccagcccaaggagaccccaccttgagccttatttcctaatgggtccacctctcatctgcatctttcacacctcccagcttctgcccaaccttcagcagtgacaagtccccaagagactcgcctgagcagcttgggctgcttttcatttccacctgtcaggatgcctgtggtcatgctctcagctccacctggcatgagaagggatcctggcctctggcatattcatcaagtatgagttctggggatgagtcactgtaatgatgtgagcagggagccttcctccctgggccacctgcagagagctttcccaccaactttgtaccttgattgccttacaaagttatttgtttacaaacagcgaccatataaaagcctcctgccccaaagcttgtgggcacatgggcacatacagactcacatacagacacacacatatatgtacagacatgtactctcacacacacaggcaccagcatacacacgtttttctaggtacagctcccaggaacagctaggtgggaaagtcccatcactgagggagcctaaccatgtccctgaacaaaaattgggcactcatctattccttttctcttgtgtccctactcattgaaaccaaactctggaaaggacccaatgtaccagtatttatacctctaatgaagcacagagagaggaagagagctgcttaaactcacacaacaatgaactgcagacacagctgttctctccctctctccttcccagagcaatttatactttaccctcaggctgtcctctggggagaaggtgccatggtcttaggtgtctgtgccccaggacagaccctaggaccctaaatccaatagaaaatgcatatctttgctccactttcagccaggctggagcaaggtaccttttcttaggatcttgggagggaatggatgcccctctctgcatgatcttgttgaggcatttagctgccatgcacctgtccccctttaatactgggcattttaaagccatctcaagaggcatcttctacatgttttgtacgcattaaaataatttcaaagatatctgagaaaagccgatatttgccattcttcctatatcctggaatatatcttgcatcctgagtttataataataaataatattctaccttggaaaaaagaaaaaaaaaaaaaaaaaaaaaaaaaaaaaaaaaaaaaaaaaaaaaaaaaaaaaaaaaaaaaaaaaaaaaaaaaaaaaaaaaaaaaaaaaaaaaaaaaaaaaaaaaaattgggggcccctttggcccaatggattttaaacttggaaaatttttttattggggcccaaattggggcccatttggccaattcccccttaaggggggcgttttaaaattaaagggcccggttttaaaaaacgggggattggaaaaaccctggggttccccaatttaaagcctttggaaaaaaacccctttttccaaggtggggaaaaatcaaaaaggccccccccaaaggccttttccaaaagttgcccccccctaatgtggaagggaaatttgacgggtaaaatttttggaaaaaaccccggaaaatttttggaaaaaaaccttattttttaaccaaaagggcccaatttgggaaaaatcccttataatccaaaaaaatttcccccaataggggttagagggtgtccccatttgggacaaaagccccctttttaaaaacagggtgcctacaacctcaagaggcggaaaacccttttttagggcaggggccccttttggaaacccttaccctaat

SEQ ID NO: 421840 - DNA, 3086 bp, Homo sapiens
acttgtcccctcctcgccatcctcgagggcaggaccgtatgaacccctcagattcctccgtggaagaactgtggctccaccagatcccaaaaagcaaggcccgtttcctacaacccccgaaggagggtcgtcctcactccgccgccaacctactagcaccatcaccagaccctcgagggcggtgccgtggacctctccagatctcaaaaggcagattcctacttcttacgccccccacatcacccgcctcgagacctcaagggtagaggtgggcacccccgcctccgcacttttgctcggggctccagattgtagggcagggcggcgcttctcggaaagcgaaagccggcggggcggggcgggtgccgcaggagaaagaggaagcgctggcagacaatgcgacccgaccgcgctgaggctccaggaccgcccgccatggctgcaggaggtcccggcgcggggtctgcggccccggtctcctccacatcctcccttcccctggctgctctcaacatgcgagtgcggcgccgcctgtctctgttcttgaacgtgcggacacaggtggcggccgactggaccgcgctggcggaggagatggactttgagtacttggagatccggcaactggagacacaagcggaccccactggcaggctgctggacgcctggcagggacgccctggcgcctctgtaggccgactgctcgagctgcttaccaagctgggccgcgacgacgtgctgctggagctgggacccagcattgaggaggattgccaaaagtatatcttgaagcagcagcaggaggaggctgagaagcctttacaggtggccgctgtagacagcagtgtcccacggacagcagagctggcgggcatcaccacacttgatgaccccctggggcatatgcctgagcgtttcgatgccttcatctgctattgccccagcgacatccagtttgtgcaggagatgatccggcaactggaacagacaaactatcgactgaagttgtgtgtgtctgaccgcgatgtcctgcctggcacctgtgtctggtctattgctagtgagctcatcgaaaagaggttggctagaaggccacggggtgggtgccgccggatggtggtggttgtctctgatgattacctgcagagcaaggaatgtgacttccagaccaaatttgcactcagcctctctccaggtgcccatcagaagcgactgatccccatcaagtacaaggcaatgaagaaagagttccccagcatcctgaggttcatcactgtctgcgactacaccaacccctgcaccaaatcttggttctggactcgccttgccaaggccttgtccctgccctgaagactgttctgaggccctgggtgtgtgtgtatctgtctgcctgtccatgtacttctgccctgcctcctcctttcgttgtaggaggaatctgtgctctacttacctctcaattcctggagatgccaacttcacagacacgtctgcagcagctggacatcacatttcatgtcctgcatggaaccagtggctgtgagtggcatgtccacttgctggattatcagccaggacactatagaacaggaccagctgagactaagaaggaccagcagagccagctcagctctgagccattcacacatcttcaccctcagtttcctcacttgaggagtgggatggggagaacagagagtagctgtgtttgaatccctgtaggaaatggtgaagcatagctctgggtctcctgggggagaccaggcttggctgcgggagagctggctgttgctggactacatgctggccactgctgtgaccacgacactgctggggcagcttcttccacagtgatgcctactgatgcttcagtgcctctgcacaccgcccattccacttcctccttccccacagggcaggtggggaagcagtttggcccagcccaaggagaccccaccttgagccttatttcctaatgggtccacctctcatctgcatctttcacacctcccagcttctgcccaaccttcagcagtgacaagtccccaagagactcgcctgagcagcttgggctgcttttcatttccacctgtcaggatgcctgtggtcatgctctcagctccacctggcatgagaagggatcctggcctctggcatattcatcaagtatgagttctggggatgagtcactgtaatgatgtgagcagggagccttcctccctgggccacctgcagagagctttcccaccaactttgtaccttgattgccttacaaagttatttgtttacaaacagcgaccatataaaagcctcctgccccaaagcttgtgggcacatgggcacatacagactcacatacagacacacacatatatgtacagacatgtactctcacacacacaggcaccagcatacacacgtttttctaggtacagctcccaggaacagctaggtgggaaagtcccatcactgagggagcctaaccatgtccctgaacaaaaattgggcactcatctattccttttctcttgtgtccctactcattgaaaccaaactctggaaaggacccaatgtaccagtatttatacctctaatgaagcacagagagaggaagagagctgcttaaactcacacaacaatgaactgcagacacagctgttctctccctctctccttcccagagcaatttatactttaccctcaggctgtcctctggggagaaggtgccatggtcttaggtgtctgtgccccaggacagaccctaggaccctaaatccaatagaaaatgcatatctttgctccactttcagccaggctggagcaaggtaccttttcttaggatcttgggagggaatggatgcccctctctgcatgatcttgttgaggcatttagctgccatgcacctgtccccctttaatactgggcattttaaagccatctcaagaggcatcttctacatgttttgtacgcattaaaataatttcaaagatatctgagaaaagccgatatttgccattcttcctatatcctggaatatatcttgcatcctgagtttataataataaataatattctaccttggaaa

SEQ ID NO: 421841 - DNA, 3008 bp, Homo sapiens
acttgtcccctcctcgccatcctcgagggcaggaccgtatgaacccctcagattcctccgtggaagaactgtggctccaccagatcccaaaaagcaaggcccgtttcctacaacccccgaaggagggtcgtcctcactccgccgccaacctactagcaccatcaccagaccctcgagggcggtgccgtggacctctccagatctcaaaaggcagattcctacttcttacgccccccacatcacccgcctcgagacctcaagggtagaggtgggcacccccgcctccgcacttttgctcggggctccagattgtagggcagggcggcgcttctcggaaagcgaaagccggcggggcggggcgggtgccgcaggagaaagaggaagcgctggcagacaatgcgacccgaccgcgctgaggctccaggaccgcccgccatggctgcaggaggtcccggcgcggggtctgcggccccggtctcctccacatcctcccttcccctggctgctctcaacatgcgagtgcggcgccgcctgtctctgttcttgaacgtgcggacacaggtggcggccgactggaccgcgctggcggaggagatggactttgagtacttggagatccggcaactggagacacaagcggaccccactggcaggctgctggacgcctggcagggacgccctggcgcctctgtaggccgactgctcgagctgcttaccaagctgggccgcgacgacgtgctgctggagctgggacccagcattgaggaggattgccaaaagtatatcttgaagcagcagcaggaggaggctgagaagcctttacaggtggccgctgtagacagcagtgtcccacggacagcagagctggcgggcatcaccacacttgatgaccccctggggcatatgcctgagcgtttcgatgccttcatctgctattgccccagcgacatccagtttgtgcaggagatgatccggcaactggaacagacaaactatcgactgaagttgtgtgtgtctgaccgcgatgtcctgcctggcacctgtgtctggtctattgctagtgagctcatcgaaaagaggtgccgccggatggtggtggttgtctctgatgattacctgcagagcaaggaatgtgacttccagaccaaatttgcactcagcctctctccaggtgcccatcagaagcgactgatccccatcaagtacaaggcaatgaagaaagagttccccagcatcctgaggttcatcactgtctgcgactacaccaacccctgcaccaaatcttggttctggactcgccttgccaaggccttgtccctgccctgaagactgttctgaggccctgggtgtgtgtgtatctgtctgcctgtccatgtacttctgccctgcctcctcctttcgttgtaggaggaatctgtgctctacttacctctcaattcctggagatgccaacttcacagacacgtctgcagcagctggacatcacatttcatgtcctgcatggaaccagtggctgtgagtggcatgtccacttgctggattatcagccaggacactatagaacaggaccagctgagactaagaaggaccagcagagccagctcagctctgagccattcacacatcttcaccctcagtttcctcacttgaggagtgggatggggagaacagagagtagctgtgtttgaatccctgtaggaaatggtgaagcatagctctgggtctcctgggggagaccaggcttggctgcgggagagctggctgttgctggactacatgctggccactgctgtgaccacgacactgctggggcagcttcttccacagtgatgcctactgatgcttcagtgcctctgcacaccgcccattccacttcctccttccccacagggcaggtggggaagcagtttggcccagcccaaggagaccccaccttgagccttatttcctaatgggtccacctctcatctgcatctttcacacctcccagcttctgcccaaccttcagcagtgacaagtccccaagagactcgcctgagcagcttgggctgcttttcatttccacctgtcaggatgcctgtggtcatgctctcagctccacctggcatgagaagggatcctggcctctggcatattcatcaagtatgagttctggggatgagtcactgtaatgatgtgagcagggagccttcctccctgggccacctgcagagagctttcccaccaactttgtaccttgattgccttacaaagttatttgtttacaaacagcgaccatataaaagcctcctgccccaaagcttgtgggcacatgggcacatacagactcacatacagacacacacatatatgtacagacatgtactctcacacacacaggcaccagcatacacacgtttttctaggtacagctcccaggaacagctaggtgggaaagtcccatcactgagggagcctaaccatgtccctgaacaaactctggaaaggacccaatgtaccagtatttatacctctaatgaagcacagagagaggaagagagctgcttaaactcacacaacaatgaactgcagacacagctgttctctccctctctccttcccagagcaatttatactttaccctcaggctgtcctctggggagaaggtgccatggtcttaggtgtctgtgccccaggacagaccctaggaccctaaatccaatagaaaatgcatatctttgctccactttcagccaggctggagcaaggtaccttttcttaggatcttgggagggaatggatgcccctctctgcatgatcttgttgaggcatttagctgccatgcacctgtccccctttaatactgggcattttaaagccatctcaagaggcatcttctacatgttttgtacgcattaaaataatttcaaagatatctgagaaaagccgatatttgccattcttcctatatcctggaatatatcttgcatcctgagtttataataataaataatattctaccttggaaa

SEQ ID NO: 421842 - DNA, 2054 bp, Homo sapiens
acttgtcccctcctcgccatcctcgagggcaggaccgtatgaacccctcagattcctccgtggaagaactgtggctccaccagatcccaaaaagcaaggcccgtttcctacaacccccgaaggagggtcgtcctcactccgccgccaacctactagcaccatcaccagaccctcgagggcggtgccgtggacctctccagatctcaaaaggcagattcctacttcttacgccccccacatcacccgcctcgagacctcaagggtagaggtgggcacccccgcctccgcacttttgctcggggctccagattgtagggcagggcggcgcttctcggaaagcgaaagccggcggggcggggcgggtgccgcaggagaaagaggaagcgctggcagacaatgcgacccgaccgcgctgaggctccaggaccgcccgccatggctgcaggaggtcccggcgcggggtctgcggccccggtctcctccacatcctcccttcccctggctgctctcaacatgcgagtgcggcgccgcctgtctctgttcttgaacgtgcggacacaggtggcggccgactggaccgcgctggcggaggagatggactttgagtacttggagatccggcaactggagacacaagcggaccccactggcaggctgctggacgcctggcagggacgccctggcgcctctgtaggccgactgctcgagctgcttaccaagctgggccgcgacgacgtgctgctggagctgggacccagcattgaggaggattgccaaaagtatatcttgaagcagcagcaggaggaggctgagaagcctttacaggtggccgctgtagacagcagtgtcccacggacagcagagctggcgggcatcaccacacttgatgaccccctggggcatatgcctgagcgtttcgatgccttcatctgctattgccccagcgacatccagtttgtgcaggagatgatccggcaactggaacagacaaactatcgactgaagttgtgtgtgtctgaccgcgatgtcctgcctggcacctgtgtctggtctattgctagtgagctcatcgaaaagaggtgccgccggatggtggtggttgtctctgatgattacctgcagagcaaggaatgtgacttccagaccaaatttgcactcagcctctctccaggtgcccatcagaagcgactgatccccatcaagtacaaggcaatgaagaaagagttccccagcatcctgaggttcatcactgtctgcgactacaccaacccctgcaccaaatcttggttctggactcgccttgccaaggccttgtccctgccctgaagactgttctgaggccctgggtgtgtgtgtatctgtctgcctgtccatgtacttctgccctgcctcctcctttcgttgtaggaggaatctgtgctctacttacctctcaattcctggagatgccaacttcacagacacgtctgcagcagctggacatcacatttcatgtcctgcatggaaccagtggctgtgagtggcatgtccacttgctggattatcagccaggacactatagaacaggaccagctgagactaagaaggaccagcagagccagctcagctctgagccattcacacatcttcaccctcagtttcctcacttgaggagtgggatggggagaacagagagtagctgtgtttgaatccctgtaggaaatggtgaagcatagctctgggtctcctgggggagaccaggcttggctgcgggagagctggctgttgctggactacatgctggccactgctgtgaccacgacactgctggggcagcttcttccacagtgatgcctactgatgcttcagtgcctctgcacaccgcccattccacttcctccttccccacagggcaggtggggaagcagtttggcccagcccaaggagaccccaccttgagccttatttcctaatgggtccacctctcatctgcatctttcacacctcccagcttctctccttcagacttcaagagcctctggcatctccttcagacttacggaacctctagagta

SEQ ID NO: 421843 - DNA, 1019 bp, Homo sapiens
acttgtcccctcctcgccatcctcgagggcaggaccgtatgaacccctcagattcctccgtggaagaactgtggctccaccagatcccaaaaagcaaggcccgtttcctacaacccccgaaggagggtcgtcctcactccgccgccaacctactagcaccatcaccagaccctcgagggcggtgccgtggacctctccagatctcaaaaggcagattcctacttcttacgccccccacatcacccgcctcgagacctcaagggtagaggtgggcacccccgcctccgcacttttgctcggggctccagattgtagggcagggcggcgcttctcggaaagcgaaagccggcggggcggggcgggtgccgcaggagaaagaggaagcgctggcagacaatgcgacccgaccgcgctgaggctccaggaccgcccgccatggctgcaggaggtcccggcgcggggtctgcggccccggtctcctccacatcctcccttcccctggctgctctcaacatgcgagtgcggcgccgcctgtctctgttcttgaacgtgcggacacaggtggcggccgactggaccgcgctggcggaggagatggactttgagtacttggagatccggcaactggagacacaagcggaccccactggcaggctgctggacgcctggcagggacgccctggcgcctctgtaggccgactgctcgagctgcttaccaagctgggccgcgacgacgtgctgctggagctgggacccagcattgaggaggattgccaaaagtatatcttgaagcagcagcaggaggaggctgagaagcctttacaggtggccgctgtagacagcagtgtcccacggacagcagagctggcgggcatcaccacacttgatgaccccctgggtaagggtccaatactgttcccatgggacaggtggaataggacattgtggtgttaagagcatgggtgtttgaagcagatgggctgtgagaccttgggcaagtcacttaatctttctgagcc

SEQ ID NO: 421844 - DNA, 2557 bp, Homo sapiens
gtgagagtggcgcggagggggtggaggtttgtctccgctgtttcatctctatggctgtcagaggtgggcggctttgaccgagaggctgctggagctcgtgtttggacgcgatgtttcgtctgaactcactttctgctttggcagaactggctgtgggttctcgatggtaccatggaggatcacagcccatccagatccggcgaagactaatgatggtggctttcctgggagcatctgcagtaactgcaagtactggtcttttgtggaagagggcccatgcagaatctccaccatgtgtagacaacctaaaaagtgacatcggtgataaagggaagaataaagatgaaggggatgtttgtaaccatgagaaaaagactgcagatcttgcccctcacccagaagagaaaaagaagaaacgttctggattcagagacagaaaagtgatggaatatgagaataggattcgagcctactccacgccagacaaaatcttccgatattttgccaccttgaaagtcatcagtgagcctggtgaagcagaagtgtttatgacaccagaagattttgtgcgatccataacacccaatgaaaaacaaccagaacacttgggtctggatcaatatataataaaacgctttgatggaaagaaaatttcccaggaacgagaaaaatttgctgatgaaggcagtatattttacacccttggagaatgtgggctcatatccttttcagactacattttcctcacaactgttctttccactcctcagagaaattttgaaattgccttcaagatgtttgatttgaatggagatggagaagtagatatggaagaatttgaacaggttcagagcatcattcgctcccaaaccagtatgggtatgcgccacagagatcgtccaactactggcaacaccctcaagtctggcttgtgttcagccctcacaacctacttttttggagctgatctgaagggaaagctgacaatcaaaaacttcctcgaatttcagcgtaaactgcagcatgatgttctgaagcttgagtttgaacgccatgaccctgtggatgggagaattactgagaggcagtttggtggcatgctacttgcctacagtggggtgcagtccaagaagctgaccgccatgcagaggcagctcaagaagcacttcaaagaaggaaagggtctgacatttcaggaggtggagaacttctttactttcctaaagaacattaatgatgtggacactgcattgagtttttaccatatggctggagcatctcttgataaagtgaccatgcagcaggtggccaggacagtggctaaagtggagctctcagaccacgtgtgtgatgtggtgtttgcactctttgactgtgatggcaatggcgaactgagcaataaggaatttgtttccatcatgaagcaacggctgatgagaggcctggaaaagcccaaagacatgggtttcactcgcctcatgcaggccatgtggaaatgtgcacaggaaactgcctgggacttcgctttacccaaacagtaaccccacactgcaagaggggacccctccacccccagtaccctggaccccctccgcagagtctcggcagagccctttgtgctgctgcttctggaagtagtctcccttcctcccgggatgacctcaggactctgtcggtttcccctctttacccttccccgtccccgtgttctgctgggctctgattctgcccaatgagtatccccataggttctcaaaaacatgaacaagtctgtaaagctcagacatttgtcagcctcaacagcaccacccattcaagcatcctgtggataaagaattcagggaaccatccacacacctgccaaccctgggaagcatccagttctcaaatcgtttttgctatggatttatactaacaagaacattccttgacttccctcctgctggtgttttaaagccacaagtagggaagatatctggcaggcagaaagaagtctgtgatgataaacaatgatgaggatgacctaggcaccctacgctagtgtgagaagcctgcgccccaggaaggatctgtgttagtccctgggatggctccaaggcctgctctaggaaggcagcatgctcagtgggaacacagcaagattcagaatttaaagtagttgcttcatggctctgtgcactcccttttcttcctcgcagcctccctaagatgactccagtgtgaccctgtgcttagtgagcaatagtgattgagctcatgttccctgcaagtgccatttcctctccaggatgggcctctaaagctgaggcctggctcagagcctgtttgccctctgtcttaaacaattgtaaatatcacttaaattataaccatttgcaataaacatccccaaagttccctgtctcctttattttagggtcctctaggcccttttcattttatgtccccactggatttgagatcttgctggaagcagacctgttttctttctaccagagtctggttctttctgatgaagagcagctttaggcacagacaaaaagtgagggcttttgga

SEQ ID NO: 421845 - DNA, 748 bp, Homo sapiens
gtgagagtggcgcggagggggtggaggtttgtctccgctgtttcatctctatggctgtcagaggtgggcggctttgaccgagaggctgctggagctcgtgtttggacgcgatgtttcgtctgaactcactttctgctttggcagaactggctgtgggttctcgatggtaccatggaggatcacagcccatccagatccggcgaagactaatgatggtggctttcctgggagcatctgcagtaactgcaagtactggtcttttgtggaagagggcccatgcagaatctccaccatgtgtagacaacctaaaaagtgacatcggtgataaagggaagaataaagatgaaggggatgtttgtaaccatgagaaaaagactgcagatcttgcccctcacccagaagagaaaaagaagaaacgttctggattcagagacagaaaagtgatggaatatgagaataggattcgagcctactccacgccagacaaaatcttccgatattttgccaccttgaaagtcatcagtgagcctggtgaagcagaagtgtttatgacaccagaagattttgtgcgatccataacacccaatgaaaaacaaccagaacacttgggtctggatcaatatataataaaacgctttgatggaaaggccagattctccaaaaagaaaatattacacagggtcagaaagaaaagtaaagggtcaattttacagaggaggaagaaagcacttcagaaagaagaaagaac

SEQ ID NO: 421846 - DNA, 2411 bp, Homo sapiens
gtgagagtggcgcggagggggtggaggtttgtctccgctgtttcatctctatggctgtcagaggtgggcggctttgaccgagaggctgctggagctcgtgtttggacgcgatgtttcgtctgaactcactttctgctttggcagaactggctgtgggttctcgatggtaccatggaggatcacagcccatccagatccggcgaagactaatgatggtggctttcctgggagcatctgcagtaactgcaagtactggtcttttgtggaagagggcccatgcagaatctccaccatgtgtagacaacctaaaaagtgacatcggtgataaagggaagaataaagatgaaggggatgtttgtaaccatgagaaaaagactgcagatcttgcccctcacccagaagagaaaaagaagaaacgttctggattcagagacagaaaagtgatggaatatgagaataggattcgagcctactccacgccagacaaaatcttccgatattttgccaccttgaaagtcatcagtgagcctggtgaagcagaagtgtttatgacaccagaagattttgtgcgatccataacacccaatgaaaaacaaccagaacacttgggtctggatcaatatataataaaacgctttgatggaaagaaaatttcccaggaacgagaaaaatttgctgatgaaggcagtatattttacacccttggagaatgtgggctcatatccttttcagactacattttcctcacaactgttctttccactcctcagagaaattttgaaattgccttcaagatgtttgatttgaatggagatggagaagtagatatggaagaatttgaacaggttcagagcatcattcgctcccaaaccagtatgggtatgcgccacagagatcgtccaactactggcaacaccctcaagtctggcttgtgttcagccctcacaacctacttttttggagctgatctgaagggaaagctgacaatcaaaaacttcctcgaatttcagcgtaaactgcagcatgatgttctgaagcttgagtttgaacgccatgaccctgtggatgggagaattactgagaggcagtttggtggcatgctacttgcctacagtggggtgcagtccaagaagctgaccgccatgcagaggcagctcaagaagcacttcaaagaaggaaagggtctgacatttcaggaggtggagaacttctttactttcctaaagaacattaatgatgtggacactgcattgagtttttaccatatggctggagcatctcttgataaagtgaccatgcagcaggtggccaggacagtggctaaagtggagctctcagaccacgtgtgtgatgtggtgtttgcactctttgactgtgatggcaatggcgaactgagcaataaggaatttgtttccatcatgaagcaacggctgatgagaggcctggaaaagcccaaagacatgggtttcactcgcctcatgcaggccatgtggaaatgtgcacaggaaactgcctgggacttcgctttacccaaacagtaaccccacactgcaagaggggacccctccacccccagtaccctggaccccctccgcagagtctcggcagagccctttgtgctgctgcttctggaagtagtctcccttcctcccgggatgacctcaggactctgtcggtttcccctctttacccttccccgtccccgtgttctgctgggctctgattctgcccaatgagtatccccataggttctcaaaaacatgaacaagtctgtaaagctcagacatttgtcagcctcaacagcaccacccattcaagcatcctgtggataaagaattcagggaaccatccacacacctgccaaccctgggaagcatccagttctcaaatcgtttttgctatggatttatactaacaagaacattccttgacttccctcctgctggtgttttaaagccacaagtagggaagatatctggcaggcagaaagaagtctgtgatgataaacaatgatgaggatgacctaggcaccctacgctagtgtgagaagcctgcgccccaggaaggatctgtgttagtccctgggatggctccaaggcctgctctaggaaggcagcatgctcagtgggaacacagcaagattcagaatttaaagtagttgcttcatggctctgtgcactcccttttcttcctcgcagcctccctaagatgactccagtgtgaccctgtgcttagtgagcaatagtgattgagctcatgttccctgcaagtgccatttcctctccaggatgggcctctaaagctgaggcctggctcagagcctgtttgccctctgtcttaaacaattgtaaatatcacttaaattataaccatttgcaataaacatccgcagtccaaaagaaattagagct

SEQ ID NO: 421847 - DNA, 2419 bp, Homo sapiens
gtgagagtggcgcggagggggtggaggtttgtctccgctgtttcatctctatggctgtcagaggtgggcggctttgaccgagaggctgctggagctcgtgtttggacgcgatgtttcgtctgaactcactttctgctttggcagaactggctgtgggttctcgatggtaccatggaggatcacagcccatccagatccggcgaagactaatgatggtggctttcctgggagcatctgcagtaactgcaagtactggtcttttgtggaagagggcccatgcagaatctccaccatgtgtagacaacctaaaaagtgacatcggtgataaagggaagaataaagatgaaggggatgtttgtaaccatgagaaaaagactgcagatcttgcccctcacccagaagagaaaaagaagaaacgttctggattcagagacagaaaagtgatggaatatgagaataggattcgagcctactccacgccagacaaaatcttccgatattttgccaccttgaaagtcatcagtgagcctggtgaagcagaagtgtttatgacaccagaagattttgtgcgatccataacacccaatgaaaaacaaccagaacacttgggtctggatcaatatataataaaacgctttgatggaaagaaaatttcccaggaacgagaaaaatttgctgatgaaggcagtatattttacacccttggagaatgtgggctcatatccttttcagactacattttcctcacaactgttctttccactcctcagagaaattttgaaattgccttcaagatgtttgatttgaatggagatggagaagtagatatggaagaatttgaacaggttcagagcatcattcgctcccaaaccagtatgggtatgcgccacagagatcgtccaactactggcaacaccctcaagtctggcttgtgttcagccctcacaacctacttttttggagctgatctgaagggaaagctgacaatcaaaaacttcctcgaatttcagcgtaaactgcagcatgatgttctgaagcttgagggtctgacatttcaggaggtggagaacttctttactttcctaaagaacattaatgatgtggacactgcattgagtttttaccatatggctggagcatctcttgataaagtgaccatgcagcaggtggccaggacagtggctaaagtggagctctcagaccacgtgtgtgatgtggtgtttgcactctttgactgtgatggcaatggcgaactgagcaataaggaatttgtttccatcatgaagcaacggctgatgagaggcctggaaaagcccaaagacatgggtttcactcgcctcatgcaggccatgtggaaatgtgcacaggaaactgcctgggacttcgctttacccaaacagtaaccccacactgcaagaggggacccctccacccccagtaccctggaccccctccgcagagtctcggcagagccctttgtgctgctgcttctggaagtagtctcccttcctcccgggatgacctcaggactctgtcggtttcccctctttacccttccccgtccccgtgttctgctgggctctgattctgcccaatgagtatccccataggttctcaaaaacatgaacaagtctgtaaagctcagacatttgtcagcctcaacagcaccacccattcaagcatcctgtggataaagaattcagggaaccatccacacacctgccaaccctgggaagcatccagttctcaaatcgtttttgctatggatttatactaacaagaacattccttgacttccctcctgctggtgttttaaagccacaagtagggaagatatctggcaggcagaaagaagtctgtgatgataaacaatgatgaggatgacctaggcaccctacgctagtgtgagaagcctgcgccccaggaaggatctgtgttagtccctgggatggctccaaggcctgctctaggaaggcagcatgctcagtgggaacacagcaagattcagaatttaaagtagttgcttcatggctctgtgcactcccttttcttcctcgcagcctccctaagatgactccagtgtgaccctgtgcttagtgagcaatagtgattgagctcatgttccctgcaagtgccatttcctctccaggatgggcctctaaagctgaggcctggctcagagcctgtttgccctctgtcttaaacaattgtaaatatcacttaaattataaccatttgcaataaacatccccaaagttccctgtctcctttattttagggtcctctaggcccttttcattttatgtccccactggatttgagatcttgctggaagcagacctgttttctttctaccagagtctggttctttctgatgaagagcagctttaggcacagacaaaaagtgagggcttttgga

SEQ ID NO: 421848 - DNA, 2509 bp, Homo sapiens
gtgagagtggcgcggagggggtggaggtttgtctccgctgtttcatctctatggctgtcagaggtgggcggctttgaccgagaggctgctggagctcgtgtttggacgcttctcgatggtaccatggaggatcacagcccatccagatccggcgaagactaatgatggtggctttcctgggagcatctgcagtaactgcaagtactggtcttttgtggaagagggcccatgcagaatctccaccatgtgtagacaacctaaaaagtgacatcggtgataaagggaagaataaagatgaaggggatgtttgtaaccatgagaaaaagactgcagatcttgcccctcacccagaagagaaaaagaagaaacgttctggattcagagacagaaaagtgatggaatatgagaataggattcgagcctactccacgccagacaaaatcttccgatattttgccaccttgaaagtcatcagtgagcctggtgaagcagaagtgtttatgacaccagaagattttgtgcgatccataacacccaatgaaaaacaaccagaacacttgggtctggatcaatatataataaaacgctttgatggaaagaaaatttcccaggaacgagaaaaatttgctgatgaaggcagtatattttacacccttggagaatgtgggctcatatccttttcagactacattttcctcacaactgttctttccactcctcagagaaattttgaaattgccttcaagatgtttgatttgaatggagatggagaagtagatatggaagaatttgaacaggttcagagcatcattcgctcccaaaccagtatgggtatgcgccacagagatcgtccaactactggcaacaccctcaagtctggcttgtgttcagccctcacaacctacttttttggagctgatctgaagggaaagctgacaatcaaaaacttcctcgaatttcagcgtaaactgcagcatgatgttctgaagcttgagtttgaacgccatgaccctgtggatgggagaattactgagaggcagtttggtggcatgctacttgcctacagtggggtgcagtccaagaagctgaccgccatgcagaggcagctcaagaagcacttcaaagaaggaaagggtctgacatttcaggaggtggagaacttctttactttcctaaagaacattaatgatgtggacactgcattgagtttttaccatatggctggagcatctcttgataaagtgaccatgcagcaggtggccaggacagtggctaaagtggagctctcagaccacgtgtgtgatgtggtgtttgcactctttgactgtgatggcaatggcgaactgagcaataaggaatttgtttccatcatgaagcaacggctgatgagaggcctggaaaagcccaaagacatgggtttcactcgcctcatgcaggccatgtggaaatgtgcacaggaaactgcctgggacttcgctttacccaaacagtaaccccacactgcaagaggggacccctccacccccagtaccctggaccccctccgcagagtctcggcagagccctttgtgctgctgcttctggaagtagtctcccttcctcccgggatgacctcaggactctgtcggtttcccctctttacccttccccgtccccgtgttctgctgggctctgattctgcccaatgagtatccccataggttctcaaaaacatgaacaagtctgtaaagctcagacatttgtcagcctcaacagcaccacccattcaagcatcctgtggataaagaattcagggaaccatccacacacctgccaaccctgggaagcatccagttctcaaatcgtttttgctatggatttatactaacaagaacattccttgacttccctcctgctggtgttttaaagccacaagtagggaagatatctggcaggcagaaagaagtctgtgatgataaacaatgatgaggatgacctaggcaccctacgctagtgtgagaagcctgcgccccaggaaggatctgtgttagtccctgggatggctccaaggcctgctctaggaaggcagcatgctcagtgggaacacagcaagattcagaatttaaagtagttgcttcatggctctgtgcactcccttttcttcctcgcagcctccctaagatgactccagtgtgaccctgtgcttagtgagcaatagtgattgagctcatgttccctgcaagtgccatttcctctccaggatgggcctctaaagctgaggcctggctcagagcctgtttgccctctgtcttaaacaattgtaaatatcacttaaattataaccatttgcaataaacatccccaaagttccctgtctcctttattttagggtcctctaggcccttttcattttatgtccccactggatttgagatcttgctggaagcagacctgttttctttctaccagagtctggttctttctgatgaagagcagctttaggcacagacaaaaagtgagggcttttgga

SEQ ID NO: 421849 - DNA, 2196 bp, Homo sapiens
gtgagagtggcgcggagggggtggaggtttgtctccgctgtttcatctctatggctgtcagaggtgggcggctttgaccgagaggctgctggagctcgtgtttggacgcgatgtttcgtctgaactcactttctgctttggcagaactggctgtgggttctcgatggtaccatggaggatcacagcccatccagatccggcgaagactaatgatggtggctttcctgggagcatctgcagtaactgcaagtactggtcttttgtggaagagggcccatgcagaatctccaccatgtgtagacaacctaaaaagtgacatcggtgataaagggaagaataaagatgaaggggatgtttgtaaccatgagaaaaagactgcagatcttgcccctcacccagaagagaaaaagaagaaacgttctggattcagagacagaaaagtgatggaatatgagaataggattcgagcctactccacgccagacaaaatcttccgatattttgccaccttgaaagtcatcagtgagcctggtgaagcagaagtgtttatgacaccagaagattttgtgcgatccataacacccaatgaaaaacaaccagaacacttgggtctggatcaatatataataaaacgctttgatggaaagaaaatttcccaggaacgagaaaaatttgctgatgaaggcagtatattttacacccttggagaatgtgggctcatatccttttcagactacattttcctcacaactgttctttccactcctcagagaaattttgaaattgccttcaagatgtttgatttgaatggagatggagaagtagatatggaagaatttgaacaggttcagagcatcattcgctcccaaaccagtatgggtatgcgccacagagatcgtccaactactggcaacaccctcaagtctggcttgtgttcagccctcacaacctacttttttggagctgatctgaagggaaagctgacaatcaaaaacttcctcgaatttcagcgtaaactgcagcatgatgttctgaagcttgagtttgaacgccatgaccctgtggatgggagaattactgagaggcagtttggtggcatgctacttgcctacagtggggtgcagtccaagaagctgaccgccatgcagaggcagctcaagaagcacttcaaagaaggaaagcccacactgcaagaggggacccctccacccccagtaccctggaccccctccgcagagtctcggcagagccctttgtgctgctgcttctggaagtagtctcccttcctcccgggatgacctcaggactctgtcggtttcccctctttacccttccccgtccccgtgttctgctgggctctgattctgcccaatgagtatccccataggttctcaaaaacatgaacaagtctgtaaagctcagacatttgtcagcctcaacagcaccacccattcaagcatcctgtggataaagaattcagggaaccatccacacacctgccaaccctgggaagcatccagttctcaaatcgtttttgctatggatttatactaacaagaacattccttgacttccctcctgctggtgttttaaagccacaagtagggaagatatctggcaggcagaaagaagtctgtgatgataaacaatgatgaggatgacctaggcaccctacgctagtgtgagaagcctgcgccccaggaaggatctgtgttagtccctgggatggctccaaggcctgctctaggaaggcagcatgctcagtgggaacacagcaagattcagaatttaaagtagttgcttcatggctctgtgcactcccttttcttcctcgcagcctccctaagatgactccagtgtgaccctgtgcttagtgagcaatagtgattgagctcatgttccctgcaagtgccatttcctctccaggatgggcctctaaagctgaggcctggctcagagcctgtttgccctctgtcttaaacaattgtaaatatcacttaaattataaccatttgcaataaacatccccaaagttccctgtctcctttattttagggtcctctaggcccttttcattttatgtccccactggatttgagatcttgctggaagcagacctgttttctttctaccagagtctggttctttctgatgaagagcagctttaggcacagacaaaaagtgagggcttttgga

SEQ ID NO: 421850 - DNA, 2068 bp, Homo sapiens
gggaaacaaatgggacacctagaaagactttattattttgcttttctgagctaatcaatgactttaatttggaaaagcaactaaatatttggagaaaaccatgaaaagaatatatacttacagacgggccaaggagatcttcaaggacactcctaaagaaaatttcccaggaacgagaaaaatttgctgatgaaggcagtatattttacacccttggagaatgtgggctcatatccttttcagactacattttcctcacaactgttctttccactcctcagagaaattttgaaattgccttcaagatgtttgatttgaatggagatggagaagtagatatggaagaatttgaacaggttcagagcatcattcgctcccaaaccagtatgggtatgcgccacagagatcgtccaactactggcaacaccctcaagtctggcttgtgttcagccctcacaacctacttttttggagctgatctgaagggaaagctgacaatcaaaaacttcctcgaatttcagcgtaaactgcagcatgatgttctgaagcttgagtttgaacgccatgaccctgtggatgggagaattactgagaggcagtttggtggcatgctacttgcctacagtggggtgcagtccaagaagctgaccgccatgcagaggcagctcaagaagcacttcaaagaaggaaagggtctgacatttcaggaggtggagaacttctttactttcctaaagaacattaatgatgtggacactgcattgagtttttaccatatggctggagcatctcttgataaagtgaccatgcagcaggtggccaggacagtggctaaagtggagctctcagaccacgtgtgtgatgtggtgtttgcactctttgactgtgatggcaatggcgaactgagcaataaggaatttgtttccatcatgaagcaacggctgatgagaggcctggaaaagcccaaagacatgggtttcactcgcctcatgcaggccatgtggaaatgtgcacaggaaactgcctgggacttcgctttacccaaacagtaaccccacactgcaagaggggacccctccacccccagtaccctggaccccctccgcagagtctcggcagagccctttgtgctgctgcttctggaagtagtctcccttcctcccgggatgacctcaggactctgtcggtttcccctctttacccttccccgtccccgtgttctgctgggctctgattctgcccaatgagtatccccataggttctcaaaaacatgaacaagtctgtaaagctcagacatttgtcagcctcaacagcaccacccattcaagcatcctgtggataaagaattcagggaaccatccacacacctgccaaccctgggaagcatccagttctcaaatcgtttttgctatggatttatactaacaagaacattccttgacttccctcctgctggtgttttaaagccacaagtagggaagatatctggcaggcagaaagaagtctgtgatgataaacaatgatgaggatgacctaggcaccctacgctagtgtgagaagcctgcgccccaggaaggatctgtgttagtccctgggatggctccaaggcctgctctaggaaggcagcatgctcagtgggaacacagcaagattcagaatttaaagtagttgcttcatggctctgtgcactcccttttcttcctcgcagcctccctaagatgactccagtgtgaccctgtgcttagtgagcaatagtgattgagctcatgttccctgcaagtgccatttcctctccaggatgggcctctaaagctgaggcctggctcagagcctgtttgccctctgtcttaaacaattgtaaatatcacttaaattataaccatttgcaataaacatccccaaagttccctgtctcctttattttagggtcctctaggcccttttcattttatgtccccactggatttgagatcttgctggaagcagacctgttttctttctaccagagtctggttctttctgatgaagagcagctttaggcacagacaaaaagtgagggcttttgga

SEQ ID NO: 421851 - DNA, 1636 bp, Homo sapiens
gatagttgatttcctagaggtatccccctaacaggctttgagctgatctgaagggaaagctgacaatcaaaaacttcctcgaatttcagcgtaaactgcagcatgatgttctgaagcttgagtttgaacgccatgaccctgtggatgggagaattactgagaggcagtttggtggcatgctacttgcctacagtggggtgcagtccaagaagctgaccgccatgcagaggcagctcaagaagcacttcaaagaaggaaagggtctgacatttcaggaggtggagaacttctttactttcctaaagaacattaatgatgtggacactgcattgagtttttaccatatggctggagcatctcttgataaagtgaccatgcagcaggtggccaggacagtggctaaagtggagctctcagaccacgtgtgtgatgtggtgtttgcactctttgactgtgatggcaatggcgaactgagcaataaggaatttgtttccatcatgaagcaacggctgatgagaggcctggaaaagcccaaagacatgggtttcactcgcctcatgcaggccatgtggaaatgtgcacaggaaactgcctgggacttcgctttacccaaacagtaaccccacactgcaagaggggacccctccacccccagtaccctggaccccctccgcagagtctcggcagagccctttgtgctgctgcttctggaagtagtctcccttcctcccgggatgacctcaggactctgtcggtttcccctctttacccttccccgtccccgtgttctgctgggctctgattctgcccaatgagtatccccataggttctcaaaaacatgaacaagtctgtaaagctcagacatttgtcagcctcaacagcaccacccattcaagcatcctgtggataaagaattcagggaaccatccacacacctgccaaccctgggaagcatccagttctcaaatcgtttttgctatggatttatactaacaagaacattccttgacttccctcctgctggtgttttaaagccacaagtagggaagatatctggcaggcagaaagaagtctgtgatgataaacaatgatgaggatgacctaggcaccctacgctagtgtgagaagcctgcgccccaggaaggatctgtgttagtccctgggatggctccaaggcctgctctaggaaggcagcatgctcagtgggaacacagcaagattcagaatttaaagtagttgcttcatggctctgtgcactcccttttcttcctcgcagcctccctaagatgactccagtgtgaccctgtgcttagtgagcaatagtgattgagctcatgttccctgcaagtgccatttcctctccaggatgggcctctaaagctgaggcctggctcagagcctgtttgccctctgtcttaaacaattgtaaatatcacttaaattataaccatttgcaataaacatccccaaagttccctgtctcctttattttagggtcctctaggcccttttcattttatgtccccactggatttgagatcttgctggaagcagacctgttttctttctaccagagtctggttctttctgatgaagagcagctttaggcacagacaaaaagtgagggcttttgga

SEQ ID NO: 421852 - DNA, 2212 bp, Homo sapiens
gtgagagtggcgcggagggggtggaggtttgtctccgctgtttcatctctatggctgtcagaggtgggcggctttgaccgagaggctgctggagctcgtgtttggacgcgatgtttcgtctgaactcactttctgctttggcagaactggctgtgggttctcgatggtaccatggaggatcacagcccatccagatccggcgaagactaatgatggtggctttcctgggagcatctgcagtaactgcaagtactggtcttttgtggaagagggcccatgcagaatctccaccatgtgtagacaacctaaaaagtgacatcggtgataaagggaagaataaagatgaaggggatgtttgtaaccatgagaaaaagactgcagatcttgcccctcacccagaagagaaaaagaagaaacgttctggattcagagacagaaaagtgatggaatatgagaataggattcgagcctactccacgccagacaaaatcttccgatattttgccaccttgaaagtcatcagtgagcctggtgaagcagaagtgtttatgacaccagaagattttgtgcgatccataacacccaatgaaaaacaaccagaacacttgggtctggatcaatatataataaaacgctttgatggaaagaaaatttcccaggaacgagaaaaatttgctgatgaaggcagtatattttacacccttggagaatgtgggctcatatccttttcagactacattttcctcacaactgttctttccactcctcagagaaattttgaaattgccttcaagatgtttgatttgaatggagatggagaagtagatatggaagaatttgaacaggttcagagcatcattcgctcccaaaccagtatgggtatgcgccacagagatcgtccaactactggcaacaccctcaagtctggcttgtgttcagccctcacaacctacttttttggagctgatctgaagggaaagctgacaatcaaaaacttcctcgaatttcagcgtaaactgcagcatgatgttctgaagcttgagtttgaacgccatgaccctgtggatgggagaattactgagaggcagtttggtggcatgctacttgcctacagtggggtgcagtccaagaagctgaccgccatgcagaggcagctcaagaagcacttcaaagaaggaaagggtctgacatttcaggaggtggagaacttctttactttcctaaagaacattaatgatgtggacactgcattgagtttttaccatatggctggagcatctcttgataaagtgaccatgcagcaggtggccaggacagtggctaaagtggagctctcagaccacgtgtgtgatgtggtgtttgcactctttgactgtgatggcaatggcgaactgagcaataaggaatttgtttccatcatgaagcaacggctgatgagaggcctggaaaagcccaaagacatgggtttcactcgcctcatgcaggccatgtggaaatgtgcacaggaaactgcctgggacttcgctttacccaaacagtaaccccacactgcaagaggggacccctccacccccagtaccctggaccccctccgcagagtctcggcagagccctttgtgctgctgcttctggaagtagtctcccttcctcccgggatgacctcaggactctgtcggtttcccctctttacccttccccgtccccgtgttctgctgggctctgattctgcccaatgagtatccccataggttctcaaaaacatgaacaagtctgtaaagctcagacatttgtcagcctcaacagcaccacccattcaagcatcctgtggataaagaattcagggaaccatccacacacctgccaaccctgggaagcatccagttctcaaatcgtttttgctatggatttatactaacaagaacattccttgacttccctcctgctggtgttttaaagccacaagtagggaagatatctggcaggcagaaagaagtctgtgatgataaacaatgatgaggatgacctaggcaccctacgctagtgtgagaagcctgcgccccaggaaggatctgtgttagtccctgggatggctccaaggcctgctctaggaaggcagcatgctcagtgggaacacagcaagattcagaatttaaagtagttgcttcatggctccctacccccgcatccacttccctcatggccacaatagtgc

SEQ ID NO: 421853 - DNA, 2432 bp, Homo sapiens
gtgagagtggcgcggagggggtggaggtttgtctccgctgtttcatctctatggctgtcagaggtgggcggctttgaccgagaggctgctggagctcgtgtttggacgcgatgtttcgtctgaactcactttctgctttggcagaactggctgtgggttctcgatggtaccatggaggatcacagcccatccagatccggcgaagactaatgatggtggctttcctgggagcatctgcagtaactgcaagtactggtcttttgtggaagagggcccatgcagaatctccaccatgtgtagacaacctaaaaagtgacatcggtgataaagggaagaataaagatgaaggggatgtttgtaaccatgagaaaaagactgcagatcttgcccctcacccagaagagaaaaagaagaaacgttctggattcagagacagaaaagtgatggaatatgagaataggattcgagcctactccacgccagacaaaatcttccgatattttgccaccttgaaagtcatcagtgagcctggtgaagcagaagtgtttatgacaccagaagattttgtgcgatccataacacccaatgaaaaacaaccagaacacttgggtctggatcaatatataataaaacgctttgatggaaagaaaatttcccaggaacgagaaaaatttgctgatgaaggcagtatattttacacccttggagaatgtgggctcatatccttttcagactacattttcctcacaactgttctttccactcctcagagaaattttgaaattgccttcaagatgtttgatttgaatggagatggagaagtagatatggaagaatttgaacaggttcagagcatcattcgctcccaaaccagtatgggtatgcgccacagagatcgtccaactactggcaacaccctcaagtctggcttgtgttcagccctcacaacctacttttttggagctgatctgaagggaaagctgacaatcaaaaacttcctcgaatttcagcgtaaactgcagcatgatgttctgaagcttgagtttgaacgccatgaccctgtggatgggagaattactgagaggcagtttggtggcatgctacttgcctacagtggggtgcagtccaagaagctgaccgccatgcagaggcagctcaagaagcacttcaaagaaggaaagggtctgacatttcaggaggtggagaacttctttactttcctaaagaacattaatgatgtggacactgcattgagtttttaccatatggctggagcatctcttgataaagtgaccatgcagcaggtggccaggacagtggctaaagtggagctctcagaccacgtgtgtgatgtggtgtttgcactctttgactgtgatggcaatggcgaactgagcaataaggaatttgtttccatcatgaagcaacggctgatgagaggcctggaaaagcccaaagacatgggtttcactcgcctcatgcaggccatgtggaaatgtgcacaggaaactgcctgggacttcgctttacccaaacagtaaccccacactgcaagaggggacccctccacccccagtaccctggaccccctccgcagagtctcggcagagccctttgtgctgctgcttctggaagtagtctcccttcctcccgggatgacctcaggactctgtcggtttcccctctttacccttccccgtccccgtgttctgctgggctctgattctgcccaatgagtatccccataggttctcaaaaacatgaacaagtctgtaaagctcagacatttgtcagcctcaacagcaccacccattcaagcatcctgtggataaagaattcagggaaccatccacacacctgccaaccctgggaagcatccagttctcaaatcgtttttgctatggatttatactaacaagaacattccttgacttccctcctgctggtgttttaaagccacaagtagggaagatatctggcaggcagaaagaagtctgtgatgataaacaatgatgaggatgacctaggcaccctacgctagtgtgagaagcctgcgccccaggaaggatctgtgttagtccctgggatggctccaaggccctgtgcttagtgagcaatagtgattgagctcatgttccctgcaagtgccatttcctctccaggatgggcctctaaagctgaggcctggctcagagcctgtttgccctctgtcttaaacaattgtaaatatcacttaaattataaccatttgcaataaacatccccaaagttccctgtctcctttattttagggtcctctaggcccttttcattttatgtccccactggatttgagatcttgctggaagcagacctgttttctttctaccagagtctggttctttctgatgaagagcagctttaggcacagacaaaaagtgagggcttttgga

SEQ ID NO: 421854 - DNA, 1681 bp, Homo sapiens
gtgagagtggcgcggagggggtggaggtttgtctccgctgtttcatctctatggctgtcagaggtgggcggctttgaccgagaggctgctggagctcgtgtttggacgcgatgtttcgtctgaactcactttctgctttggcagaactggctgtgggttctcgatggtaccatggaggatcacagcccatccagatccggcgaagactaatgatggtggctttcctgggagcatctgcagtaactgcaagtactggtcttttgtggaagagggcccatgcagaatctccaccatgtgtagacaacctaaaaagtgacatcggtgataaagggaagaataaagatgaaggggatgtttgtaaccatgagaaaaagactgcagatcttgcccctcacccagaagagaaaaagaagaaacgttctggattcagagacagaaaagtgatggaatatgagaataggattcgagcctactccacgccagacaaaatcttccgatattttgccaccttgaaagtcatcagtgagcctggtgaagcagaagtgtttatgacaccagaagattttgtgcgatccataacacccaatgaaaaacaaccagaacacttgggtctggatcaatatataataaaacgctttgatggaaagaaaatttcccaggaacgagaaaaatttgctgatgaaggcagtatattttacacccttggagaatgtgggctcatatccttttcagactacattttcctcacaactgttctttccactcctcagagaaattttgaaattgccttcaagatgtttgatttgaatggagatggagaagtagatatggaagaatttgaacaggttcagagcatcattcgctcccaaaccagtatgggtatgcgccacagagatcgtccaactactggcaacaccctcaagtctggcttgtgttcagccctcacaacctacttttttggagctgatctgaagggaaagctgacaatcaaaaacttcctcgaatttcagcgtaaactgcagcatgatgttctgaagcttgagtttgaacgccatgaccctgtggatgggagaattactgagaggcagtttggtggcatgctacttgcctacagtggggtgcagtccaagaagctgaccgccatgcagaggcagctcaagaagcacttcaaagaaggaaagggtctgacatttcaggaggtggagaacttctttactttcctaaagaacattaatgatgtggacactgcattgagtttttaccatatggctggagcatctcttgataaagtgaccatgcagcaggtggccaggacagtggctaaagtggagctctcagaccacgtgtgtgatgtggtgtttgcactctttgactgtgatgcaatggcgaactgagcaataaggaatttgtttcccaattcccccccgcaccaacaacaacagcacaccacacgcagacggtacgcatgcttcttttctcttcgcgtcgcgcgcaggggggagcagcaaaacaaagaaacaccacgcggtgggaccccccccaaaaaaagaaacaaagaaacccacccagaagggggggagaggggcgagcaccacccaccgaggtatattttttggggggcggcgccagacaacaacattttttcggcggcgcaacaacactctccgggacaaaaacccgg

SEQ ID NO: 421855 - DNA, 456 bp, Homo sapiens
gttactcatctagaaggtcaggagtgtggctaaaggcagattcagaatttaaagtagttgcttcatggctctgtgcactcccttttcttcctcgcagcctccctaagatgactccagtgtgaccctgtgcttagtgagcaatagtgattgagctcatgttccctgcaagtgccatttcctctccaggatgggcctctaaagctgaggcctggctcagagcctgtttgccctctgtcttaaacaattgtaaatatcacttaaattataaccatttgcaataaacatccccaaagttccctgtctcctttattttagggtcctctaggcccttttcattttatgtccccactggatttgagatcttgctggaagcagacctgttttctttctaccagagtctggttctttctgatgaagagcagctttaggcacagacaaaaagtgagggcttttgga

SEQ ID NO: 421856 - DNA, 1192 bp, Homo sapiens
gggaaacaaatgggacacctagaaagactttattattttgcttttctgagctaatcaatgactttaatttggaaaagcaactaaatatttggagaaaaccatgaaaagaatatatacttacagacgggccaaggagatcttcaaggacactcctaaagaaaatttcccaggaacgagaaaaatttgctgatgaaggcagtatattttacacccttggagaatgtgggctcatatccttttcagactacattttcctcacaactgttctttccactcctcagagaaattttgaaattgccttcaagatgtttgatttgaatggagatggagaagtagatatggaagaatttgaacaggttcagagcatcattcgctcccaaaccagtatgggtatgcgccacagagatcgtccaactactggcaacaccctcaagtctggcttgtgttcagccctcacaacctacttttttggagctgatctgaagggaaagctgacaatcaaaaacttcctcgaatttcagcgtaaactgcagcatgatgttctgaagcttgagtttgaacgccatgaccctgtggatgggagaattactgagaggcagtttggtggcatgctacttgcctacagtggggtgcagtccaagaagctgaccgccatgcagaggcagctcaagaagcacttcaaagaaggaaagggtctgacatttcaggaggtggagaacttctttactttcctaaagaacattaatgatgtggacactgcattgagtttttaccatatggctggagcatctcttgataaagtgaccatgcagcaggtggccaggacagtggctaaagtggagctctcagaccacgtgtgtgatgtggtgtttgcactctttgactgtgatgcaatggcgaactgagcaataaggaatttgtttcccaattcccccccgcaccaacaacaacagcacaccacacgcagacggtacgcatgcttcttttctcttcgcgtcgcgcgcaggggggagcagcaaaacaaagaaacaccacgcggtgggaccccccccaaaaaaagaaacaaagaaacccacccagaagggggggagaggggcgagcaccacccaccgaggtatattttttggggggcggcgccagacaacaacattttttcggcggcgcaacaacactctccgggacaaaaacccgg

SEQ ID NO: 421857 - DNA, 2677 bp, Homo sapiens
gtgagagtggcgcggagggggtggaggtttgtctccgctgtttcatctctatggctgtcagaggtgggcggctttgaccgagaggctgctggagctcgtgtttggacgcgatgtttcgtctgaactcactttctgctttggcagaactggctgtgggttctcgatggtaccatggaggatcacagcccatccagatccggcgaagactaatgatggtggctttcctgggagcatctgcagtaactgcaagtactggtcttttgtggaagagggcccatgcagaatctccaccatgtgtagacaacctaaaaagtgacatcggtgataaagggaagaataaagatgaaggggatgtttgtaaccatgagaaaaagactgcagatcttgcccctcacccagaagagaaaaagaagaaacgttctggattcagagacagaaaagtgatggaatatgagaataggattcgagcctactccacgccagacaaaatcttccgatattttgccaccttgaaagtcatcagtgagcctggtgaagcagaagtgtttatgacaccagaagattttgtgcgatccataacacccaatgaaaaacaaccagaacacttgggtctggatcaatatataataaaacgctttgatggaaagaaaatttcccaggaacgagaaaaatttgctgatgaaggcagtatattttacacccttggagaatgtgggctcatatccttttcagactacattttcctcacaactgttctttccactcctcagagaaattttgaaattgccttcaagatgtttgatttgaatggagatggagaagtagatatggaagaatttgaacaggttcagagcatcattcgctcccaaaccagtatgggtatgcgccacagagatcgtccaactactggcaacaccctcaagtctggcttgtgttcagccctcacaacctacttttttggagctgatctgaagggaaagctgacaatcaaaaacttcctcgaatttcagcgtaaactgcagcatgatgttctgaagcttgagtttgaacgccatgaccctgtggatgggagaattactgagaggcagtttggtggcatgctacttgcctacagtggggtgcagtccaagaagctgaccgccatgcagaggcagctcaagaagcacttcaaagaaggaaagggtctgacatttcaggaggtggagaacttctttactttcctaaagaacattaatgatgtggacactgcattgagtttttaccatatggctggagcatctcttgataaaggaaagggcaccatcttcatggggagaagatgagtacttgaaatatcaagacaattgcagaaggctgtgccctgagagaatggaagaactgggaaagagaaaaggaagtcagaagcttaagtgaccatgcagcaggtggccaggacagtggctaaagtggagctctcagaccacgtgtgtgatgtggtgtttgcactctttgactgtgatggcaatggcgaactgagcaataaggaatttgtttccatcatgaagcaacggctgatgagaggcctggaaaagcccaaagacatgggtttcactcgcctcatgcaggccatgtggaaatgtgcacaggaaactgcctgggacttcgctttacccaaacagtaaccccacactgcaagaggggacccctccacccccagtaccctggaccccctccgcagagtctcggcagagccctttgtgctgctgcttctggaagtagtctcccttcctcccgggatgacctcaggactctgtcggtttcccctctttacccttccccgtccccgtgttctgctgggctctgattctgcccaatgagtatccccataggttctcaaaaacatgaacaagtctgtaaagctcagacatttgtcagcctcaacagcaccacccattcaagcatcctgtggataaagaattcagggaaccatccacacacctgccaaccctgggaagcatccagttctcaaatcgtttttgctatggatttatactaacaagaacattccttgacttccctcctgctggtgttttaaagccacaagtagggaagatatctggcaggcagaaagaagtctgtgatgataaacaatgatgaggatgacctaggcaccctacgctagtgtgagaagcctgcgccccaggaaggatctgtgttagtccctgggatggctccaaggcctgctctaggaaggcagcatgctcagtgggaacacagcaagattcagaatttaaagtagttgcttcatggctctgtgcactcccttttcttcctcgcagcctccctaagatgactccagtgtgaccctgtgcttagtgagcaatagtgattgagctcatgttccctgcaagtgccatttcctctccaggatgggcctctaaagctgaggcctggctcagagcctgtttgccctctgtcttaaacaattgtaaatatcacttaaattataaccatttgcaataaacatccccaaagttccctgtctcctttattttagggtcctctaggcccttttcattttatgtccccactggatttgagatcttgctggaagcagacctgttttctttctaccagagtctggttctttctgatgaagagcagctttaggcacagacaaaaagtgagggcttttgga

SEQ ID NO: 421858 - DNA, 2532 bp, Homo sapiens
cgtaagcttgggccccttgtggatactctagagcggccgctcgcgatctagaacgataggctgctggagctcgtgtttggacgcgatgtttcgtctgaactcactttctgctttggcagaactggctgtgggttctcgatggtaccatggaggatcacagcccatccagatccggcgaagactaatgatggtggctttcctgggagcatctgcagtaactgcaagtactggtcttttgtggaagagggcccatgcagaatctccaccatgtgtagacaacctaaaaagtgacatcggtgataaagggaagaataaagatgaaggggatgtttgtaaccatgagaaaaagactgcagatcttgcccctcacccagaagagaaaaagaagaaacgttctggattcagagacagaaaagtgatggaatatgagaataggattcgagcctactccacgccagacaaaatcttccgatattttgccaccttgaaagtcatcagtgagcctggtgaagcagaagtgtttatgacaccagaagattttgtgcgatccataacacccaatgaaaaacaaccagaacacttgggtctggatcaatatataataaaacgctttgatggaaagaaaatttcccaggaacgagaaaaatttgctgatgaaggcagtatattttacacccttggagaatgtgggctcatatccttttcagactacattttcctcacaactgttctttccactcctcagagaaattttgaaattgccttcaagatgtttgatttgaatggagatggagaagtagatatggaagaatttgaacaggttcagagcatcattcgctcccaaaccagtatgggtatgcgccacagagatcgtccaactactggcaacaccctcaagtctggcttgtgttcagccctcacaacctacttttttggagctgatctgaagggaaagctgacaatcaaaaacttcctcgaatttcagcgtaaactgcagcatgatgttctgaagcttgagtttgaacgccatgaccctgtggatgggagaattactgagaggcagtttggtggcatgctacttgcctacagtggggtgcagtccaagaagctgaccgccatgcagaggcagctcaagaagcacttcaaagaaggaaagggtctgacatttcaggaggtggagaacttctttactttcctaaagaacattaatgatgtggacactgcattgagtttttaccatatggctggagcatctcttgataaagtgaccatgcagcaggtggccaggacagtggctaaagtggagctctcagaccacgtgtgtgatgtggtgtttgcactctttgactgtgatggcaatggcgaactgagcaataaggaatttgtttccatcatgaagcaacggctgatgagaggcctggaaaagcccaaagacatgggtttcactcgcctcatgcaggccatgtggaaatgtgcacaggaaactgcctgggacttcgctttacccaaacagtaaccccacactgcaagaggggacccctccacccccagtaccctggaccccctccgcagagtctcggcagagccctttgtgctgctgcttctggaagtagtctcccttcctcccgggatgacctcaggactctgtcggtttcccctctttacccttccccgtccccgtgttctgctgggctctgattctgcccaatgagtatccccataggttctcaaaaacatgaacaagtctgtaaagctcagacatttgtcagcctcaacagcaccacccattcaagcatcctgtggataaagaattcagggaaccatccacacacctgccaaccctgggaagcatccagttctcaaatcgtttttgctatggatttatactaacaagaacattccttgacttccctcctgctggtgttttaaagccacaagtagggaagatatctggcaggcagaaagaagtctgtgatgataaacaatgatgaggatgacctaggcaccctacgctagtgtgagaagcctgcgccccaggaaggatctgtgttagtccctgggatggctccaaggcctgctctaggaaggcagcatgctcagtgggaacacagcaagattcagaatttaaagtagttgcttcatggctctgtgcactcccttttcttcctcgcagcctccctaagatgactccagtgtgaccctgtgcttagtgagcaatagtgattgagctcatgttccctgcaagtgccatttcctctccaggatgggcctctaaagctgaggcctggctcagagcctgtttgccctctgtcttaaacaattgtaaatatcacttaaattataaccatttgcaataaacatccccaaagttccctgtctcctttattttagggtcctctaggcccttttcattttatgtccccactggatttgagatcttgctggaagcagacctgttttctttctaccagagtctggttctttctgatgaagagcagctttaggcacagacaaaaagtgagggcttttgga

SEQ ID NO: 421859 - DNA, 2190 bp, Homo sapiens
gaaaaagaaaaatacctttaggtgaacactatagatcacacccgggtgaggtttccaattaaagtcagcgtacctcggattaaggtattagtgacagctagaatagatcgactactcagtcaacaaattacgatatttgcacttgaaagtcatcagtgagcctggtgaagcagaagtgtttatgacaccagaagattttgtgcgatccataacacccaatgaaaaacaaccagaacacttgggtctggatcaatatataataaaacgctttgatggaaagaaaatttcccaggaacgagaaaaatttgctgatgaaggcagtatattttacacccttggagaatgtgggctcatatccttttcagactacattttcctcacaactgttctttccactcctcagagaaattttgaaattgccttcaagatgtttgatttgaatggagatggagaagtagatatggaagaatttgaacaggttcagagcatcattcgctcccaaaccagtatgggtatgcgccacagagatcgtccaactactggcaacaccctcaagtctggcttgtgttcagccctcacaacctacttttttggagctgatctgaagggaaagctgacaatcaaaaacttcctcgaatttcagcgtaaactgcagcatgatgttctgaagcttgagtttgaacgccatgaccctgtggatgggagaattactgagaggcagtttggtggcatgctacttgcctacagtggggtgcagtccaagaagctgaccgccatgcagaggcagctcaagaagcacttcaaagaaggaaagggtctgacatttcaggaggtggagaacttctttactttcctaaagaacattaatgatgtggacactgcattgagtttttaccatatggctggagcatctcttgataaagtgaccatgcagcaggtggccaggacagtggctaaagtggagctctcagaccacgtgtgtgatgtggtgtttgcactctttgactgtgatggcaatggcgaactgagcaataaggaatttgtttccatcatgaagcaacggctgatgagaggcctggaaaagcccaaagacatgggtttcactcgcctcatgcaggccatgtggaaatgtgcacaggaaactgcctgggacttcgctttacccaaacagtaaccccacactgcaagaggggacccctccacccccagtaccctggaccccctccgcagagtctcggcagagccctttgtgctgctgcttctggaagtagtctcccttcctcccgggatgacctcaggactctgtcggtttcccctctttacccttccccgtccccgtgttctgctgggctctgattctgcccaatgagtatccccataggttctcaaaaacatgaacaagtctgtaaagctcagacatttgtcagcctcaacagcaccacccattcaagcatcctgtggataaagaattcagggaaccatccacacacctgccaaccctgggaagcatccagttctcaaatcgtttttgctatggatttatactaacaagaacattccttgacttccctcctgctggtgttttaaagccacaagtagggaagatatctggcaggcagaaagaagtctgtgatgataaacaatgatgaggatgacctaggcaccctacgctagtgtgagaagcctgcgccccaggaaggatctgtgttagtccctgggatggctccaaggcctgctctaggaaggcagcatgctcagtgggaacacagcaagattcagaatttaaagtagttgcttcatggctctgtgcactcccttttcttcctcgcagcctccctaagatgactccagtgtgaccctgtgcttagtgagcaatagtgattgagctcatgttccctgcaagtgccatttcctctccaggatgggcctctaaagctgaggcctggctcagagcctgtttgccctctgtcttaaacaattgtaaatatcacttaaattataaccatttgcaataaacatccccaaagttccctgtctcctttattttagggtcctctaggcccttttcattttatgtccccactggatttgagatcttgctggaagcagacctgttttctttctaccagagtctggttctttctgatgaagagcagctttaggcacagacaaaaagtgagggcttttgga

SEQ ID NO: 421860 - DNA, 1929 bp, Homo sapiens
gtgagagtggcgcggagggggtggaggtttgtctccgctgtttcatctctatggctgtcagaggtgggcggctttgaccgagaggctgctggagctcgtgtttggacgcgatgtttcgtctgaactcactttctgctttggcagaactggctgtgggttctcgatggtaccatggaggatcacagcccatccagatccggcgaagactaatgatggtggctttcctgggagcatctgcagtaacagtatgggtatgcgccacagagatcgtccaactactggcaacaccctcaagtctggcttgtgttcagccctcacaacctacttttttggagctgatctgaagggaaagctgacaatcaaaaacttcctcgaatttcagcgtaaactgcagcatgatgttctgaagcttgagtttgaacgccatgaccctgtggatgggagaattactgagaggcagtttggtggcatgctacttgcctacagtggggtgcagtccaagaagctgaccgccatgcagaggcagctcaagaagcacttcaaagaaggaaagggtctgacatttcaggaggtggagaacttctttactttcctaaagaacattaatgatgtggacactgcattgagtttttaccatatggctggagcatctcttgataaagtgaccatgcagcaggtggccaggacagtggctaaagtggagctctcagaccacgtgtgtgatgtggtgtttgcactctttgactgtgatggcaatggcgaactgagcaataaggaatttgtttccatcatgaagcaacggctgatgagaggcctggaaaagcccaaagacatgggtttcactcgcctcatgcaggccatgtggaaatgtgcacaggaaactgcctgggacttcgctttacccaaacagtaaccccacactgcaagaggggacccctccacccccagtaccctggaccccctccgcagagtctcggcagagccctttgtgctgctgcttctggaagtagtctcccttcctcccgggatgacctcaggactctgtcggtttcccctctttacccttccccgtccccgtgttctgctgggctctgattctgcccaatgagtatccccataggttctcaaaaacatgaacaagtctgtaaagctcagacatttgtcagcctcaacagcaccacccattcaagcatcctgtggataaagaattcagggaaccatccacacacctgccaaccctgggaagcatccagttctcaaatcgtttttgctatggatttatactaacaagaacattccttgacttccctcctgctggtgttttaaagccacaagtagggaagatatctggcaggcagaaagaagtctgtgatgataaacaatgatgaggatgacctaggcaccctacgctagtgtgagaagcctgcgccccaggaaggatctgtgttagtccctgggatggctccaaggcctgctctaggaaggcagcatgctcagtgggaacacagcaagattcagaatttaaagtagttgcttcatggctctgtgcactcccttttcttcctcgcagcctccctaagatgactccagtgtgaccctgtgcttagtgagcaatagtgattgagctcatgttccctgcaagtgccatttcctctccaggatgggcctctaaagctgaggcctggctcagagcctgtttgccctctgtcttaaacaattgtaaatatcacttaaattataaccatttgcaataaacatccccaaagttccctgtctcctttattttagggtcctctaggcccttttcattttatgtccccactggatttgagatcttgctggaagcagacctgttttctttctaccagagtctggttctttctgatgaagagcagctttaggcacagacaaaaagtgagggcttttgga

SEQ ID NO: 421861 - DNA, 1697 bp, Homo sapiens
caaaaatatacatgtgaaataaaactcagtattttttggtctccccaccatttccatgtctgaccaccgctactactatgtcctatcataacattccatacatacttaaaaccaagcaaagggtggagttccatctttaaaaactaaacaggcattttggacaacacattcttggcgcttgagtttgaacgccatgaccctgtggatgggagaattactgagaggcagtttggtggcatgctacttgcctacagtggggtgcagtccaagaagctgaccgccatgcagaggcagctcaagaagcacttcaaagaaggaaagggtctgacatttcaggaggtggagaacttctttactttcctaaagaacattaatgatgtggacactgcattgagtttttaccatatggctggagcatctcttgataaagtgaccatgcagcaggtggccaggacagtggctaaagtggagctctcagaccacgtgtgtgatgtggtgtttgcactctttgactgtgatggcaatggcgaactgagcaataaggaatttgtttccatcatgaagcaacggctgatgagaggcctggaaaagcccaaagacatgggtttcactcgcctcatgcaggccatgtggaaatgtgcacaggaaactgcctgggacttcgctttacccaaacagtaaccccacactgcaagaggggacccctccacccccagtaccctggaccccctccgcagagtctcggcagagccctttgtgctgctgcttctggaagtagtctcccttcctcccgggatgacctcaggactctgtcggtttcccctctttacccttccccgtccccgtgttctgctgggctctgattctgcccaatgagtatccccataggttctcaaaaacatgaacaagtctgtaaagctcagacatttgtcagcctcaacagcaccacccattcaagcatcctgtggataaagaattcagggaaccatccacacacctgccaaccctgggaagcatccagttctcaaatcgtttttgctatggatttatactaacaagaacattccttgacttccctcctgctggtgttttaaagccacaagtagggaagatatctggcaggcagaaagaagtctgtgatgataaacaatgatgaggatgacctaggcaccctacgctagtgtgagaagcctgcgccccaggaaggatctgtgttagtccctgggatggctccaaggcctgctctaggaaggcagcatgctcagtgggaacacagcaagattcagaatttaaagtagttgcttcatggctctgtgcactcccttttcttcctcgcagcctccctaagatgactccagtgtgaccctgtgcttagtgagcaatagtgattgagctcatgttccctgcaagtgccatttcctctccaggatgggcctctaaagctgaggcctggctcagagcctgtttgccctctgtcttaaacaattgtaaatatcacttaaattataaccatttgcaataaacatccccaaagttccctgtctcctttattttagggtcctctaggcccttttcattttatgtccccactggatttgagatcttgctggaagcagacctgttttctttctaccagagtctggttctttctgatgaagagcagctttaggcacagacaaaaagtgagggcttttgga

SEQ ID NO: 421862 - DNA, 1765 bp, Homo sapiens
gtgagagtggcgcggagggggtggaggtttgtctccgctgtttcatctctatggctgtcagaggtgggcggctttgaccgagaggctgctggagctcgtgtttggacgcgatgtttcgtctgaactcactttctgctttggcagaactggctgtgggttctcgatggtaccatggaggatcacagcccatccagatccggcgaagactaatgatggtggctttcctgggagcatctgcagtaactgcaagtactggtcttttgtggaagagggcccatgcagaatctccaccatgtgtagacaacctaaaaagtgacatcggtgataaagggaagaataaagatgaaggggatgtttgtaaccatgagaaaaagactgcagatcttgcccctcacccagaagagaaaaagaagaaacgttctggattcagagacagaaaagtgatggaatatgagaataggattcgagcctactccacgccagacaaaatcttccgatattttgccaccttgaaagtcatcagtgagcctggtgaagcagaagtgtttatgacaccagaagattttgtgcgatccataacacccaatgaaaaacaaccagaacacttgggtctggatcaatatataataaaacgctttgatggaaagaaaatttcccaggaacgagaaaaatttgctgatgaaggcagtatattttacacccttggagaatgtgggctcatatccttttcagactacattttcctcacaactgttctttccactcctcagagaaattttgaaattgccttcaagatgtttgatttgaatggagatggagaagtagatatggaagaatttgaacaggttcagagcatcattcgctcccaaaccagtatgggtatgcgccacagagatcgtccaactactggcaacaccctcaagtctggcttgtgttcagccctcacaacctacttttttggagctgatctgaagggaaagctgacaatcaaaaacttcctcgaatttcagcgtaaactgcagcatgatgttctgaagcttgagtttgaacgccatgaccctgtggatgggagaattactgagaggcagtttggtggcatgctacttgcctacagtggggtgcagtccaagaagctgaccgccatgcagaggcagctcaagaagcacttcaaagaaggaaagggtctgacatttcaggaggtggagaacttctttactttcctaaagaacattaatgatgtggacactgcattgagtttttaccatatggctggagcatctcttgataaagtgaccatgcagcaggtggccaggacagtggctaaagtggagctctcagaccacgtgtgtgatgtggtgtttgcactctttgactgtgatgtgtgcactcccttttcttcctcgcagcctccctaagatgactccagtgtgaccctgtgcttagtgagcaatagtgattgagctcatgttccctgcaagtgccatttcctctccaggatgggcctctaaagctgaggcctggctcagagcctgtttgccctctgtcttaaacaattgtaaatatcacttaaattataaccatttgcaataaacatccccaaagttccctgtctcctttattttagggtcctctaggcccttttcattttatgtccccactggatttgagatcttgctggaagcagacctgttttctttctaccagagtctggttctttctgatgaagagcagctttaggcacagacaaaaagtgagggcttttgga

SEQ ID NO: 421863 - DNA, 1409 bp, Homo sapiens
gaaatggtgggcaggagcacatgttgcttaaatttctgacagtggctggagattaccgattggttaggggagaggaagtaaagtaaaatatttataaattctccactgggtggagtctgagcagttctttgaatttctcaccctaagatctggcctgtacattttcaaggaattcttgagaggttcttggagagattctgggagccaaacactccattgggatcctagctgttttagagaacaacttgtaatggagccttcatctcttgagctgccggctgacacagtgcagcgcattgcggctgaactcaaatgccacccaacggatgagagggtggctctccacctagatgaggaagataagctgaggcacttcagggagtgcttttatattcccaaaatacaggatctgcctccagttgatttatcattagtgaataaagatgaaaatgccatctatttcttgggaaattctcttggccttcaaccaaaaatggttaaaacatatcttgaagaagaactagataagtgggccaaaatagcagcctatggtcatgaagtggggaagcgtccttggattacaggagatgagagtattgtaggccttatgaaggacattgtaggagccaatgagaaagaaatagccctaatgaatgctttgactgtaaatttacatcttctaatgttatcattttttaagcctacgccaaaacgatataaaattcttctagaagccaaagccttcccttctgatcattatgctattgagtcacaactacaacttcacggacttaacattgaagaaagtatgcggatgataaagccaagagagggggaagaaaccttaagaatagaggatatccttgaagtaattgagaaggaaggagactcaattgcagtgatcctgttcagtggggtgcatttttacactggacagcactttaatattcctgccatcacaaaagctggacaagcgaagggttgttatgttggctttgatctagcacatgcagttggaaatgttgaactctacttacatgactggggagttgattttgcctgctggtgttcctacaagtatttaaatgcaggagcaggaggaattgctggtgccttcattcatgaaaagcatgcccatacgattaaacctgcgagatcggagttctttaattaggaatggaatgcaacagatttggacaagtcaaggacaagagctttagagagaccaaagagtttttcactgttaaagtgtccagtatgtagccgagaaccatatggagaacatcaaatacagtggaacaaatgtaactgctattgatgtcacactttgtgaagtagtctttgttgcttaaaaagggtgacatctagtggctaaacatgttatttcaaataaataatatcgaaataac

SEQ ID NO: 421864 - DNA, 1296 bp, Homo sapiens
  misc_feature (5)..(9): n is a, c, g, or t
  misc_feature (465)..(465): n is a, c, g, or t
gaatnnnnncagggagaaggcctggaaattatcaccagaccaactcaaaattacaaagttttacaggtgtaagtgtgcattcatctgaagacataagtgattaacttcttttaatctacaactaaggtctgagtcctgaagaccttcctctggagcctcagtaaatttacttaatctaaatgggtccaggtgctggagtgattacccttatcttgtcttctgctaaatcactgaagtttgaggagttcctttagaccttcaataaacttgtttgtagaggcctggagagtttcttcacaaccacagtaaaacttgtttaatcctgaatgggtcctgttaagaattccttcattattctgtcatgctttaaggcccagggaaagcctaggcaaaactcttgataggcttttgttcatcccagcctttgtataagggcactgacttttttagtttttaatatttaangtaaccactcggtcagtactgaaacagttgtgatggaggcctgcattagtgaaacctggcctgccacaggtacatgatattaacttacattttcttcctttgcaagttttatttaagtgacatttgtacaatttttctgtcatggaaattttaccttcagtatttaatagcaaagcatttaaaggagggcatgattttacacaaaaagattatgtaaagggagatatttattggaaagatcaaatatgggcatttcctttttatgcatgatttactcttaatttttgcttctttgtaaatcaataagacactttaatctgattgtttctcattccacagatctttaagcaagcgacaatgaaggcattgcggaaaaaatctgttttgctaactggctatctggaatacctgatcaagcataactatggcaaagataaagcagcaaccaagaaaccagttgtgaacataattactccgtctcatgtagaggagcgggggtgccagctaacaataacattttctgttccaaacaaagatgttttccaagaactagaaaaaagaggagtggtttgtgacaagcggaatccaaatggcattcgagtggctccagttcctctctataattctttccatgatgtttataaatttaccaatctgctcacttctatacttgactctgcagaaacaaaaaattagcagtgttttctagaacaacttaagcaaattatactgaaagctgctgtggttatttcagtattattcgatttttaattattgaaagtatgtcaccattgaccacatgtaactaacaataaataatataccttacag

SEQ ID NO: 421865 - DNA, 1606 bp, Homo sapiens
gtgacaagggaaaggagacgatggagccgccatgttgaacacgtctagcctcagttttagagaacaacttgtaatggagccttcatctcttgagctgccggctgacacagtgcagcgcattgcggctgaactcaaatgccacccaacggatgagagggtggctctccacctagatgaggaagataagctgaggcacttcagggagtgcttttatattcccaaaatacaggatctgcctccagttgatttatcattagtgaataaagatgaaaatgccatctatttcttgggaaattctcttggccttcaaccaaaaatggttaaaacatatcttgaagaagaactagataagtgggccaaaatagcagcctatggtcatgaagtggggaagcgtccttggattacaggagatgagagtattgtaggccttatgaaggacattgtaggagccaatgagaaagaaatagccctaatgaatgctttgactgtaaatttacatcttctaatgttatcattttttaagcctacgccaaaacgatataaaattcttctagaagccaaagccttcccttctgatcattatgctattgagtcacaactacaacttcacggacttaacattgaagaaagtatgcggatgataaagccaagagagggggaagaaaccttaagaatagaggatatccttgaagtaattgagaaggaaggagactcaattgcagtgatcctgttcagtggggtgcatttttacactggacagcactttaatattcctgccatcacaaaagctggacaagcgaagggttgttatgttggctttgatctagcacatgcagttggaaatgttgaactctacttacatgactggggagttgattttgcctgctggtgttcctacaagtatttaaatgcaggagcaggaggaattgctggtgccttcattcatgaaaagcatgcccatacgattaaacctgcattagtgggatggtttggccatgaactcagcaccagatttaagatggataacaaactgcagttaatccctggggtctgtggattccgaatttcaaatcctcccattttgttggtctgttccttgcatgctagtttagagatctttaagcaagcgacaatgaaggcattgcggaaaaaatctgttttgctaactggctatctggaatacctgatcaagcataactatggcaaagataaagcagcaaccaagaaaccagttgtgaacataattactccgtctcatgtagaggagcgggggtgccagctaacaataacattttctgttccaaacaaagatgttttccaagaactagaaaaaagaggagtggtttgtgacaagcggaatccaaatggcattcgagtggctccagttcctctctataattctttccatgatgtttataaatttaccaatctgctcacttctatacttgactctgcagaaacaaaaaattagcagtgttttctagaacaacttaagcaaattatactgaaagctgctgtggttatttcagtattattcgatttttaattattgaaagtatgtcaccattgaccacatgtaactaacaataaataatataccttacag

SEQ ID NO: 421866 - DNA, 2019 bp, Homo sapiens
gaaatggtgggcaggagcacatgttgcttaaatttctgacagtggctggagattaccgattggttaggggagaggaagtaaagtaaaatatttataaattctccactgggtggagtctgagcagttctttgaatttctcaccctaagatctggcctgtacattttcaaggaattcttgagaggttcttggagagattctgggagccaaacactccattgggatcctagctggaatataaagaatggcttatcagtggagaccatcgacagttgagaaaagaagaagcccaaaaagtacaagaatgaaaatcgagagtatccttgaggaatcaccacactgtcttccacaatggttgaactagtttacagtcccaccaacagtgtaaaagtgttcctgtttctccacatcctctccagcacctgttgtttcctgactttttaatgatcgccattctaaccgacatgagttttagagaacaacttgtaatggagccttcatctcttgagctgccggctgacacagtgcagcgcattgcggctgaactcaaatgccacccaacggatgagagggtggctctccacctagatgaggaagataagctgaggcacttcagggagtgcttttatattcccaaaatacaggatctgcctccagttgatttatcattagtgaataaagatgaaaatgccatctatttcttgggaaattctcttggccttcaaccaaaaatggttaaaacatatcttgaagaagaactagataagtgggccaaaatagcagcctatggtcatgaagtggggaagcgtccttggattacaggagatgagagtattgtaggccttatgaaggacattgtaggagccaatgagaaagaaatagccctaatgaatgctttgactgtaaatttacatcttctaatgttatcattttttaagcctacgccaaaacgatataaaattcttctagaagccaaagccttcccttctgatcattatgctattgagtcacaactacaacttcacggacttaacattgaagaaagtatgcggatgataaagccaagagagggggaagaaaccttaagaatagaggatatccttgaagtaattgagaaggaaggagactcaattgcagtgatcctgttcagtggggtgcatttttacactggacagcactttaatattcctgccatcacaaaagctggacaagcgaagggttgttatgttggctttgatctagcacatgcagttggaaatgttgaactctacttacatgactggggagttgattttgcctgctggtgttcctacaagtatttaaatgcaggagcaggaggaattgctggtgccttcattcatgaaaagcatgcccatacgattaaacctgcattagtgggatggtttggccatgaactcagcaccagatttaagatggataacaaactgcagttaatccctggggtctgtggattccgaatttcaaatcctcccattttgttggtctgttccttgcatgctagtttagagatctttaagcaagcgacaatgaaggcattgcggaaaaaatctgttttgctaactggctatctggaatacctgatcaagcataactatggcaaagataaagcagcaaccaagaaaccagttgtgaacataattactccgtctcatgtagaggagcgggggtgccagctaacaataacattttctgttccaaacaaagatgttttccaagaactagaaaaaagaggagtggtttgtgacaagcggaatccaaatggcattcgagtggctccagttcctctctataattctttccatgatgtttataaatttaccaatctgctcacttctatacttgactctgcagaaacaaaaaattagcagtgttttctagaacaacttaagcaaattatactgaaagctgctgtggttatttcagtattattcgatttttaattattgaaagtatgtcaccattgaccacatgtaactaacaataaataatataccttacag

SEQ ID NO: 421867 - DNA, 1863 bp, Homo sapiens
gaaatggtgggcaggagcacatgttgcttaaatttctgacagtggctggagattaccgattggttaggggagaggaagtaaagtaaaatatttataaattctccactgggtggagtctgagcagttctttgaatttctcaccctaagatctggcctgtacattttcaaggaattcttgagaggttcttggagagattctgggagccaaacactccattgggatcctagctgttttagagaacaacttgtaatggagccttcatctcttgagctgccggctgacacagtgcagcgcattgcggctgaactcaaatgccacccaacggatgagagggtggctctccacctagatgaggaagataagctgaggcacttcagggagtgcttttatattcccaaaatacaggatctgcctccagttgatttatcattagtgaataaagatgaaaatgccatctatttcttgggaaattctcttggccttcaaccaaaaatggttaaaacatatcttgaagaagaactagataagtgggccaaaatagcagcctatggtcatgaagtggggaagcgtccttggattacaggagatgagagtattgtaggccttatgaaggacattgtaggagccaatgagaaagaaatagccctaatgaatgctttgactgtaaatttacatcttctaatgttatcattttttaagcctacgccaaaacgatataaaattcttctagaagccaaagccttcccttctgatcattatgctattgagtcacaactacaacttcacggacttaacattgaagaaagtatgcggatgataaagccaagagagggggaagaaaccttaagaatagaggatatccttgaagtaattgagaaggaaggagactcaattgcagtgatcctgttcagtggggtgcatttttacactggacagcactttaatattcctgccatcacaaaagctggacaagcgaagggttgttatgttggctttgatctagcacatgcagttggaaatgttgaactctacttacatgactggggagttgattttgcctgctggtgttcctacaagtatttaaatgcaggagcaggaggaattgctggtgccttcattcatgaaaagcatgcccatacgattaaacctgcattagtgggatggtttggccatgaactcagcaccagatttaagatggataacaaactgcagttaatccctggggtctgtggattccgaatttcaaatcctcccattttgttggtctgttccttgcatgctagtttagagaatagacttttaccctctgtgagatgaatttaaaagtgcctcagaatgcagttgcccttattgtggttgtaatggagaaaatctttaagcaagcgacaatgaaggcattgcggaaaaaatctgttttgctaactggctatctggaatacctgatcaagcataactatggcaaagataaagcagcaaccaagaaaccagttgtgaacataattactccgtctcatgtagaggagcgggggtgccagctaacaataacattttctgttccaaacaaagatgttttccaagaactagaaaaaagaggagtggtttgtgacaagcggaatccaaatggcattcgagtggctccagttcctctctataattctttccatgatgtttataaatttaccaatctgctcacttctatacttgactctgcagaaacaaaaaattagcagtgttttctagaacaacttaagcaaattatactgaaagctgctgtggttatttcagtattattcgatttttaattattgaaagtatgtcaccattgaccacatgtaactaacaataaataatataccttacag

SEQ ID NO: 421868 - DNA, 1702 bp, Homo sapiens
ttcgtactgggcctgagaaggaaggagttattcatctccttaagctttcaggcctcagggagaatcgtacattcccgtctatttggttgtagataaaagggataaggggcctctttctcaataactacttcacgtgtgatatagggggtggtgtgggcaccttggaaaaacaaaaccttaattttttgggtattcttgagagacgggttggtatccacattgtccttgtagtaggagcatcatctgtattgtctggaaacgcgtctgtgcctgcaagacagttatgttgagaggacaaggaggtgtcaacagggagaggcgccaggtggaggtggattgctaggaggcttccctgttgagctgcagccctgcgggcctggtggagttggcttagaggtgtcccctaagaacagatgatcagcaactgcctggcacacaccagagccttcttggaccaacgctggatttttggaccggagaaaccaagagaggccatgtagatttttccctgttgacagagctcccaggaaacttactggtaggagccaatgagaaagaaatagccctaatgaatgctttgactgtaaatttacatcttctaatgttatcattttttaagcctacgccaaaacgatataaaattcttctagaagccaaagccttcccttctgatcattatgctattgagtcacaactacaacttcacggacttaacattgaagaaagtatgcggatgataaagccaagagagggggaagaaaccttaagaatagaggatatccttgaagtaattgagaaggaaggagactcaattgcagtgatcctgttcagtggggtgcatttttacactggacagcactttaatattcctgccatcacaaaagctggacaagcgaagggttgttatgttggctttgatctagcacatgcagttggaaatgttgaactctacttacatgactggggagttgattttgcctgctggtgttcctacaagtatttaaatgcaggagcaggaggaattgctggtgccttcattcatgaaaagcatgcccatacgattaaacctgcattagtgggatggtttggccatgaactcagcaccagatttaagatggataacaaactgcagttaatccctggggtctgtggattccgaatttcaaatcctcccattttgttggtctgttccttgcatgctagtttagagatctttaagcaagcgacaatgaaggcattgcggaaaaaatctgttttgctaactggctatctggaatacctgatcaagcataactatggcaaagataaagcagcaaccaagaaaccagttgtgaacataattactccgtctcatgtagaggagcgggggtgccagctaacaataacattttctgttccaaacaaagatgttttccaagaactagaaaaaagaggagtggtttgtgacaagcggaatccaaatggcattcgagtggctccagttcctctctataattctttccatgatgtttataaatttaccaatctgctcacttctatacttgactctgcagaaacaaaaaattagcagtgttttctagaacaacttaagcaaattatactgaaagctgctgtggttatttcagtattattcgatttttaattattgaaagtatgtcaccattgaccacatgtaactaacaataaataatataccttacag

SEQ ID NO: 421869 - DNA, 1729 bp, Homo sapiens
gaaatggtgggcaggagcacatgttgcttaaatttctgacagtggctggagattaccgattggttaggggagaggaagtaaagtaaaatatttataaattctccactgggtggagtctgagcagttctttgaatttctcaccctaagatctggcctgtacattttcaaggaattcttgagaggttcttggagagattctgggagccaaacactccattgggatcctagctgttttagagaacaacttgtaatggagccttcatctcttgagctgccggctgacacagtgcagcgcattgcggctgaactcaaatgccacccaacggatgagagggtggctctccacctagatgaggaagataagctgaggcacttcagggagtgcttttatattcccaaaatacaggatctgcctccagttgatttatcattagtgaataaagatgaaaatgccatctatttcttgggaaattctcttggccttcaaccaaaaatggttaaaacatatcttgaagaagaactagataagtgggccaaaattattgtaggccttatgaaggacattgtaggagccaatgagaaagaaatagccctaatgaatgctttgactgtaaatttacatcttctaatgttatcattttttaagcctacgccaaaacgatataaaattcttctagaagccaaagccttcccttctgatcattatgctattgagtcacaactacaacttcacggacttaacattgaagaaagtatgcggatgataaagccaagagagggggaagaaaccttaagaatagaggatatccttgaagtaattgagaaggaaggagactcaattgcagtgatcctgttcagtggggtgcatttttacactggacagcactttaatattcctgccatcacaaaagctggacaagcgaagggttgttatgttggctttgatctagcacatgcagttggaaatgttgaactctacttacatgactggggagttgattttgcctgctggtgttcctacaagtatttaaatgcaggagcaggaggaattgctggtgccttcattcatgaaaagcatgcccatacgattaaacctgcattagtgggatggtttggccatgaactcagcaccagatttaagatggataacaaactgcagttaatccctggggtctgtggattccgaatttcaaatcctcccattttgttggtctgttccttgcatgctagtttagagatctttaagcaagcgacaatgaaggcattgcggaaaaaatctgttttgctaactggctatctggaatacctgatcaagcataactatggcaaagataaagcagcaaccaagaaaccagttgtgaacataattactccgtctcatgtagaggagcgggggtgccagctaacaataacattttctgttccaaacaaagatgttttccaagaactagaaaaaagaggagtggtttgtgacaagcggaatccaaatggcattcgagtggctccagttcctctctataattctttccatgatgtttataaatttaccaatctgctcacttctatacttgactctgcagaaacaaaaaattagcagtgttttctagaacaacttaagcaaattatactgaaagctgctgtggttatttcagtattattcgatttttaattattgaaagtatgtcaccattgaccacatgtaactaacaataaataatataccttacag

SEQ ID NO: 421870 - DNA, 1408 bp, Homo sapiens
gaaatggtgggcaggagcacatgttgcttaaatttctgacagtggctggagattaccgattggttaggggagaggaagtaaagtaaaatatttataaattctccactgggtggagtctgagcagttctttgaatttctcaccctaagatctggcctgtacattttcaaggaattcttgagaggttcttggagagattctgggagccaaacactccattgggatcctagctgttttagagaacaacttgtaatggagccttcatctcttgagctgccggctgacacagtgcagcgcattgcggctgaactcaaatgccacccaacggatgagagggtggctctccacctagatgaggaagataagctgaggcacttcagggagtgcttttatattcccaaaatacaggatctgcctccagttgatttatcattagtgaataaagatgaaaatgccatctatttcttgggaaattctcttggccttcaaccaaaaatggttaaaacatatcttgaagaagaactagataagtgggccaaaatagcagcctatggtcatgaagtggggaagcgtccttggattacaggagatgagagtattgtaggccttatgaaggacattgtaggagccaatgagaaagaaatagccctaatgaatgctttgactgtaaatttacatcttctaatgttatcattttttaagcctacgccaaaacgatataaaattcttctagaagccaaagccttcccttctgatcattatgctattgagtcacaactacaacttcacggacttaacattgaagaaagtatgcggatgataaagccaagagagggggaagaaaccttaagaatagaggatatccttgaagtaattgagaaggaaggagactcaattgcagtgatcctgttcagtggggtgcatttttacactggacagcactttaatattcctgccatcacaaaagctggacaagcgaagggttgttatgttggctttgatctagcacatgcagttggaaatgttgaactctacttacatgactggggagttgattttgcctgctggtgttcctacaagtatttaaatgcaggagcaggaggaattgctggtgccttcattcatgaaaagcatgcccatacgattaaacctgcgtgagtaccatcttcagctaattctttggtgatgaacaaattaatttgcattaataatatgttaaatttacatgagttccttaagatgctatccaataggaattaggattggattataattattttcctactctgctaacaacaatatacttcatttgaaatacatgctttccaaagaattcaattggttgaacaagaaatttaatcaaaaagggaagcttcagtgctaaaaacaagtcactgcaatcatgtaaag

SEQ ID NO: 421871 - DNA, 1636 bp, Homo sapiens
gaaatggtgggcaggagcacatgttgcttaaatttctgacagtggctggagattaccgattggttaggggagaggaagtaaagtaaaatatttataaattctccactgggtggagtctgagcagttctttgaatttctcaccctaagatctggcctgtacattttcaaggaattcttgagaggttcttggagagattctgggagccaaacactccattgggatcctagctgttttagagaacaacttgtaatggagccttcatctcttgagctgccggctgacacagtgcagcgcattgcggctgaactcaaatgccacccaacggatgagagggtggctctccacctagatgaggaagataagctgaggcacttcagggagtgcttttatattcccaaaatacaggatctgcctccagttgatttatcattagtgaataaagatgaaaatgccatctatttcttgggaaattctcttggccttcaaccaaaaatggttaaaacatatcttgaagaagaactagataagtgggccaaaatagcagcctatggtcatgaagtggggaagcgtccttggattacaggagatgagagtattgtaggccttatgaaggacattgtaggagccaatgagaaagaaatagccctaatgaatgctttgactgtaaatttacatcttctaatgttatcattttttaagcctacgccaaaacgatataaaattcttctagaagccaaagccttcccttctgatcattatgctattgagtcacaactacaacttcacggacttaacattgaagaaagtatgcggatgataaagccaagagagggttgttatgttggctttgatctagcacatgcagttggaaatgttgaactctacttacatgactggggagttgattttgcctgctggtgttcctacaagtatttaaatgcaggagcaggaggaattgctggtgccttcattcatgaaaagcatgcccatacgattaaacctgcattagtgggatggtttggccatgaactcagcaccagatttaagatggataacaaactgcagttaatccctggggtctgtggattccgaatttcaaatcctcccattttgttggtctgttccttgcatgctagtttagagatctttaagcaagcgacaatgaaggcattgcggaaaaaatctgttttgctaactggctatctggaatacctgatcaagcataactatggcaaagataaagcagcaaccaagaaaccagttgtgaacataattactccgtctcatgtagaggagcgggggtgccagctaacaataacattttctgttccaaacaaagatgttttccaagaactagaaaaaagaggagtggtttgtgacaagcggaatccaaatggcattcgagtggctccagttcctctctataattctttccatgatgtttataaatttaccaatctgctcacttctatacttgactctgcagaaacaaaaaattagcagtgttttctagaacaacttaagcaaattatactgaaagctgctgtggttatttcagtattattcgatttttaattattgaaagtatgtcaccattgaccacatgtaactaacaataaataatataccttacag

SEQ ID NO: 421872 - DNA, 1783 bp, Homo sapiens
gaaatggtgggcaggagcacatgttgcttaaatttctgacagtggctggagattaccgattggttaggggagaggaagtaaagtaaaatatttataaattctccactgggtggagtctgagcagttctttgaatttctcaccctaagatctggcctgtacattttcaaggaattcttgagaggttcttggagagattctgggagccaaacactccattgggatcctagctgttttagagaacaacttgtaatggagccttcatctcttgagctgccggctgacacagtgcagcgcattgcggctgaactcaaatgccacccaacggatgagagggtggctctccacctagatgaggaagataagctgaggcacttcagggagtgcttttatattcccaaaatacaggatctgcctccagttgatttatcattagtgaataaagatgaaaatgccatctatttcttgggaaattctcttggccttcaaccaaaaatggttaaaacatatcttgaagaagaactagataagtgggccaaaatagcagcctatggtcatgaagtggggaagcgtccttggattacaggagatgagagtattgtaggccttatgaaggacattgtaggagccaatgagaaagaaatagccctaatgaatgctttgactgtaaatttacatcttctaatgttatcattttttaagcctacgccaaaacgatataaaattcttctagaagccaaagccttcccttctgatcattatgctattgagtcacaactacaacttcacggacttaacattgaagaaagtatgcggatgataaagccaagagagggggaagaaaccttaagaatagaggatatccttgaagtaattgagaaggaaggagactcaattgcagtgatcctgttcagtggggtgcatttttacactggacagcactttaatattcctgccatcacaaaagctggacaagcgaagggttgttatgttggctttgatctagcacatgcagttggaaatgttgaactctacttacatgactggggagttgattttgcctgctggtgttcctacaagtatttaaatgcaggagcaggaggaattgctggtgccttcattcatgaaaagcatgcccatacgattaaacctgcattagtgggatggtttggccatgaactcagcaccagatttaagatggataacaaactgcagttaatccctggggtctgtggattccgaatttcaaatcctcccattttgttggtctgttccttgcatgctagtttagagatctttaagcaagcgacaatgaaggcattgcggaaaaaatctgttttgctaactggctatctggaatacctgatcaagcataactatggcaaagataaagcagcaaccaagaaaccagttgtgaacataattactccgtctcatgtagaggagcgggggtgccagctaacaataacattttctgttccaaacaaagatgttttccaagaactagaaaaaagaggagtggtttgtgacaagcggaatccaaatggcattcgagtggctccagttcctctctataattctttccatgatgtttataaatttaccaatctgctcacttctatacttgactctgcagaaacaaaaaattagcagtgttttctagaacaacttaagcaaattatactgaaagctgctgtggttatttcagtattattcgatttttaattattgaaagtatgtcaccattgaccacatgtaactaacaataaataatataccttacag

SEQ ID NO: 421873 - DNA, 1099 bp, Homo sapiens
gaaatggtgggcaggagcacatgttgcttaaatttctgacagtggctggagattaccgattggttaggggagaggaagtaaagtaaaatatttataaattctccactgggtggagtctgagcagttctttgaatttctcaccctaagatctggcctgtacattttcaaggaattcttgagaggttcttggagagattctgggagccaaacactccattgggatcctagctgttttagagaacaacttgtaatggagccttcatctcttgagctgccggctgacacagtgcagcgcattgcggctgaactcaaatgccacccaacggatgagagggtggctctccacctagatgaggaagataagctgaggcacttcagggagtgcttttatattcccaaaatacaggatctgcctccagttgatttatcattagtgaataaagatgaaaatgccatctatttcttgggaaattctcttggccttcaaccaaaaatggttaaaacatatcttgaagaagaactagataagtgggccaaaatagcagcctatggtcatgaagtggggaagcgtccttggattacaggagatgagagtattgtaggccttatgaaggacattgtaggagccaatgagaaagaaatagccctaatgaatgctttgactgtaaatttacatcttctaatgttatcattttttaagcctacgccaaaacgatataaaattcttctagaagccaaagccttcccttctgatcattatgctattgagtcacaactacaacttcacggacttaacattgaagaaagtatgcggatgataaagccaagagagggggaagaaaccttaagaatagaggatatccttgaagtaattgagaaggaaggagactcaattgcagtgatcctgttcagtggggtgcatttttacactggacagcactttaatattcctgccatcacaaaagctggacaagcgaaggtatgcacgccatttacttcttcccaccttactccaaacatcactctacttaagagtgttctaattgcatgacttgtgaagtactttagcttgtgtctgagtaaaactatttcaaaagtt

SEQ ID NO: 421874 - DNA, 1869 bp, Homo sapiens
gaaatggtgggcaggagcacatgttgcttaaatttctgacagtggctggagattaccgattggttaggggagaggaagtaaagtaaaatatttataaattctccactgggtggagtctgagcagttctttgaatttctcaccctaagatctggcctgtacattttcaaggaattcttgagaggttcttggagagattctgggagccaaacactccattgggatcctagctggaatataaagaatggcttatcagtggagaccatcgacagttgagaaaagaagaagcccaaaaagtacaagaatgaaaatcgagagtttttagagaacaacttgtaatggagccttcatctcttgagctgccggctgacacagtgcagcgcattgcggctgaactcaaatgccacccaacggatgagagggtggctctccacctagatgaggaagataagctgaggcacttcagggagtgcttttatattcccaaaatacaggatctgcctccagttgatttatcattagtgaataaagatgaaaatgccatctatttcttgggaaattctcttggccttcaaccaaaaatggttaaaacatatcttgaagaagaactagataagtgggccaaaatagcagcctatggtcatgaagtggggaagcgtccttggattacaggagatgagagtattgtaggccttatgaaggacattgtaggagccaatgagaaagaaatagccctaatgaatgctttgactgtaaatttacatcttctaatgttatcattttttaagcctacgccaaaacgatataaaattcttctagaagccaaagccttcccttctgatcattatgctattgagtcacaactacaacttcacggacttaacattgaagaaagtatgcggatgataaagccaagagagggggaagaaaccttaagaatagaggatatccttgaagtaattgagaaggaaggagactcaattgcagtgatcctgttcagtggggtgcatttttacactggacagcactttaatattcctgccatcacaaaagctggacaagcgaagggttgttatgttggctttgatctagcacatgcagttggaaatgttgaactctacttacatgactggggagttgattttgcctgctggtgttcctacaagtatttaaatgcaggagcaggaggaattgctggtgccttcattcatgaaaagcatgcccatacgattaaacctgcattagtgggatggtttggccatgaactcagcaccagatttaagatggataacaaactgcagttaatccctggggtctgtggattccgaatttcaaatcctcccattttgttggtctgttccttgcatgctagtttagagatctttaagcaagcgacaatgaaggcattgcggaaaaaatctgttttgctaactggctatctggaatacctgatcaagcataactatggcaaagataaagcagcaaccaagaaaccagttgtgaacataattactccgtctcatgtagaggagcgggggtgccagctaacaataacattttctgttccaaacaaagatgttttccaagaactagaaaaaagaggagtggtttgtgacaagcggaatccaaatggcattcgagtggctccagttcctctctataattctttccatgatgtttataaatttaccaatctgctcacttctatacttgactctgcagaaacaaaaaattagcagtgttttctagaacaacttaagcaaattatactgaaagctgctgtggttatttcagtattattcgatttttaattattgaaagtatgtcaccattgaccacatgtaactaacaataaataatataccttacag

SEQ ID NO: 421875 - DNA, 1705 bp, Homo sapiens
gtgacaagggaaaggagacgatggagccgccatgttgaacacgtctagcctcagatatctgtcctgggacaccagtcatctcctgaataacactgtcagctaaaattacacaatttccagcaaaaagaaaaaaaaagattcccacggataaccttttagagaacaacttgtaatggagccttcatctcttgagctgccggctgacacagtgcagcgcattgcggctgaactcaaatgccacccaacggatgagagggtggctctccacctagatgaggaagataagctgaggcacttcagggagtgcttttatattcccaaaatacaggatctgcctccagttgatttatcattagtgaataaagatgaaaatgccatctatttcttgggaaattctcttggccttcaaccaaaaatggttaaaacatatcttgaagaagaactagataagtgggccaaaatagcagcctatggtcatgaagtggggaagcgtccttggattacaggagatgagagtattgtaggccttatgaaggacattgtaggagccaatgagaaagaaatagccctaatgaatgctttgactgtaaatttacatcttctaatgttatcattttttaagcctacgccaaaacgatataaaattcttctagaagccaaagccttcccttctgatcattatgctattgagtcacaactacaacttcacggacttaacattgaagaaagtatgcggatgataaagccaagagagggggaagaaaccttaagaatagaggatatccttgaagtaattgagaaggaaggagactcaattgcagtgatcctgttcagtggggtgcatttttacactggacagcactttaatattcctgccatcacaaaagctggacaagcgaagggttgttatgttggctttgatctagcacatgcagttggaaatgttgaactctacttacatgactggggagttgattttgcctgctggtgttcctacaagtatttaaatgcaggagcaggaggaattgctggtgccttcattcatgaaaagcatgcccatacgattaaacctgcattagtgggatggtttggccatgaactcagcaccagatttaagatggataacaaactgcagttaatccctggggtctgtggattccgaatttcaaatcctcccattttgttggtctgttccttgcatgctagtttagagatctttaagcaagcgacaatgaaggcattgcggaaaaaatctgttttgctaactggctatctggaatacctgatcaagcataactatggcaaagataaagcagcaaccaagaaaccagttgtgaacataattactccgtctcatgtagaggagcgggggtgccagctaacaataacattttctgttccaaacaaagatgttttccaagaactagaaaaaagaggagtggtttgtgacaagcggaatccaaatggcattcgagtggctccagttcctctctataattctttccatgatgtttataaatttaccaatctgctcacttctatacttgactctgcagaaacaaaaaattagcagtgttttctagaacaacttaagcaaattatactgaaagctgctgtggttatttcagtattattcgatttttaattattgaaagtatgtcaccattgaccacatgtaactaacaataaataatataccttacag

SEQ ID NO: 421876 - DNA, 1846 bp, Homo sapiens
gaaatggtgggcaggagcacatgttgcttaaatttctgacagtggctggagattaccgattggttaggggagaggaagtaaagtaaaatatttataaattctccactgggtggagtctgagcagttctttgaatttctcaccctaagatctggcctgtacattttcaaggaattcttgagaggttcttggagagattctgggagccaaacactccattgggatcctagctgttttagagaacaacttgtaatggagccttcatctcttgagctgccggctgacacagtgcagcgcattgcggctgaactcaaatgccacccaacggatgagagggtggctctccacctagatgaggaagataagctgaggcacttcagggagtgcttttatattcccaaaatacaggatctgcctccagttgatttatcattagtgaataaagatgaaaatgccatctatttcttgggaaattctcttggccttcaaccaaaaatggttaaaacatatcttgaagaagaactagataagtgggccaaaatagcagcctatggtcatgaagtggggaagcgtccttggattacaggagatgagagtattgtaggccttatgaaggacattgtaggagccaatgagaaagaaatagccctaatgaatgctttgactgtaaatttacatcttctaatgttatcattttttaagcctacgccaaaacgatataaaattcttctagaagccaaagccttcccttctgatcattatgctattgagtcacaactacaacttcacggacttaacattgaagaaagtatgcggatgataaagccaagagagggggaagaaaccttaagaatagaggatatccttgaagtaattgagaaggaaggagactcaattgcagtgatcctgttcagtggggtgcatttttacactggacagcactttaatattcctgccatcacaaaagctggacaagcgaagggttgttatgttggctttgatctagcacatgcagttggaaatgttgaactctacttacatgactggggagttgattttgcctgctggtgttcctacaagtatttaaatgcaggagcaggaggaattgctggtgccttcattcatgaaaagcatgcccatacgattaaacctgcgagatcggagttctttaattaggaatggaatgcaacagatttggacaagtcaaggacaaggtattttccagtcatcacttcattgtccctgataggaaaagaaatgttttgctgaaacttaactttgtgtcccttagtgtgttttacttttttattcacctgaaaatcaaataccacctgtgagaagagtgataaacaaagaaaagacccaaaagcctacaatatcacgctgctcaaataagtgtaattgttcagatgttacgacaatgttccatacataaaatattgtgaagatggggagaggaagttttcttgtgaataatatttatagttccacggtcaaatccaatttaaactttgagtaaactttagagtctgtatgactactgactctatttgccaattaataattatatttcagttgttagcattccacgattagctggtttaactatgtttaataagccttctgtcatcttacttttctgttctcttagagctttagagagaccaaagagtttttcactgttaaagtgtccagtatgtagccgagaaccatatggagaacatcaaatacagtggaacaaatgtaactgctattgatgtcacactttgtgaagtagtctttgttgcttaaaaagggtgacatctagtggctaaacatgttatttcaaataaataatatcgaaataac

SEQ ID NO: 421877 - DNA, 1249 bp, Homo sapiens
tggtgttcctacaagtatttaaatgcaggagcaggaggaattgctggtgccttcattcatgaaaagcatgcccatacgattaaacctgcgagccaatgagaaagaaatagccctaatgaatgctttgactgtaaatttacatcttctaatgttatcattttttaagcctacgccaaaacgatataaaattcttctagaagccaaagccttcccttctgatcattatgctattgagtcacaactacaacttcacggacttaacattgaagaaagtatgcggatgataaagccaagagagggggaagaaaccttaagaatagaggatatccttgaagtaattgagaaggaaggagactcaattgcagtgatcctgttcagtggggtgcatttttacactggacagcactttaatattcctgccatcacaaaagctggacaagcgaagggttgttatgttggctttgatctagcacatgcagttggaaatgttgaactctacttacatgactggggagttgattttgcctgctggtgttcctacaagtatttaaatgcaggagcaggaggaattgctggtgccttcattcatgaaaagcatgcccatacgattaaacctgcattagtgggatggtttggccatgaactcagcaccagatttaagatggataacaaactgcagttaatccctggggtctgtggattccgaatttcaaatcctcccattttgttggtctgttccttgcatgctagtttagagatctttaagcaagcgacaatgaaggcattgcggaaaaaatctgttttgctaactggctatctggaatacctgatcaagcataactatggcaaagataaagcagcaaccaagaaaccagttgtgaacataattactccgtctcatgtagaggagcgggggtgccagctaacaataacattttctgttccaaacaaagatgttttccaagaactagaaaaaagaggagtggtttgtgacaagcggaatccaaatggcattcgagtggctccagttcctctctataattctttccatgatgtttataaatttaccaatctgctcacttctatacttgactctgcagaaacaaaaaattagcagtgttttctagaacaacttaagcaaattatactgaaagctgctgtggttatttcagtattattcgatttttaattattgaaagtatgtcaccattgaccacatgtaactaacaataaataatataccttacag

SEQ ID NO: 421878 - DNA, 1745 bp, Homo sapiens
gaaatggtgggcaggagcacatgttgcttaaatttctgacagtggctggagattaccgattggttaggggagaggaagtaaagtaaaatatttataaattctccactgggtggagtctgagcagttctttgaatttctcaccctaagatctggcctgtacattttcaaggaattcttgagaggttcttggagagattctgggagccaaacactccattgggatcctagctgttttagagaacaacttgtaatggagccttcatctcttgagctgccggctgacacagtgcagcgcattgcggctgaactcaaatgccacccaacggatgagagggtggctctccacctagatgaggaagataagctgaggcacttcagggagtgcttttatattcccaaaatacaggatctgcctccagttgatttatcattagtgaataaagatgaaaatgccatctatttcttgggaaattctcttggccttcaaccaaaaatggttaaaacatatcttgaagaagaactagataagtgggccaaaatagcagcctatggtcatgaagtggggaagcgtccttggattacaggagatgagagtattgtaggccttatgaaggacattgtaggagccaatgagaaagaaatagccctaatgaatgctttgactgtaaatttacatcttctaatgttatcattttttaagcctacgccaaaacgatatatatgctattgagtcacaactacaacttcacggacttaacattgaagaaagtatgcggatgataaagccaagagagggggaagaaaccttaagaatagaggatatccttgaagtaattgagaaggaaggagactcaattgcagtgatcctgttcagtggggtgcatttttacactggacagcactttaatattcctgccatcacaaaagctggacaagcgaagggttgttatgttggctttgatctagcacatgcagttggaaatgttgaactctacttacatgactggggagttgattttgcctgctggtgttcctacaagtatttaaatgcaggagcaggaggaattgctggtgccttcattcatgaaaagcatgcccatacgattaaacctgcattagtgggatggtttggccatgaactcagcaccagatttaagatggataacaaactgcagttaatccctggggtctgtggattccgaatttcaaatcctcccattttgttggtctgttccttgcatgctagtttagagatctttaagcaagcgacaatgaaggcattgcggaaaaaatctgttttgctaactggctatctggaatacctgatcaagcataactatggcaaagataaagcagcaaccaagaaaccagttgtgaacataattactccgtctcatgtagaggagcgggggtgccagctaacaataacattttctgttccaaacaaagatgttttccaagaactagaaaaaagaggagtggtttgtgacaagcggaatccaaatggcattcgagtggctccagttcctctctataattctttccatgatgtttataaatttaccaatctgctcacttctatacttgactctgcagaaacaaaaaattagcagtgttttctagaacaacttaagcaaattatactgaaagctgctgtggttatttcagtattattcgatttttaattattgaaagtatgtcaccattgaccacatgtaactaacaataaataatataccttacag

SEQ ID NO: 421879 - DNA, 464 bp, Homo sapiens
ctcaattaccttggctgaaggaaagatggcggtaggagagaaaagtgaagaggcgtgagtgtaagaactgggagattccttttccagcaggcctgggtagctgccttcccagcccagccctccctggggcctgcgggagcccttttgcatgcaagggaggatggaggctggcccctctttatagaagcacatttctgccacctcccctgggaggcacccagaagcctgccactctttacctagtcctgcttcctggacgggtggtgggaaggcaggagcctgggtccttaggctgggggcctctctccatccacccacctttccctcattccctctcttggagcagcagccgcccaggcctttagggagggagggtttctggggcccttgggttggagtggggtcgcgttgcattgtgttcatgaccatgtagctcatgttgaaattaaagtttttggcttttc

SEQ ID NO: 421880 - DNA, 3953 bp, Homo sapiens
ctcaattaccttggctgaaggaaagatggcggtaggagagaaaagtgaagaggcgtgagtgtaagaactgggagattccttttccagcaggcctgggtagctgccttcccagcccagccctccctggggcctgcgggagcccttttgcatgcaagggaggatggaggctggcccctctttatagaagcacatttctgccacctcccctgggaggcacccagaagcctgccactctttacctagtccctgctgtgtagggcgtagtccaggttagctaggtagagttagtgctccaagccctggggcctgttcttagctcatgcatagtccttacagagtcccaggaccgggggtggagaggagcctcaagtacattccaggagaccactgtctcctcgctggcctgggcctagatggggcagcctggctcacaggaggccagcccctcctcctccgcccccttccttcccttgtccccgtagggttatagctggagctgcctgttatactcggctgttctgatttattattcttggtactgactttctttatgagggactcctaagggttgtaggaccttggcagagggggcctggtctccattagagggtgttgttttctcctgaggacacccaggctgcctttggtcccaccctgttcctggtcccggtcccggtcccagtcccaccaggcaactccttccacccggaaattcttcccttcccttagcctgtggaaaccctgggtattctttaaagttctggtcaatgtatatcacctccacagagctgcttaccctgcactgggaaggggagatggagacgccccctttacccaggaggtcttcagagtttcctgggaccgcggtgggtggaatcccaaggctgggggtggaaggagcagggctctggagggattcgcattcaaggcacagaattggccccttgcctgtttgtttttctaaccagtgtgatttctctgctgttcgtttattacttaccattggaatattttgagccaggagagcgccttctctctccagccatcaccgctgtggttgttcaggggtagcttttcaaaaacagggcagagcctggctgtcccaaccagggggagcaggggcttggccctgacagcctgagcccttcccctggtgtctgcacagcctttataaagagagagagagctccgaagcaataacaacacctgggggtggtcagtgagggccccctcaatgattttcttgtttgttctgtgaaatcccgctcacctcctggaggggtggagcagctgggggctggagccctgtttctttgtgtcatcgtgagcatgtgccccttcccaggggctgtgaccattgggtgtgggaactacggtctgtcctcaccaagggatgggggtttggggaggagagtgacattttcatcattagcttcggagaagcttcaagcccatcctgtccccgctactgcctggccccttgctgactcaggctgcactgtttgaagaggagcagagaggctggcactaggggccactggggggctggggtctccaggggatgactgttttcaatctctgggccaagatcacatgcaggataccacgggaaggagccatctccactctccttctccagaacccccttgaagggcctttgggaccattagtccatttccattttacagacaaggaaatcaagacccagcttgggggaaaagccacccctggagtcacctgtgtgttcagtggcacccccagcctgggtcccctcctcccaatagaggctgagccggagccagggcagtatgaggtggggctgccactgcccatacctcctcctcccttctttctttgaagcctaatggccccccaaaagatgggcaggacaagctgtagcccatctgagaggttgggaaactgaggcccagaaacaggaagtgactcacacaagacccctcagcaagggtgcaaagggggaagaactaggggctccattgttcttcaggcgacaggagaccgttgctccagtgcatgtctgctgggacaaggattcctggcctcgaagccctgggctgcacagccctactgggctccacctctataaaccagtgacttctctgggcctgggtctgggggagagggttgccagggagactcagctctccttgggggctggcccagctgactgagggtacacaggattgggtctagaccttgatgcctgggtggagggcccttgtaaggggccatagcctcttcaggaccaactggagggagagttaggaaacaccagctcctgcctggggcagtgagggaatgggagcagctgtgggcgcctcatttcaggcaagtcctccccaaaccttcagatgcagtgagacctggccttcctgttgtgcttttcagactttgttttcagaatgcttttatctcgagtgtgcccttcggccctcacaagagcccctggggagtaggtggtggcctgtgccgtcatccccatttcaaagcagggagctgaggtcctgggaggggaaagtgcttgcctgaggtcccactgtgttagtgggtgggcaggactggaactcggttctccaacagcccagagctcactcttttacacccagaggtggagcaggtggcttagggggtggttatgtacttcacaagccaattcccttcagccaggagctcctgggtgcatttccgtgtcagaaacagtaccgagtcccaccccctctggaggcacagctgttgcgtcaggcaaggtcacctgcatttatttattgagcagcagtgctgtgtcaggcccagggaccgagcccctctccctgttcccctatggtgtctccgaggccctctgggagggccccacatctggagcagcacctcagagtggacagaaagcattagcgtccacgagctcacccgacgccgagcctgtgaggtgggctgatggtgcccgtctaacccagcgcttcagggaggtcagaatggagccgaacccagggctgtgagcatcacctctggagccctttcactttatgactgcttcctggacgggtggtgggaaggcaggagcctgggtccttaggctgggggcctctctccatccacccacctttccctcattccctctcttggagcagcagccgcccaggcctttagggagggagggtttctggggcccttgggttggagtggggtcgcgttgcattgtgttcatgaccatgtagctcatgttgaaattaaagtttttggcttttctaacctggctcgttcatgctttgtgttgagacagccctatctgggaagccaggggaagtggctgagtgccacggggtgccaggatgccacacctcgggctttgtctctgcccccttatggtgcaggggcctgttccagaaagtcctgccagagatgcgtaagagggagcagggttctggatgaaccccgtcattctacagatgtggaaactgaggccctgggagaggatgcgattctccaaggtcatattgctggtgattgacaggacccggaagagagctcgtcccatggcattctgctgtgtccaagtggccccagtgacatggtgggtgggtgacagcaaggcctccctcatcctgaagtggggctggccagggacaaagagcatcagctgtctgggggaaagaggccatcattcacacatgggctgattccactctatacactgggcagagaatgagatcgtttagcgcaagagattgacccccttgtcaacactggactgtacacggtcccatttggtccacctttgttccccatgcttctcgtagtgtgagcatctgacctcactaattgcagcgaagattccagtgttgaaagttgcacatttcaaccgttactcagaaaaccagcctcttcacaacagaaaagttgctctggagggtcggctctgaggtggacctgtg

SEQ ID NO: 421881 - DNA, 3267 bp, Homo sapiens
ctcaattaccttggctgaaggaaagatggcggtaggagagaaaagtgaagaggcgtgagtgtaagaactgggagattccttttccagcaggcctgggtagctgccttcccagcccagccctccctggggcctgcgggagcccttttgcatgcaagggaggatggaggctggcccctctttatagaagcacatttctgccacctcccctgggaggcacccagaagcctgccactctttacctagtccctgctgtgtagggcgtagtccaggttagctaggtagagttagtgctccaagccctggggcctgttcttagctcatgcatagtccttacagagtcccaggaccgggggtggagaggagcctcaagtacattccaggagaccactgtctcctcgctggcctgggcctagatggggcagcctggctcacaggaggccagcccctcctcctccgcccccttccttcccttgtccccgtagggttatagctggagctgcctgttatactcggctgttctgatttattattcttggtactgactttctttatgagggactcctaagggttgtaggaccttggcagagggggcctggtctccattagagggtgttgttttctcctgaggacacccaggctgcctttggtcccaccctgttcctggtcccggtcccggtcccagtcccaccaggcaactccttccacccggaaattcttcccttcccttagcctgtggaaaccctgggtattctttaaagttctggtcaatgtatatcacctccacagagctgcttaccctgcactgggaaggggagatggagacgccccctttacccaggaggtcttcagagtttcctgggaccgcggtgggtggaatcccaaggctgggggtggaaggagcagggctctggagggattcgcattcaaggcacagaattggccccttgcctgtttgtttttctaaccagtgtgatttctctgctgttcgtttattacttaccattggaatattttgagccaggagagcgccttctctctccagccatcaccgctgtggttgttcaggggtagcttttcaaaaacagggcagagcctggctgtcccaaccagggggagcaggggcttggccctgacagcctgagcccttcccctggtgtctgcacagcctttataaagagagagagagctccgaagcaataacaacacctgggggtggtcagtgagggccccctcaatgattttcttgtttgttctgtgaaatcccgctcacctcctggaggggtggagcagctgggggctggagccctgtttctttgtgtcatcgtgagcatgtgccccttcccaggggctgtgaccattgggtgtgggaactacggtctgtcctcaccaagggatgggggtttggggaggagagtgacattttcatcattagcttcggagaagcttcaagcccatcctgtccccgctactgcctggccccttgctgactcaggctgcactgtttgaagaggagcagagaggctggcactaggggccactggggggctggggtctccaggggatgactgttttcaatctctgggccaagatcacatgcaggataccacgggaaggagccatctccactctccttctccagaacccccttgaagggcctttgggaccattagtccatttccattttacagacaaggaaatcaagacccagcttgggggaaaagccacccctggagtcacctgtgtgttcagtggcacccccagcctgggtcccctcctcccaatagaggctgagccggagccagggcagtatgaggtggggctgccactgcccatacctcctcctcccttctttctttgaagcctaatggccccccaaaagatgggcaggacaagctgtagcccatctgagaggttgggaaactgaggcccagaaacaggaagtgactcacacaagacccctcagcaagggtgcaaagggggaagaactaggggctccattgttcttcaggcgacaggagaccgttgctccagtgcatgtctgctgggacaaggattcctggcctcgaagccctgggctgcacagccctactgggctccacctctataaaccagtgacttctctgggcctgggtctgggggagagggttgccagggagactcagctctccttgggggctggcccagctgactgagggtacacaggattgggtctagaccttgatgcctgggtggagggcccttgtaaggggccatagcctcttcaggaccaactggagggagagttaggaaacaccagctcctgcctggggcagtgagggaatgggagcagctgtgggcgcctcatttcaggcaagtcctccccaaaccttcagatgcagtgagacctggccttcctgttgtgcttttcagactttgttttcagaatgcttttatctcgagtgtgcccttcggccctcacaagagcccctggggagtaggtggtggcctgtgccgtcatccccatttcaaagcagggagctgaggtcctgggaggggaaagtgcttgcctgaggtcccactgtgttagtgggtgggcaggactggaactcggttctccaacagcccagagctcactcttttacacccagaggtggagcaggtggcttagggggtggttatgtacttcacaagccaattcccttcagccaggagctcctgggtgcatttccgtgtcagaaacagtaccgagtcccaccccctctggaggcacagctgttgcgtcaggcaaggtcacctgcatttatttattgagcagcagtgctgtgtcaggcccagggaccgagcccctctccctgttcccctatggtgtctccgaggccctctgggagggccccacatctggagcagcacctcagagtggacagaaagcattagcgtccacgagctcacccgacgccgagcctgtgaggtgggctgatggtgcccgtctaacccagcgcttcagggaggtcagaatggagccgaacccagggctgtgagcatcacctctggagccctttcactttatgactgcttcctggacgggtggtgggaaggcaggagcctgggtccttaggctgggggcctctctccatccacccacctttccctcattccctctcttggagcagcagccgcccaggcctttagggagggagggtttctggggcccttgggttggagtggggtcgcgttgcattgtgttcatgaccatgtagctcatgttgaaattaaagtttttggcttttc

SEQ ID NO: 421882 - DNA, 778 bp, Homo sapiens
tccgggtagtccaggcggctctcggtggcagtgagcatgcgctccggctccaccacgaacatgtagtagaggttccacatcagcatcgacagcagtggcagaaacgtcaggccgtagccgaagcctcggaaggagcggcccacggcaaagagacatggtcttgctatgttgccagtctgggctcaaacttctggccttgagtgattctctcacctcagactcctgagtagctgggattacagatgcgggccaccacacctggctgtacaaactttaaaataccagtgtgcttttcttggagaaagaagaaaagaagaaagaaggaagaagaagaagaaagaaaggaggaagaaggaagaagaagagccagtgtgataatacattgagtgattttttaaaaagtgcatatatgagcaaaaagttatttttcccttttctgaagtatggcagcatactatatagactgtctctgcatgtttatttttcccccatttaatatatcctggagatcattttatatcaatataaaaatggttttctcattcttttatagctgcagtgtgttccattgtatttatcctcttgcagatgaagaaactaagattccaagggttaagtaagactggtccaagatcacacatctgggaaatagcaaagccatgatatgaacccaaacctgttcattaccttcccttctgccaatttgaggggcagaggtaaagaggagagcaaagaagccacctctaggagggcttgaagcccagaggatgggtcagcc

SEQ ID NO: 421883 - DNA, 229 bp, Homo sapiens
acacacacacacacacacactaggttaacatcaaccaccgcaccatccaggcactcggtggcagtgagcatgcgctccggctccaccacgaacatgtagtagaggttccacatcagcatcgacagcagtggcagaaacgtcaggccgtagccgaagcctcggaaggagcggcccacggcaaaggtcagccagtagatcagccgggagacggcaaagagaccagtgagca

SEQ ID NO: 421884 - DNA, 1952 bp, Homo sapiens
  misc_feature (1623)..(1624): n is a, c, g, or t
gggcacctcttccgtcggctgaattgcggccgtatgcgcggctctgtggagtgcacctggggttgggggcactgtgcccccagccccctgctcctttggactctacttctgtttgcagccccatttggcctgctgggggagaagacccgccaggtgtctctggaggtcatccctaactggctgggccccctgcagaacctgcttcatatacgggcagtgggcaccaattccacactgcactatgtgtggagcagcctggggcctctggcagtggtaatggtggccaccaacaccccccacagcaccctgagcgtcaactggagcctcctgctatcccctgagcccgatgggggcctgatggtgctccctaaggacagcattcagttttcttctgcccttgtttttaccaggctgcttgagtttgacagcaccaacgtgtccgatacggcagcaaagcctttgggaagaccatatcctccatactccttggccgatttctcttggaacaacatcactgattcattggatcctgccaccctgagtgccacatttcaaggccaccccatgaacgaccctaccaggacttttgccaatggcagcctggccttcagggtccaggccttttccaggtccagccgaccagcccaaccccctcgcctcctgcacacagcagacacctgtcagctagaggtggccctgattggagcctctccccggggaaaccgttccctgtttgggctggaggtagccacattgggccagggccctgactgcccctcaatgcaggagcagcactccatcgacgatgaatatgcaccggccgtcttccagttggaccagctactgtggggctccctcccatcaggctttgcacagtggcgaccagtggcttactcccagaagccggggggccgagaatcagccctgccctgccaagcttcccctcttcatcctgccttagcatactctcttccccagtcacccattgtccgagccttctttgggtcccagaataacttctgtgccttcaatctgacgttcggggcttccacaggccctggctattgggaccaacactacctcagctggtcgatgctcctgggtgtgggcttccctccagtggacggcttgtccccactagtcctgggcatcatggcagtggccctgggtgccccagggctcatgctgctagggggcggcttggttctgctgctgcaccacaagaagtactcagagtaccagtccataaattaaggcccgctctctggagggaaggacattactgaacctgtcttgctgtgcctcgaaactctggaggttggagcatcaagttccagccggccccttcactcccccatcttgcttttctgtggaacctcagaggccagcctcgacttcctggagacccccaggtggggcttccttcatactttgttgggggactttggaggcgggcaggggacagggctattgataaggtccccttggtgttgccttcttgcatctccacacatttcccttggatgggacttgcaggcctaaatgagaggcattctgactggttggctgccctggaaggcaagaaaatagatttattttttttcacagggaaaaaaaaaaaannaaaaaaaaaaaaaaaaaaaaaaaaaaaaaaacaaaaaaaaaaaaacaacaaaacagagaggggcgggcgcgccccaaaaagaaatcacacccacgcgggggcgccccagactatgccggacccacccgtgttttggtgaaaaggggccccccacaagaggcgggcgctatcaaacaaaccgaagagcgcgcgccacgactacacaccgctgcggcggagacacacgcgcccgcggcactctgggagagagaccccatcccgggggggcgcactggggcaacaccccgcagcgataaagccgcgcaaacaacactccgcgatacggcac

SEQ ID NO: 421885 - DNA, 1828 bp, Homo sapiens
gggcacctcttccgtcggctgaattgcggccgtatgcgcggctctgtggagtgcacctggggttgggggcactgtgcccccagccccctgctcctttggactctacttctgtttgcagccccatttggcctgctgggggagaagacccgccaggtgtctctggaggtcatccctaactggctgggccccctgcagaacctgcttcatatacgggcagtgggcaccaattccacactgcactatgtgtggagcagcctggggcctctggcagtggtaatggtggccaccaacaccccccacagcaccctgagcgtcaactggagcctcctgctatcccctgagcccgatgggggcctgatggtgctccctaaggacagcattcagttttcttctgcccttgtttttaccaggctgcttgagtttgacagcaccaacgtgtccgatacggcagcaaagcctttgggaagaccatatcctccatactccttggccgatttctcttggaacaacatcactgattcattggatcctgccaccctgagtgccacatttcaaggccaccccatgaacgaccctaccaggacttttgccaatggcagcctggccttcagggtccaggccttttccaggtccagccgaccagcccaaccccctcgcctcctgcacacagcagacacctgtcagctagaggtggccctgattggagcctctccccggggaaaccgttccctgtttgggctggaggtagccacattgggccagggccctgactgcccctcaatgcaggagcagcactccatcgacgatgaatatgcaccggccgtcttccagttggaccagctactgtggggctccctcccatcaggctttgcacagtggcgaccagtggcttactcccagaagccggggggccgagaatcagccctgccctgccaagcttcccctcttcatcctgccttagcatactctcttccccagtcacccattgtccgagccttctttgggtcccagaataacttctgtgccttcaatctgacgttcggggcttccacaggccctggctattgggaccaacactacctcagctggtcgatgctcctgggtgtgggcttccctccagtggacggcttgtccccactagtcctgggcatcatggcagtggccctgggtgccccagggctcatgctgctagggggcggcttggttctgctgctgcaccacaagaagtactcagagtaccagtccataaattaaggcccgctctctggagggaaggacattactgaacctgtcttgctgtgcctcgaaactctggaggttggagcatcaagttccagccggccccttcactcccccatcttgcttttctgtggaacctcagaggccagcctcgacttcctggagacccccaggtggggcttccttcatactttgttgggggactttggaggcgggcaggggacagggctattgataaggtccccttggtgttgccttcttgcatctccacacatttcccttggatgggacttgcaggcctaaatgagaggcattctgactggttggctgccctggaaggcaagaaaatagatttattttttttcacagggctccagtctcttgatgtgtgagtgttgttgggctggtcttgggctggttccagggaatggaagggctaagagatgggcttggaaggcaagtttctgtttgaggctccatttccttgctgtggaaccaaggaacctgccagccctgctccaccaggtagagctgggaggtttctatcgtcatctgaattaaacagggaagggacactcgagactggggg

SEQ ID NO: 421886 - DNA, 1705 bp, Homo sapiens
gggcacctcttccgtcggctgaattgcggccgtatgcgcggctctgtggagtgcacctggggttgggggcactgtgcccccagccccctgctcctttggactctacttctgtttgcagccccatttggcctgctgggggagaagacccgccaggtgtctctggaggtcatccctaactggctgggccccctgcagaacctgcttcatatacgggcagtgggcaccaattccacactgcactatgtgtggagcagcctggggcctctggcagtggtaatggtggccaccaacaccccccacagcaccctgagcgtcaactggagcctcctgctatcccctgagcccgatgggggcctgatggtgctccctaaggacagcattcagttttcttctgcccttgtttttaccaggctgcttgagtttgacagcaccaacgtgtccgatacggcagcaaagcctttgggaagaccatatcctccatactccttggccgatttctcttggaacaacatcactgattcattggatcctgccaccctgagtgccacatttcaaggccaccccatgaacgaccctaccaggacttttgccaatggcagcctggccttcagggtccaggccttttccaggtccagccgaccagcccaaccccctcgcctcctgcacacagcagacacctgtcagctagaggtggccctgattggagcctctccccggggaaaccgttccctgtttgggctggaggtagccacattgggccagggccctgactgcccctcaatgcaggagcagcactccatcgacgatgaatatgcaccggccgtcttccagttggaccagctactgtggggctccctcccatcaggctttgcacagtggcgaccagtggcttactcccagaagccggggggccgagaatcagccctgccctgccaagcttcccctcttcatcctgccttagcatactctcttccccagtcacccattgtccgagccttctttgggtcccagaataacttctgtgccttcaatctgacgttcggggcttccacaggccctggctattgggaccaacactacctcagctggtcgatgctcctgggtgtgggcttccctccagtggacggcttgtccccactagtcctgggcatcatggcagtggccctgggtgccccagggctcatgctgctagggggcggcttggttctgctgctgcaccacaagaagtactcagagtaccagtccataaattaaggcccgctctctggagggaaggacattactgaacctgtcttgctgtgcctcgaaactctggaggttggagcatcaagttccagccggccccttcactcccccatcttgcttttctgtggaacctcagaggccagcctcgacttcctggagacccccaggtggggcttccttcatactttgttgggggactttggaggcgggcaggggacagggctattgataaggtccccttggtgttgccttcttgcatctccacacatttcccttggatgggacttgcaggcctaaatgagaggcattctgactggttggctgccctggaaggcaagaccagtcagaatgccacacatttcccttggatgggacttgcaggcctaaatgagaggcattctgactggttgccttccagggcagccaaccagtcagaatgcctctcatttagggtcgacgc

SEQ ID NO: 421887 - DNA, 2657 bp, Homo sapiens
gggcacctcttccgtcggctgaattgcggccgtatgcgcggctctgtggagtgcacctggggttgggggcactgtgcccccagccccctgctcctttggactctacttctgtttgcagccccatttggcctgctgggggagaagacccgccaggtgtctctggaggtcatccctaactggctgggccccctgcagaacctgcttcatatacgggcagtgggcaccaattccacactgcactatgtgtggagcagcctggggcctctggcagtggtaatggtggccaccaacaccccccacagcaccctgagcgtcaactggagcctcctgctatcccctgagcccgatgggggcctgatggtgctccctaaggacagcattcagttttcttctgcccttgtttttaccaggctgcttgagtttgacagcaccaacgtgtccgatacggcagcaaagcctttgggaagaccatatcctccatactccttggccgatttctcttggaacaacatcactgattcattggatcctgccaccctgagtgccacatttcaaggccaccccatgaacgaccctaccaggacttttgccaatggcagcctggccttcagggtccaggccttttccaggtccagccgaccagcccaaccccctcgcctcctgcacacagcagacacctgtcagctagaggtggccctgattggagcctctccccggggaaaccgttccctgtttgggctggaggtagccacattgggccagggccctgactgcccctcaatgcaggagcagcactccatcgacgatgaatatgcaccggccgtcttccagttggaccagctactgtggggctccctcccatcaggctttgcacagtggcgaccagtggcttactcccagaagccggggggccgagaatcagccctgccctgccaagcttcccctcttcatcctgccttagcatactctcttccccagtcacccattgtccgagccttctttgggtcccagaataacttctgtgccttcaatctgacgttcggggcttccacaggccctggctattgggaccaacactacctcagctggtcgatgctcctgggtgtgggcttccctccagtggacggcttgtccccactagtcctgggcatcatggcagtggccctgggtgccccagggctcatgctgctagggggcggcttggttctgctgctgcaccacaagaagtactcagagtaccagtccataaattaaggcccgctctctggagggaaggacattactgaacctgtcttgctgtgcctcgaaactctggaggttggagcatcaagttccagccggccccttcactcccccatcttgcttttctgtggaacctcagaggccagcctcgacttcctggagacccccagagacatggtcttgctatgttgccagtctgggctcaaacttctggccttgagtgattctctcacctcagactcctgagtagctgggattacagatgcgggccaccacacctggctgtacaaactttaaaatgtttgagcaaattcaatgagtatagtaaaatatcttcctccctttaccgattcccaccctattctcccccacccccaccccaggcatcaatattatggtttcttgtgcactgagtgattttttaaattattattatttttttatttttgagacagagtctctctctgtcacccaggctggagtgcagtggtgcgatctcagctcactgcaacctccgcctcccgggttcaagcaattctcctgcctcagcctcctgagtagctgagactacgggcgcccgccaccatgcctggctatttttttgtatttttagtagagatggggtttcacccgagatggtctcaatctcctgacctgatgatccgcctgccttggcctcccaaagtgctgggattacaggcgtgagccaccgcgcctggcctattttttttttttttttaaattatagatggggtctctgtcagccaggctggagtgcagtggcagcccccaactcctgagctcaggcagtcctcccaccacagcctaccaaagtgccttggcctcccaaagtgctgagattacaggtgtgagccaccatgcccagcagatttttttcttttatttttttcttaaagaccagtgtgcttttcttggagaaagaagaaaagaagaaagaaggaagaagaagaagaaagaaaggaggaagaaggaagaagaagagccagtgtgataatacattgagtgattttttaaaaagtgcatatatgagcaaaaagttatttttcccttttctgaagtatggcagcatactatatagactgtctctgcatgtttatttttcccccatttaatatatcctggagatcattttatatcaatataaaaatggttttctcattcttttatagctgcagtgtgttccattgtatttatcctcttgcagatgaagaaactaagattccaagggttaagtaagactggtccaagatcacacatctgggaaatagcaaagccatgatatgaacccaaacctgttcattaccttcccttctgccaatttgaggggcagaggtaaagaggagagcaaagaagccacctctaggagggcttgaagcccagaggatgggtcagcc

SEQ ID NO: 421888 - DNA, 1724 bp, Homo sapiens
gggcacctcttccgtcggctgaattgcggccgtatgcgcggctctgtggagtgcacctggggttgggggcactgtgcccccagccccctgctcctttggactctacttctgtttgcagccccatttggcctgctgggggagaagacccgccaggtgtctctggaggtcatccctaactggctgggccccctgcagaacctgcttcatatacgggcagtgggcaccaattccacactgcactatgtgtggagcagcctggggcctctggcagtggtaatggtggccaccaacaccccccacagcaccctgagcgtcaactggagcctcctgctatcccctgagcccgatgggggcctgatggtgctccctaaggacagcattcagttttcttctgcccttgtttttaccaggctgcttgagtttgacagcaccaacgtgtccgatacggcagcaaagcctttgggaagaccatatcctccatactccttggccgatttctcttggaacaacatcactgattcattggatcctgccaccctgagtgccacatttcaaggccaccccatgaacgaccctaccaggacttttgccaatggcagcctggccttcagggtccaggccttttccaggtccagccgaccagcccaaccccctcgcctcctgcacacagcagacacctgtcagctagaggtggccctgattggagcctctccccggggaaaccgttccctgtttgggctggaggtagccacattgggccagggccctgactgcccctcaatgcaggagcagcactccatcgacgatgaatatgcaccggccgtcttccagttggaccagctactgtggggctccctcccatcaggctttgcacagtggcgaccagtggcttactcccagaagccggggggccgagaatcagccctgccctgccaagcttcccctcttcatcctgccttagcatactctcttccccagtcacccattgtccgagccttctttgggtcccagaataacttctgtgccttcaatctgacgttcggggcttccacaggccctggctattgggaccaacactacctcagctggtcgatgctcctgggtgtgggcttccctccagtggacggcttgtccccactagtcctgggcatcatggcagtggccctgggtgccccagggctcatgctgctagggggcggcttggttctgctgctgcaccacaagaagtactcagagtaccagtccataaattaaggcccgctctctggagggaaggacattactgaacctgtcttgctgtgcctcgaaactctggaggttggagcatcaagttccagccggccccttcactcccccatcttgcttttctgtggaacctcagaggccagcctcgacttcctggagacccccagagacatggtcttgctatgttgccagtctgggctcaaacttctggccttgagtgattctctcacctcagactcctgagtagctgggattacagatgcgggccaccacacctggctgtacaaactttaaaatatgatgaaactgaggcacaaactgcttaatgaacttgtccatggtaaagaagaaaggaccctggataagagaggaaaaggacctggattctagtcctgccactattgccgactgacctgagcaactctcttcccctaatctgttgtgattttccctttgtaaaatgggaagcctggaaaaaa

SEQ ID NO: 421889 - DNA, 1694 bp, Homo sapiens
  misc_feature (1365)..(1366): n is a, c, g, or t
gggcacctcttccgtcggctgaattgcggccgtatgcgcggctctgtggagtgcacctggggttgggggcactgtgcccccagccccctgctcctttggactctacttctgtttgcagccccatttggcctgctgggggagaagacccgccagctgcttgagtttgacagcaccaacgtgtccgatacggcagcaaagcctttgggaagaccatatcctccatactccttggccgatttctcttggaacaacatcactgattcattggatcctgccaccctgagtgccacatttcaaggccaccccatgaacgaccctaccaggacttttgccaatggcagcctggccttcagggtccaggccttttccaggtccagccgaccagcccaaccccctcgcctcctgcacacagcagacacctgtcagctagaggtggccctgattggagcctctccccggggaaaccgttccctgtttgggctggaggtagccacattgggccagggccctgactgcccctcaatgcaggagcagcactccatcgacgatgaatatgcaccggccgtcttccagttggaccagctactgtggggctccctcccatcaggctttgcacagtggcgaccagtggcttactcccagaagccggggggccgagaatcagccctgccctgccaagcttcccctcttcatcctgccttagcatactctcttccccagtcacccattgtccgagccttctttgggtcccagaataacttctgtgccttcaatctgacgttcggggcttccacaggccctggctattgggaccaacactacctcagctggtcgatgctcctgggtgtgggcttccctccagtggacggcttgtccccactagtcctgggcatcatggcagtggccctgggtgccccagggctcatgctgctagggggcggcttggttctgctgctgcaccacaagaagtactcagagtaccagtccataaattaaggcccgctctctggagggaaggacattactgaacctgtcttgctgtgcctcgaaactctggaggttggagcatcaagttccagccggccccttcactcccccatcttgcttttctgtggaacctcagaggccagcctcgacttcctggagacccccaggtggggcttccttcatactttgttgggggactttggaggcgggcaggggacagggctattgataaggtccccttggtgttgccttcttgcatctccacacatttcccttggatgggacttgcaggcctaaatgagaggcattctgactggttggctgccctggaaggcaagaaaatagatttattttttttcacagggaaaaaaaaaaaannaaaaaaaaaaaaaaaaaaaaaaaaaaaaaaacaaaaaaaaaaaaacaacaaaacagagaggggcgggcgcgccccaaaaagaaatcacacccacgcgggggcgccccagactatgccggacccacccgtgttttggtgaaaaggggccccccacaagaggcgggcgctatcaaacaaaccgaagagcgcgcgccacgactacacaccgctgcggcggagacacacgcgcccgcggcactctgggagagagaccccatcccgggggggcgcactggggcaacaccccgcagcgataaagccgcgcaaacaacactccgcgatacggcac

SEQ ID NO: 421890 - DNA, 1738 bp, Homo sapiens
  misc_feature (1409)..(1410): n is a, c, g, or t
gggcacctcttccgtcggctgaattgcggccgtatgcgcggctctgtggagtgcacctggggttgggggcactgtgcccccagccccctgctcctttggactctacttctgtttgcagccccatttggcctgctgggggagaagacccgccagggtgaggaggttgggagagaaccaaggagaagagtgcagaggagagagttcatcccaattagagggtggaactaaagactggggcaaagcctttgggaagaccatatcctccatactccttggccgatttctcttggaacaacatcactgattcattggatcctgccaccctgagtgccacatttcaaggccaccccatgaacgaccctaccaggacttttgccaatggcagcctggccttcagggtccaggccttttccaggtccagccgaccagcccaaccccctcgcctcctgcacacagcagacacctgtcagctagaggtggccctgattggagcctctccccggggaaaccgttccctgtttgggctggaggtagccacattgggccagggccctgactgcccctcaatgcaggagcagcactccatcgacgatgaatatgcaccggccgtcttccagttggaccagctactgtggggctccctcccatcaggctttgcacagtggcgaccagtggcttactcccagaagccggggggccgagaatcagccctgccctgccaagcttcccctcttcatcctgccttagcatactctcttccccagtcacccattgtccgagccttctttgggtcccagaataacttctgtgccttcaatctgacgttcggggcttccacaggccctggctattgggaccaacactacctcagctggtcgatgctcctgggtgtgggcttccctccagtggacggcttgtccccactagtcctgggcatcatggcagtggccctgggtgccccagggctcatgctgctagggggcggcttggttctgctgctgcaccacaagaagtactcagagtaccagtccataaattaaggcccgctctctggagggaaggacattactgaacctgtcttgctgtgcctcgaaactctggaggttggagcatcaagttccagccggccccttcactcccccatcttgcttttctgtggaacctcagaggccagcctcgacttcctggagacccccaggtggggcttccttcatactttgttgggggactttggaggcgggcaggggacagggctattgataaggtccccttggtgttgccttcttgcatctccacacatttcccttggatgggacttgcaggcctaaatgagaggcattctgactggttggctgccctggaaggcaagaaaatagatttattttttttcacagggaaaaaaaaaaaannaaaaaaaaaaaaaaaaaaaaaaaaaaaaaaacaaaaaaaaaaaaacaacaaaacagagaggggcgggcgcgccccaaaaagaaatcacacccacgcgggggcgccccagactatgccggacccacccgtgttttggtgaaaaggggccccccacaagaggcgggcgctatcaaacaaaccgaagagcgcgcgccacgactacacaccgctgcggcggagacacacgcgcccgcggcactctgggagagagaccccatcccgggggggcgcactggggcaacaccccgcagcgataaagccgcgcaaacaacactccgcgatacggcac

SEQ ID NO: 421891 - DNA, 1828 bp, Homo sapiens
  misc_feature (1499)..(1500): n is a, c, g, or t
gggcacctcttccgtcggctgaattgcggccgtatgcgcggctctgtggagtgcacctggggttgggggcactgtgcccccagccccctgctcctttggactctacttctgtttgcagccccatttggcctgctgggggagaagacccgccagctgcttgagtttgacagcaccaacgtgtccgatacggcagcaaagcctttgggaagaccatatcctccatactccttggccgatttctcttggaacaacatcactgattcattggatcctgccaccctgagtgccacatttcaaggccaccccatgaacgaccctaccaggacttttgccaatggcagcctggccttcagggtccaggccttttccaggtccagccgaccagcccaaccccctcgcctcctgcacacagcagacacctgtcagctagaggtggccctgattggagcctctccccggggaaaccgttccctgtttgggctggaggtagccacattgggccagggccctgactgcccctcaatgcaggagcagcactccatcgacgatgaatatgcaccggccgtcttccagaggagggattgaggccctgcctaggactcaggactcctgctgctagtcacagaataaggctgggagtggcaaggaaaagagggtcgggcacaggttggtcctctttaccctcccttgtttgcctttcttcccagttggaccagctactgtggggctccctcccatcaggctttgcacagtggcgaccagtggcttactcccagaagccggggggccgagaatcagccctgccctgccaagcttcccctcttcatcctgccttagcatactctcttccccagtcacccattgtccgagccttctttgggtcccagaataacttctgtgccttcaatctgacgttcggggcttccacaggccctggctattgggaccaacactacctcagctggtcgatgctcctgggtgtgggcttccctccagtggacggcttgtccccactagtcctgggcatcatggcagtggccctgggtgccccagggctcatgctgctagggggcggcttggttctgctgctgcaccacaagaagtactcagagtaccagtccataaattaaggcccgctctctggagggaaggacattactgaacctgtcttgctgtgcctcgaaactctggaggttggagcatcaagttccagccggccccttcactcccccatcttgcttttctgtggaacctcagaggccagcctcgacttcctggagacccccaggtggggcttccttcatactttgttgggggactttggaggcgggcaggggacagggctattgataaggtccccttggtgttgccttcttgcatctccacacatttcccttggatgggacttgcaggcctaaatgagaggcattctgactggttggctgccctggaaggcaagaaaatagatttattttttttcacagggaaaaaaaaaaaannaaaaaaaaaaaaaaaaaaaaaaaaaaaaaaacaaaaaaaaaaaaacaacaaaacagagaggggcgggcgcgccccaaaaagaaatcacacccacgcgggggcgccccagactatgccggacccacccgtgttttggtgaaaaggggccccccacaagaggcgggcgctatcaaacaaaccgaagagcgcgcgccacgactacacaccgctgcggcggagacacacgcgcccgcggcactctgggagagagaccccatcccgggggggcgcactggggcaacaccccgcagcgataaagccgcgcaaacaacactccgcgatacggcac

SEQ ID NO: 421892 - DNA, 1428 bp, Homo sapiens
acacacacacacacacacactaggttaacatcaaccaccgcaccatccaggcactcggtggcagtgagcatgcgctccggctccaccacgaacatgtagtagaggttccacatcagcatcgacagcagtggcagaaacgtcaggccgtagccgaagcctcggaaggagcggcccacggcaaagagacatggtcttgctatgttgccagtctgggctcaaacttctggccttgagtgattctctcacctcagactcctgagtagctgggattacagatgcgggccaccacacctggctgtacaaactttaaaatgtttgagcaaattcaatgagtatagtaaaatatcttcctccctttaccgattcccaccctattctcccccacccccaccccaggcatcaatattatggtttcttgtgcactgagtgattttttaaattattattatttttttatttttgagacagagtctctctctgtcacccaggctggagtgcagtggtgcgatctcagctcactgcaacctccgcctcccgggttcaagcaattctcctgcctcagcctcctgagtagctgagactacgggcgcccgccaccatgcctggctatttttttgtatttttagtagagatggggtttcacccgagatggtctcaatctcctgacctgatgatccgcctgccttggcctcccaaagtgctgggattacaggcgtgagccaccgcgcctggcctattttttttttttttttaaattatagatggggtctctgtcagccaggctggagtgcagtggcagcccccaactcctgagctcaggcagtcctcccaccacagcctaccaaagtgccttggcctcccaaagtgctgagattacaggtgtgagccaccatgcccagcagatttttttcttttatttttttcttaaagaccagtgtgcttttcttggagaaagaagaaaagaagaaagaaggaagaagaagaagaaagaaaggaggaagaaggaagaagaagagccagtgtgataatacattgagtgattttttaaaaagtgcatatatgagcaaaaagttatttttcccttttctgaagtatggcagcatactatatagactgtctctgcatgtttatttttcccccatttaatatatcctggagatcattttatatcaatataaaaatggttttctcattcttttatagctgcagtgtgttccattgtatttatcctcttgcagatgaagaaactaagattccaagggttaagtaagactggtccaagatcacacatctgggaaatagcaaagccatgatatgaacccaaacctgttcattaccttcccttctgccaatttgaggggcagaggtaaagaggagagcaaagaagccacctctaggagggcttgaagcccagaggatgggtcagcc

SEQ ID NO: 421893 - DNA, 256 bp, Homo sapiens
acacacacacacacacacactaggttaacatcaaccaccgcaccatccaggcactcggtggcagtgagcatgcgctccggctccaccacgaacatgtagtagaggttccacatcagcatcgacagcagtggcagaaacgtcaggccgtagccgaagcctcggaaggagcggcccacggcaaaggtcagccagtagatcagcctagaattgtttggtctgtggtcaagacctcggggagggaagcggtgcagtaaga

SEQ ID NO: 421894 - DNA, 196 bp, Homo sapiens
agactcagatatgaaagccttggtagggggtgagtgggaggtgtggtctcgggagaaaaactgaggcaagcccagttccaccctacccccaccctccagctgcttgagtttgacagcaccaacgtgtccgatacggcagcaaagcctttgggaagaccatatcctccatactccttggccgatttctcttggaaca

SEQ ID NO: 421895 - DNA, 808 bp, Homo sapiens
gggcacctcttccgtcggctgaattgcggccgtatgcgcggctctgtggagtgcacctggggttgggggcactgtgcccccagccccctgctcctttggactctacttctgtttgcagccccatttggcctgctgggggagaagacccgccagctgcttgagtttgacagcaccaacgtgtccgatacggcagcaaagcctttgggaagaccatatcctccatactccttggccgatttctcttggaacaacatcactgattcattggatcctgccaccctgagtgccacatttcaaggccaccccatgaacgaccctaccaggacttttgccaatggcagcctggccttcagggtccaggccttttccaggtccagccgaccagcccaaccccctcgcctcctgcacacagcagacacctgtcagctagaggtggccctgattggagcctctccccggggaaaccgttccctgtttgggctggaggtagccacattgggccagggccctgactgcccctcaatgcaggagcagcactccatcgacgatgaatatgcaccggccgtcttccaggtcaggcttcctggagagaggcagatgggtgaggaatgtaggtgggacaccattgggacctaaaactcattcaaccatttgccatttagcaacactttctttgggtcgtttaagagctaggcactgtgctaatgaatctgacccagtctctgccctcagtggagacagacagaaagtgcaatatgacttacactctggcagatggagatctgcaagggggctaggggccaagagg

SEQ ID NO: 421896 - DNA, 1774 bp, Homo sapiens
gggcacctcttccgtcggctgaattgcggccgtatgcgcggctctgtggagtgcacctggggttgggggcactgtgcccccagccccctgctcctttggactctacttctgtttgcagccccatttggcctgctgggggagaagacccgccaggtgtctctggaggtcatccctaactggctgggccccctgcagaacctgcttcatatacgggcagtgggcaccaattccacactgcactatgtgtggagcagcctggggcctctggcagtggtaatggtggccaccaacaccccccacagcaccctgagcgtcaactggagcctcctgctatcccctgagcccgatgggggcctgatggtgctccctaaggacagcattcagttttcttctgcccttgtttttaccaggctgcttgagtttgacagcaccaacgtgtccgatacggcagcaaagcctttgggaagaccatatcctccatactccttggccgatttctcttggaacaacatcactgattcattggatcctgccaccctgagtgccacatttcaaggccaccccatgaacgaccctaccaggacttttgccaatggcagcctggccttcagggtccaggccttttccaggtccagccgaccagcccaaccccctcgcctcctgcacacagcagacacctgtcagctagaggtggccctgattggagcctctccccggggaaaccgttccctgtttgggctggaggtagccacattgggccagggccctgactgcccctcaatgcaggagcagcactccatcgacgatgaatatgcaccggccgtcttccagttggaccagctactgtggggctccctcccatcaggctttgcacagtggcgaccagtggcttactcccagaagccggggggccgagaatcagccctgccctgccaagcttcccctcttcatcctgccttagcatactctcttccccagtcacccattgtccgagccttctttgggtcccagaataacttctgtgccttcaatctgacgttcggggcttccacaggccctggctattgggaccaacactacctcagctggtcgatgctcctgggtgtgggcttccctccagtggacggcttgtccccactagtcctgggcatcatggcagtggccctgggtgccccagggctcatgctgctagggggcggcttggttctgctgctgcaccacaagaagtactcagagtaccagtccataaattaaggcccgctctctggagggaaggacattactgaacctgtcttgctgtgcctcgaaactctggaggttggagcatcaagttccagccggccccttcactcccccatcttgcttttctgtggaacctcagaggccagcctcgacttcctggagacccccaggtggggcttccttcatactttgttgggggactttggaggcgggcaggggacagggctattgataaggtccccttggtgttgccttcttgcatctccacacatttcccttggatgggacttgcaggcctaaatgagaggcattctgactggttggctgccctggaaggcaagatccatcattttttcacagggaaaaaacagaccgagggggccggaccaatcgctaaggagcgatcatcacggcgcgttacagtcgagggaacggggtccactaggcgtgaccccttgcgggggaagagagcagagcacacagccccaagaggagagccattgacggaccgcgcctggcggccgagggcggc

SEQ ID NO: 421897 - DNA, 1910 bp, Homo sapiens
gggcacctcttccgtcggctgaattgcggccgtatgcgcggctctgtggagtgcacctggggttgggggcactgtgcccccagccccctgctcctttggactctacttctgtttgcagccccatttggcctgctgggggagaagacccgccaggtgtctctggaggtcatccctaactggctgggccccctgcagaacctgcttcatatacgggcagtgggcaccaattccacactgcactatgtgtggagcagcctggggcctctggcagtggtaatggtggccaccaacaccccccacagcaccctgagcgtcaactggagcctcctgctatcccctgagcccgatgggggcctgatggtgctccctaaggacagcattcagttttcttctgcccttgtttttaccaggctgcttgagtttgacagcaccaacgtgtccgatacggcagcaaagcctttgggaagaccatatcctccatactccttggccgatttctcttggaacaacatcactgattcattggatcctgccaccctgagtgccacatttcaaggccaccccatgaacgaccctaccaggacttttgccaatggcagcctggccttcagggtccaggccttttccaggtccagccgaccagcccaaccccctcgcctcctgcacacagcagacacctgtcagctagaggtggccctgattggagcctctccccggggaaaccgttccctgtttgggctggaggtagccacattgggccagggccctgactgcccctcaatgcaggagcagcactccatcgacgatgaatatgcaccggccgtcttccagttggaccagctactgtggggctccctcccatcaggctttgcacagtggcgaccagtggcttactcccagaagccggggggccgagaatcagccctgccctgccaagcttcccctcttcatcctgccttagcatactctcttccccagtcacccattgtccgagccttctttgggtcccagaataacttctgtgccttcaatctgacgttcggggcttccacaggccctggctattgggaccaacactacctcagctggtcgatgctcctgggtgtgggcttccctccagtggacggcttgtccccactagtcctgggcatcatggcagtggccctgggtgccccagggctcatgctgctagggggcggcttggttctgctgctgcaccacaagaagtactcagagtaccagtccataaattaaggcccgctctctggagggaaggacattactgaacctgtcttgctgtgcctcgaaactctggaggttggagcatcaagttccagccggccccttcactcccccatcttgcttttctgtggaacctcagaggccagcctcgacttcctggagacccccagaccagtgtgcttttcttggagaaagaagaaaagaagaaagaaggaagaagaagaagaaagaaaggaggaagaaggaagaagaagagccagtgtgataatacattgagtgattttttaaaaagtgcatatatgagcaaaaagttatttttcccttttctgaagtatggcagcatactatatagactgtctctgcatgtttatttttcccccatttaatatatcctggagatcattttatatcaatataaaaatggttttctcattcttttatagctgcagtgtgttccattgtatttatcctcttgcagatgaagaaactaagattccaagggttaagtaagactggtccaagatcacacatctgggaaatagcaaagccatgatatgaacccaaacctgttcattaccttcccttctgccaatttgaggggcagaggtaaagaggagagcaaagaagccacctctaggagggcttgaagcccagaggatgggtcagcc

SEQ ID NO: 421898 - DNA, 1805 bp, Homo sapiens
  misc_feature (1476)..(1477): n is a, c, g, or t
gggcacctcttccgtcggctgaattgcggccgtatgcgcggctctgtggagtgcacctggggttgggggcactgtgcccccagccccctgctcctttggactctacttctgtttgcagccccatttggcctgctgggggagaagacccgccaggtgtctctggaggtcatccctaactggctgggccccctgcagaacctgcttcatatacgggcagtgggcaccaattccacactgcactatgtgtggagcagcctggggcctctggcagtggtaatggtggccaccaacaccccccacagcaccctgagcgtcaactggagcctcctgctatcccctgagcccgatgggggcctgatggtgctccctaaggacagcattcagttttcttctgcccttgtttttaccaggctgcttgagtttgacagcaccaacgtgtccgatacggcagcaaagcctttgggaagaccatatcctccatactccttggccgatttctcttggaacaacatcactgattcattggatcctgccaccctgagtgccacatttcaaggccaccccatgaacgaccctaccaggacttttgccaatggcagcctggccttcagggtccaggccttttccaggtccagccgaccagcccaaccccctcgcctcctgcacacagcagacacctgtcagctagaggtggccctgattggagcctctccccggggaaaccgttccctgtttgggctggaggtagccacattgggccagggccctgactgcccctcaatgcaggagcagcactccatcgacgatgaatatgcaccggccgtcttccagtcacccattgtccgagccttctttgggtcccagaataacttctgtgccttcaatctgacgttcggggcttccacaggccctggctattgggaccaacactacctcagctggtcgatgctcctgggtgtgggcttccctccagtggacggcttgtccccactagtcctgggcatcatggcagtggccctgggtgccccagggctcatgctgctagggggcggcttggttctgctgctgcaccacaagaagtactcagagtaccagtccataaattaaggcccgctctctggagggaaggacattactgaacctgtcttgctgtgcctcgaaactctggaggttggagcatcaagttccagccggccccttcactcccccatcttgcttttctgtggaacctcagaggccagcctcgacttcctggagacccccaggtggggcttccttcatactttgttgggggactttggaggcgggcaggggacagggctattgataaggtccccttggtgttgccttcttgcatctccacacatttcccttggatgggacttgcaggcctaaatgagaggcattctgactggttggctgccctggaaggcaagaaaatagatttattttttttcacagggaaaaaaaaaaaannaaaaaaaaaaaaaaaaaaaaaaaaaaaaaaacaaaaaaaaaaaaacaacaaaacagagaggggcgggcgcgccccaaaaagaaatcacacccacgcgggggcgccccagactatgccggacccacccgtgttttggtgaaaaggggccccccacaagaggcgggcgctatcaaacaaaccgaagagcgcgcgccacgactacacaccgctgcggcggagacacacgcgcccgcggcactctgggagagagaccccatcccgggggggcgcactggggcaacaccccgcagcgataaagccgcgcaaacaacactccgcgatacggcac

SEQ ID NO: 421899 - DNA, 1896 bp, Homo sapiens
  misc_feature (1567)..(1568): n is a, c, g, or t
gcgcgatccgtctgtgagtgactgggtggggatgtgcccagccctgctcttggacctatctgtgcatgccatttggctgctggggagaagaccgcaggtgtctctggaggtcatccctaactggctgggccccctgcagaacctgcttcatatacgggcagtgggcaccaattccacactgcactatgtgtggagcagcctggggcctctggcagtggtaatggtggccaccaacaccccccacagcaccctgagcgtcaactggagcctcctgctatcccctgagcccgatgggggcctgatggtgctccctaaggacagcattcagttttcttctgcccttgtttttaccaggctgcttgagtttgacagcaccaacgtgtccgatacggcagcaaagcctttgggaagaccatatcctccatactccttggccgatttctcttggaacaacatcactgattcattggatcctgccaccctgagtgccacatttcaaggccaccccatgaacgaccctaccaggacttttgccaatggcagcctggccttcagggtccaggccttttccaggtccagccgaccagcccaaccccctcgcctcctgcacacagcagacacctgtcagctagaggtggccctgattggagcctctccccggggaaaccgttccctgtttgggctggaggtagccacattgggccagggccctgactgcccctcaatgcaggagcagcactccatcgacgatgaatatgcaccggccgtcttccagttggaccagctactgtggggctccctcccatcaggctttgcacagtggcgaccagtggcttactcccagaagccggggggccgagaatcagccctgccctgccaagcttcccctcttcatcctgccttagcatactctcttccccagtcacccattgtccgagccttctttgggtcccagaataacttctgtgccttcaatctgacgttcggggcttccacaggccctggctattgggaccaacactacctcagctggtcgatgctcctgggtgtgggcttccctccagtggacggcttgtccccactagtcctgggcatcatggcagtggccctgggtgccccagggctcatgctgctagggggcggcttggttctgctgctgcaccacaagaagtactcagagtaccagtccataaattaaggcccgctctctggagggaaggacattactgaacctgtcttgctgtgcctcgaaactctggaggttggagcatcaagttccagccggccccttcactcccccatcttgcttttctgtggaacctcagaggccagcctcgacttcctggagacccccaggtggggcttccttcatactttgttgggggactttggaggcgggcaggggacagggctattgataaggtccccttggtgttgccttcttgcatctccacacatttcccttggatgggacttgcaggcctaaatgagaggcattctgactggttggctgccctggaaggcaagaaaatagatttattttttttcacagggaaaaaaaaaaaannaaaaaaaaaaaaaaaaaaaaaaaaaaaaaaacaaaaaaaaaaaaacaacaaaacagagaggggcgggcgcgccccaaaaagaaatcacacccacgcgggggcgccccagactatgccggacccacccgtgttttggtgaaaaggggccccccacaagaggcgggcgctatcaaacaaaccgaagagcgcgcgccacgactacacaccgctgcggcggagacacacgcgcccgcggcactctgggagagagaccccatcccgggggggcgcactggggcaacaccccgcagcgataaagccgcgcaaacaacactccgcgatacggcac

SEQ ID NO: 421900 - DNA, 1695 bp, Homo sapiens
  misc_feature (1366)..(1367): n is a, c, g, or t
gggcacctcttccgtcggctgaattgcggccgtatgcgcggctctgtggagtgcacctggggttgggggcactgtgcccccagccccctgctcctttggactctacttctgtttgcagccccatttggcctgctgggggagaagacccgccaggtgtctctggaggtcatccctaactggctgggccccctgcagaacctgcttcatatacgggcagtgggcaccaattccacactgcactatgtgtggagcagcctggggcctctggcagtggtaatggtggccaccaacaccccccacagcaccctgagcgtcaactggagcctcctgctatcccctgagcccgatgggggcctgatggtgctccctaaggacagcattcagttttcttctgcccttgtttttaccaggctgcttgagtttgacagcaccaacgtgtccgatacggcagcaaagcctttgggaagaccatatcctccatactccttggccgatttctcttggaacaacatcactgattcattggatcctgccaccctgagtgccacatttcaaggccaccccatgaacgaccctaccaggacttttgccaatggcagcctggccttcagggtccaggccttttccaggtccagccgaccagcccaaccccctcgcctcctgcacacagcagacacctgtcagctagaggtggccctgattggagcctctccccggggaaaccgttccctgtttgggctggaggtagccacattgggccagggccctgactgcccctcaatgcaggagcagcactccatcgacgatgaatatgcaccggccgtcttccaggtcgatgctcctgggtgtgggcttccctccagtggacggcttgtccccactagtcctgggcatcatggcagtggccctgggtgccccagggctcatgctgctagggggcggcttggttctgctgctgcaccacaagaagtactcagagtaccagtccataaattaaggcccgctctctggagggaaggacattactgaacctgtcttgctgtgcctcgaaactctggaggttggagcatcaagttccagccggccccttcactcccccatcttgcttttctgtggaacctcagaggccagcctcgacttcctggagacccccaggtggggcttccttcatactttgttgggggactttggaggcgggcaggggacagggctattgataaggtccccttggtgttgccttcttgcatctccacacatttcccttggatgggacttgcaggcctaaatgagaggcattctgactggttggctgccctggaaggcaagaaaatagatttattttttttcacagggaaaaaaaaaaaannaaaaaaaaaaaaaaaaaaaaaaaaaaaaaaacaaaaaaaaaaaaacaacaaaacagagaggggcgggcgcgccccaaaaagaaatcacacccacgcgggggcgccccagactatgccggacccacccgtgttttggtgaaaaggggccccccacaagaggcgggcgctatcaaacaaaccgaagagcgcgcgccacgactacacaccgctgcggcggagacacacgcgcccgcggcactctgggagagagaccccatcccgggggggcgcactggggcaacaccccgcagcgataaagccgcgcaaacaacactccgcgatacggcac

SEQ ID NO: 421901 - DNA, 193 bp, Homo sapiens
ttttctttttttgactctgattagcaggatgcatttttatttaatctacattatgggcatatgaacattatttgtgacatagttcagagataccacttcattatgaaaaagtttatattaaatgtatatttacacagatgctgattttccttctctataaatgtacttttcattgcaggatgacattttgatt

SEQ ID NO: 421902 - DNA, 882 bp, Homo sapiens
aaaggtaataaacgtatatccaacaaaccaccaaaaaagtgagggctactcatgctcaagtaacacttaatggagatttggcatcagcaaccattcctgaagaaagcagacttatggccaaaaaacaatctgaatcagaagatactcttccatccttctcttcctgaagaaactgaagtgtccaacttcctctaagtattgctatgcaaaagctgctgtaattaaactattgttatagggagtagttttttcccttaggactctgcactttatagaatgttgtaaaacagacaaacaagaaaacaaaccacatacttacgatttgattcttcatacagatcgtaagcaagaccattcttcccaaccaccaccccgatctgatcgcccatccctcttcctccgaacaacccacggcagcaacctaactacattcgcacacgcacatacggaaacatctccctcagaagcgtgcggggcggactctccctcccgaccccgtccccctcgtccctattacccaacccacatatcaacggcactcccttggcaacaacgagagaataagggccacaaggagcatctatccgactccgacaaccattctacccctagaccatcggccaccactcctgaatcagtatcacctattgtttctttacccttatattatccatcctaacacatacaatagtcgaatggatctacctattctcgcctcacccagatagcctcctggactcacgtacctccaccctgcccgccatcaacccatcatacgcaaccccacagagtcactagcccagggaaccccattccgccgacaatcaccgactcgcgcccctctctagacaactaagtgataacccccacctttcccatcac

SEQ ID NO: 421903 - DNA, 3159 bp, Homo sapiens
aggcaccggggctgcgcgcgcagcggagctcgaaggtcttgtcccccgggggcggtcagcctgggccttggcggccaaggggaaacttgggagcctcgggactgttggccaccggcccgtgggaggagtaaaggcggccctggctggcaggccgagggtgtgacgcgccggcccgccctcctcgcgcagcctccggctaggcggcgaggccgcaggccgcgcccgctccttcagccccgccgccggggaggggtttcccgggacgatccggcccctttcatccaggaagtgaaatcgacgtcggggtcaatgaaaacaaacggggagcccagggggaaggaaggcaggcgaggaagaggcagcgccggggcgccggagggagcagccgggctgcggaagcgcgagcaggaggccggtcgcgggcgcatttttgccgttgtcgcggccgccgccgccgaggcttacccgggaatgtctgggcccgcgcctcgcggcccccaagctccacgctgcgcccgctgtcccggcctctaaaggccgccacgtccctgcggcgcgcgcaggcagaaagcggcttcgtgccggcggagggggcccgggcgggccgggaggggctgccccaggccctgcgcctaccccatcaccgcggccggcgccgggccgggaggatgcgcggtgtggggctctgaagcatggagggggtgttgtacaagtggaccaactatctcacaggctggcagcctcgttggtttgttttagataatggaatcttatcctactatgattcacaagatgatgtttgcaaagggagcaaaggaagcataaagatggcagtttgtgaaattaaagttcattcagcagacaacacaagaatggaattaatcattcctggagagcagcatttctacatgaaggcagtgaatgcagctgaaagacagaggtggctggtcgctctggggagctccaaagcatgtttgactgatacaaggactaaaaaagaaaaagaaataagtgaaaccagtgaatcgctgaaaaccaaaatgtctgaacttcgcctctactgtgacctcttaatgcagcaagttcatacaatacaggaatttgttcaccatgatgagaatcattcatctcctagtgcagagaacatgaatgaagcctcttctctgcttagtgccacgtgtaacacattcatcacaacgcttgaggaatgtgtgaagatagccaatgccaagtttaaacctgagatgtttcaactgcaccatccggatcccttagtttctcctgtgtcaccttctcctgttcaaatgatgaagcgttctgtcagccaccctggttcttgcagttcagagaggagtagccactctataaaagaaccagtatctacacttcaccgactctcccagcgacgccgaagaacctactcagatacagattcttgtagtgatattcctcttgaagacccagatagacctgttcactgttcaaaaaatacacttaatggagatttggcatcagcaaccattcctgaagaaagcagacttatggccaaaaaacaatctgaatcagaagatactcttccatccttctcttcctgaagaaactgaagtgtccaacttcctctaagtattgctatgcaaaagctgctgtaattaaactattgttatagggagtagttttttcccttaggactctgcactttatagaatgttgtaaaacagacaaacaagaaaacaaaccacatacttttgaagtgtattttatctttatatagtttgtttgcaagagtattttcctaataacttcacagtatgaatgtgcatcttttttttttgaacaaatgatggtgtaacattttgacatccataaggacaaatgtagatatttttcttaaaaactctgaggggactgacagcatggtcagggtgtattgtagcttataaacatgaaatcttataaggtttcagtttgacagaagtgtgatatatgtaacttgtgccatggaccaaatggtcactttaccacagctaaaaatgagttacgatagcagcttgatggtgattgtattgtattcctttaatcaaaaaggaaacacaatattctaagtatctttagcccaaataccatgacatattgagcatctttaaataaccagactgtattgtccttcatatgtgaagttgacactactgatttgtcaataccaaattttgggttaaagtgtttaatttttatgtatttattttcttgttgcctcaaaagatgattgcattctaacttttgtgacctaccaaatttaagatgtgtatacgttgttctttacgttgttctagaaaagagattttaatgctgtagtgactttgctcacttacactagagaaataaacaactttcaatggaagagaattttagtgctttttttttcctaaaatagatattaagctgctgttgtaaagtattgtttgcagctctttccaatatctagagacatttttatttatgaatatttatacaaaaaggaattctgtcaagatgactgctctatatcacttgagaatggcattatttaattaaagaacaaatagcattttttggtagtgcctgtccatacctattgtcattgtttgccttgtaatctgtttttttgaattcattttgggctgatagttttgtttaaggttttggataaggagcactttaaaacaaactggtgtgttgtttttaagttaatcatatgtttaataaatgcgtggtttttgcattcaaacacatcatataatacattgtattttttacattcattgatattctgtctaatctttattaggcactaatataattctaatggatttgagtttgtttgtatatttaggcctgctggtgaagacacaaatgaagcataatttttgttgcctgtgagcttagaatggtgtgacctatttcattttatttcaatttatcttgtaagtttatgtgggatattttaaaataattaatatttggtatttgtttaaaaaactgtaattataggccttccatcttaagtttaagatggacataaacagtctatacattaatatgtgtttgggtaaactgtatgctacttgaagtgtttgtaattttaaataacacacaggtcatcagactactctatattcagtg

SEQ ID NO: 421904 - DNA, 2814 bp, Homo sapiens
aggcaccggggctgcgcgcgcagcggagctcgaaggtcttgtcccccgggggcggtcagcctgggccttggcggccaaggggaaacttgggagcctcgggactgttggccaccggcccgtgggaggagtaaaggcggccctggctggcaggccgagggtgtgacgcgccggcccgccctcctcgcgcagcctccggctaggcggcgaggccgcaggccgcgcccgctccttcagccccgccgccggggaggggtttcccgggacgatccggcccctttcatccaggaagtgaaatcgacgtcggggtcaatgaaaacaaacggggagcccagggggaaggaaggcaggcgaggaagaggcagcgccggggcgccggagggagcagccgggctgcggaagcgcgagcaggaggccggtcgcgggcgcatttttgccgttgtcgcggccgccgccgccgaggcttacccgggaatgtctgggcccgcgcctcgcggcccccaagctccacgctgcgcccgctgtcccggcctctaaaggccgccacgtccctgcggcgcgcgcaggcagaaagcggcttcgtgccggcggagggggcccgggcgggccgggaggggctgccccaggccctgcgcctaccccatcaccgcggccggcgccgggccgggaggatgcgcggtgtggggctctgaagcatggagggggtgttgtacaagtggaccaactatctcacaggctggcagcctcgttggtttgttttagataatggaatcttatcctactatgattcacaagatgatgtttgcaaagggagcaaaggaagcataaagatggcagtttgtgaaattaaaggtgacaactttggaggggaccacccttgattggatgcataaattctgttcattcagcagacaacacaagaatggaattaatcattcctggagagcagcatttctacatgaaggcagtgaatgcagctgaaagacagaggtggctggtcgctctggggagctccaaagcatgtttgactgatacaaggactaaaaaagaaaaagaaataagtgaaaccagtgaatcgctgaaaaccaaaatgtctgaacttcgcctctactgtgacctcttaatgcagcaagttcatacaatacaggaatttgttcaccatgatgagaatcattcatctcctagtgcagagaacatgaatgaagcctcttctctgcttagtgccacgtgtaacacattcatcacaacgcttgaggaatgtgtgaagatagccaatgccaagtttaaacctgagatgtttcaactgcaccatccggatcccttagtttctcctgtgtcaccttctcctgttcaaatgatgaagcgttctgtcagccaccctggttcttgcagttcagagaggagtagccactctataaaagaaccagtatctacacttcaccgactctcccagcgacgccgaagaacctactcagatacagattcttgtagtgatattcctcttgaagacccagatagacctgttcactgttcaaaaaatacacttaatggagatttggcatcagcaaccattcctgaagaaagcagacttatggccaaaaaacaatctgaatcagaagatactcttccatccttctcttcctgaagaaactgaagtgtccaacttcctctaagtattgctatgcaaaagctgctgtaattaaactattgttatagggagtagttttttcccttaggactctgcactttatagaatgttgtaaaacagacaaacaagaaaacaaaccacatacttttgaagtgtattttatctttatatagtttgtttgcaagagtattttcctaataacttcacagtatgaatgtgcatcttttttttttgaacaaatgatggtgtaacattttgacatccataaggacaaatgtagatatttttcttaaaaactctgaggggactgacagcatggtcagggtgtattgtagcttataaacatgaaatcttataaggtttcagtttgacagaagtgtgatatatgtaacttgtgccatggaccaaatggtcactttaccacagctaaaaatgagttacgatagcagcttgatggtgattgtattgtattcctttaatcaaaaaggaaacacaatattctaagtatctttagcccaaataccatgacatattgagcatctttaaataaccagactgtattgtccttcatatgtgaagttgacactactgatttgtcaataccaaattttgggttaaagtgtttaatttttatgtatttattttcttgttgcctcaaaagatgattgcattctaacttttgtgacctaccaaatttaagatgtgtatacgttgttctttacgttgttctagaaaagagattttaatgctgtagtgactttgctcacttacactagagaaataaacaactttcaatggaagagaattttagtgctttttttttcctaaaatagatattaagctgctgttgtaaagtattgtttgcagctctttccaatatctagagacatttttatttatgaatatttatacaaaaaggaattctgtcaagatgactgctctatatcacttgagaatggcattatttaattaaagaacaaatagcattttttggtagtgcctgtccatacctattgtcattgtttgccttgtaatctgtttttttgaattcattttgggctgatagttttgtttaaggttttggataaggagcactttaaaacaaactggtgtgttgtttttaagttaatcatatgtttaataaatgcgtggtttttgcattcaaacac

SEQ ID NO: 421905 - DNA, 2304 bp, Homo sapiens
gtaatgttcgggcccaatcctattgtaccctgacattacaatctaacctatgtatgaatgactttaaaagtgatcaccttaataactaacccactaggcgaaaatcctttcttgcccaacaaaggcgcccccgtccggatacaatgccctgcccttagcgggggtgcgcctaccccatcaccgcggccggcgccgggccgggaggatgcgcggtgtggggctctgaagcatggagggggtgttgtacaagtggaccaactatctcacaggctggcagcctcgttggtttgttttagataatggaatcttatcctactatgattcacaagatgatgtttgcaaagggagcaaaggaagcataaagatggcagtttgtgaaattaaagttcattcagcagacaacacaagaatggaattaatcattcctggagagcagcatttctacatgaaggcagtgaatgcagctgaaagacagaggtggctggtcgctctggggagctccaaagcatgtttgactgatacaaggactaaaaaagaaaaagaaataagtgaaaccagtgaatcgctgaaaaccaaaatgtctgaacttcgcctctactgtgacctcttaatgcagcaagttcatacaatacaggaatttgttcaccatgatgagaatcattcatctcctagtgcagagaacatgaatgaagcctcttctctgcttagtgccacgtgtaacacattcatcacaacgcttgaggaatgtgtgaagatagccaatgccaagtttaaacctgagatgtttcaactgcaccatccggatcccttagtttctcctgtgtcaccttctcctgttcaaatgatgaagcgttctgtcagccaccctggttcttgcagttcagagaggagtagccactctataaaagaaccagtatctacacttcaccgactctcccagcgacgccgaagaacctactcagatacagattcttgtagtgatattcctcttgaagacccagatagacctgttcactgttcaaaaaatacacttaatggagatttggcatcagcaaccattcctgaagaaagcagacttatggccaaaaaacaatctgaatcagaagatactcttccatccttctcttcctgaagaaactgaagtgtccaacttcctctaagtattgctatgcaaaagctgctgtaattaaactattgttatagggagtagttttttcccttaggactctgcactttatagaatgttgtaaaacagacaaacaagaaaacaaaccacatacttttgaagtgtattttatctttatatagtttgtttgcaagagtattttcctaataacttcacagtatgaatgtgcatcttttttttttgaacaaatgatggtgtaacattttgacatccataaggacaaatgtagatatttttcttaaaaactctgaggggactgacagcatggtcagggtgtattgtagcttataaacatgaaatcttataaggtttcagtttgacagaagtgtgatatatgtaacttgtgccatggaccaaatggtcactttaccacagctaaaaatgagttacgatagcagcttgatggtgattgtattgtattcctttaatcaaaaaggaaacacaatattctaagtatctttagcccaaataccatgacatattgagcatctttaaataaccagactgtattgtccttcatatgtgaagttgacactactgatttgtcaataccaaattttgggttaaagtgtttaatttttatgtatttattttcttgttgcctcaaaagatgattgcattctaacttttgtgacctaccaaatttaagatgtgtatacgttgttctttacgttgttctagaaaagagattttaatgctgtagtgactttgctcacttacactagagaaataaacaactttcaatggaagagaattttagtgctttttttttcctaaaatagatattaagctgctgttgtaaagtattgtttgcagctctttccaatatctagagacatttttatttatgaatatttatacaaaaaggaattctgtcaagatgactgctctatatcacttgagaatggcattatttaattaaagaacaaatagcattttttggtagtgcctgtccatacctattgtcattgtttgccttgtaatctgtttttttgaattcattttgggctgatagttttgtttaaggttttggataaggagcactttaaaacaaactggtgtgttgtttttaagttaatcatatgtttaataaatgcgtggtttttgcattcaaacac

SEQ ID NO: 421906 - DNA, 1838 bp, Homo sapiens
atccaccctccttggcctcccaaggtgctgggattgcaggcttgagccaccgtggccggccttttaataagatccttttttgtagggaatttgggtttcctttttttaaaaaataaataaataaaaatttcataaatgagactccacgtacacgggacgttgagcataaaaataattcttttttcacttaaagagaagtcatttaaaattccagttgagtgtgtttttgtttatgtaaggccttacaatttaatgctttttacttaatttgcaggagtagccactctataaaagaaccagtatctacacttcaccgactctcccagcgacgccgaagaacctactcagatacagattcttgtagtgatattcctcttgaagacccagataatgtgggtggagaaatgaaggaaagaaaccgggaaggggaagggagaaagaaactttcttgggccaatcaagcaagacctggaagagaagaggaggagaggaggagggttaaagaggttgagtatgtgaaaaaagttatctgaggcaggacctgttcactgttcaaaaaatacacttaatggagatttggcatcagcaaccattcctgaagaaagcagacttatggccaaaaaacaatctgaatcagaagatactcttccatccttctcttcctgaagaaactgaagtgtccaacttcctctaagtattgctatgcaaaagctgctgtaattaaactattgttatagggagtagttttttcccttaggactctgcactttatagaatgttgtaaaacagacaaacaagaaaacaaaccacatacttttgaagtgtattttatctttatatagtttgtttgcaagagtattttcctaataacttcacagtatgaatgtgcatcttttttttttgaacaaatgatggtgtaacattttgacatccataaggacaaatgtagatatttttcttaaaaactctgaggggactgacagcatggtcagggtgtattgtagcttataaacatgaaatcttataaggtttcagtttgacagaagtgtgatatatgtaacttgtgccatggaccaaatggtcactttaccacagctaaaaatgagttacgatagcagcttgatggtgattgtattgtattcctttaatcaaaaaggaaacacaatattctaagtatctttagcccaaataccatgacatattgagcatctttaaataaccagactgtattgtccttcatatgtgaagttgacactactgatttgtcaataccaaattttgggttaaagtgtttaatttttatgtatttattttcttgttgcctcaaaagatgattgcattctaacttttgtgacctaccaaatttaagatgtgtatacgttgttctttacgttgttctagaaaagagattttaatgctgtagtgactttgctcacttacactagagaaataaacaactttcaatggaagagaattttagtgctttttttttcctaaaatagatattaagctgctgttgtaaagtattgtttgcagctctttccaatatctagagacatttttatttatgaatatttatacaaaaaggaattctgtcaagatgactgctctatatcacttgagaatggcattatttaattaaagaacaaatagcattttttggtagtgcctgtccatacctattgtcattgtttgccttgtaatctgtttttttgaattcattttgggctgatagttttgtttaaggttttggataaggagcactttaaaacaaactggtgtgttgtttttaagttaatcatatgtttaataaatgcgtggtttttgcattcaaacac

SEQ ID NO: 421907 - DNA, 388 bp, Homo sapiens
actttggaggggaccacccttgattggatgcataaattctggtatgtttaaaaatgagtcatcttattttagtttcatcttgtagcaacatcattagaaattagagcattgctttcttttaaagtaggtattggtgctttcactagtattggcaagtagcaaggaagagttactcttatagctttaggagttcagtagttttaccctagcctagaaatcttttgcattcataattgattgttgcatggttgtatgtttcagtgtctgcaactaagaatgacccatataagtagaataataagatagcaacatttctgtggcacttacttgccataatacactaaacatctggtcaatatttatagcaattaattatttaagttggggc

SEQ ID NO: 421908 - DNA, 2767 bp, Homo sapiens
aggcaccggggctgcgcgcgcagcggagctcgaaggtcttgtcccccgggggcggtcagcctgggccttggcggccaaggggaaacttgggagcctcgggactgttggccaccggcccgtgggaggagtaaaggcggccctggctggcaggccgagggtgtgacgcgccggcccgccctcctcgcgcagcctccggctaggcggcgaggccgcaggccgcgcccgctccttcagccccgccgccggggaggggtttcccgggacgatccggcccctttcatccaggaagtgaaatcgacgtcggggtcaatgaaaacaaacggggagcccagggggaaggaaggcaggcgaggaagaggcagcgccggggcgccggagggagcagccgggctgcggaagcgcgagcaggaggccggtcgcgggcgcatttttgccgttgtcgcggccgccgccgccgaggcttacccgggaatgtctgggcccgcgcctcgcggcccccaagctccacgctgcgcccgctgtcccggcctctaaaggccgccacgtccctgcggcgcgcgcaggcagaaagcggcttcgtgccggcggagggggcccgggcgggccgggaggggctgccccaggccctgcgcctaccccatcaccgcggccggcgccgggccgggaggatgcgcggtgtggggctctgaagcatggagggggtgttgtacaagtggaccaactatctcacaggctggcagcctcgttggtttgttttagataatggaatcttatcctactatgattcacaagatgatgtttgcaaagggagcaaaggaagcataaagatggcagtttgtgaaattaaagttcattcagcagacaacacaagaatggaattaatcattcctggagagcagcatttctacatgaaggcagtgaatgcagctgaaagacagaggtggctggtcgctctggggagctccaaagcatgtttgactgatacaaggactaaaaaagaaaaagaaataagtgaaaccagtgaatcgctgaaaaccaaaatgtctgaacttcgcctctactgtgacctcttaatgcagcaagttcatacaatacaggaatttgttcaccatgatgagaatcattcatctcctagtgcagagaacatgaatgaagcctcttctctgcttagtgccacgtgtaacacattcatcacaacgcttgaggaatgtgtgaagatagccaatgccaagtttaaacctgagatgtttcaactgcaccatccggatcccttagtttctcctgtgtcaccttctcctgttcaaatgatgaagcgttctgtcagccaccctggttcttgcagttcagagaggagtagccactctataaaagaaccagtatctacacttcaccgactctcccagcgacgccgaagaacctactcagatacagattcttgtagtgatattcctcttgaagacccagatagacctgttcactgttcaaaaaatacacttaatggagatttggcatcagcaaccattcctgaagaaagcagacttatggccaaaaaacaatctgaatcagaagatactcttccatccttctcttcctgaagaaactgaagtgtccaacttcctctaagtattgctatgcaaaagctgctgtaattaaactattgttatagggagtagttttttcccttaggactctgcactttatagaatgttgtaaaacagacaaacaagaaaacaaaccacatacttttgaagtgtattttatctttatatagtttgtttgcaagagtattttcctaataacttcacagtatgaatgtgcatcttttttttttgaacaaatgatggtgtaacattttgacatccataaggacaaatgtagatatttttcttaaaaactctgaggggactgacagcatggtcagggtgtattgtagcttataaacatgaaatcttataaggtttcagtttgacagaagtgtgatatatgtaacttgtgccatggaccaaatggtcactttaccacagctaaaaatgagttacgatagcagcttgatggtgattgtattgtattcctttaatcaaaaaggaaacacaatattctaagtatctttagcccaaataccatgacatattgagcatctttaaataaccagactgtattgtccttcatatgtgaagttgacactactgatttgtcaataccaaattttgggttaaagtgtttaatttttatgtatttattttcttgttgcctcaaaagatgattgcattctaacttttgtgacctaccaaatttaagatgtgtatacgttgttctttacgttgttctagaaaagagattttaatgctgtagtgactttgctcacttacactagagaaataaacaactttcaatggaagagaattttagtgctttttttttcctaaaatagatattaagctgctgttgtaaagtattgtttgcagctctttccaatatctagagacatttttatttatgaatatttatacaaaaaggaattctgtcaagatgactgctctatatcacttgagaatggcattatttaattaaagaacaaatagcattttttggtagtgcctgtccatacctattgtcattgtttgccttgtaatctgtttttttgaattcattttgggctgatagttttgtttaaggttttggataaggagcactttaaaacaaactggtgtgttgtttttaagttaatcatatgtttaataaatgcgtggtttttgcattcaaacac

SEQ ID NO: 421909 - DNA, 2915 bp, Homo sapiens
aggcaccggggctgcgcgcgcagcggagctcgaaggtcttgtcccccgggggcggtcagcctgggccttggcggccaaggggaaacttgggagcctcgggactgttggccaccggcccgtgggaggagtaaaggcggccctggctggcaggccgagggtgtgacgcgccggcccgccctcctcgcgcagcctccggctaggcggcgaggccgcaggccgcgcccgctccttcagccccgccgccggggaggggtttcccgggacgatccggcccctttcatccaggaagtgaaatcgacgtcggggtcaatgaaaacaaacggggagcccagggggaaggaaggcaggcgaggaagaggcagcgccggggcgccggagggagcagccgggctgcggaagcgcgagcaggaggccggtcgcgggcgcatttttgccgttgtcgcggccgccgccgccgaggcttacccgggaatgtctgggcccgcgcctcgcggcccccaagctccacgctgcgcccgctgtcccggcctctaaaggccgccacgtccctgcggcgcgcgcaggcagaaagcggcttcgtgccggcggagggggcccgggcgggccgggaggggctgccccaggccctgcgcctaccccatcaccgcggccggcgccgggccgggaggatgcgcggtgtggggctctgaagcatggagggggtgttgtacaagtggaccaactatctcacaggctggcagcctcgttggtttgttttagataatggaatcttatcctactatgattcacaagatgatgtttgcaaagggagcaaaggaagcataaagatggcagtttgtgaaattaaagttcattcagcagacaacacaagaatggaattaatcattcctggagagcagcatttctacatgaaggcagtgaatgcagctgaaagacagaggtggctggtcgctctggggagctccaaagcatgtttgactgatacaaggactaaaaaagaaaaagaaataagtgaaaccagtgaatcgctgaaaaccaaaatgtctgaacttcgcctctactgtgacctcttaatgcagcaagttcatacaatacaggaatttgttcaccatgatgagaatcattcatctcctagtgcagagaacatgaatgaagcctcttctctgcttagtgccacgtgtaacacattcatcacaacgcttgaggaatgtgtgaagatagccaatgccaagtttaaacctgagatgtttcaactgcaccatccggatcccttagtttctcctgtgtcaccttctcctgttcaaatgatgaagcgttctgtcagccaccctggttcttgcagttcagagaggagtagccactctataaaagaaccagtatctacacttcaccgactctcccagcgacgccgaagaacctactcagatacagattcttgtagtgatattcctcttgaagacccagataatgtgggtggagaaatgaaggaaagaaaccgggaaggggaagggagaaagaaactttcttgggccaatcaagcaagacctggaagagaagaggaggagaggaggagggttaaagaggttgagtatgtgaaaaaagttatctgaggcaggacctgttcactgttcaaaaaatacacttaatggagatttggcatcagcaaccattcctgaagaaagcagacttatggccaaaaaacaatctgaatcagaagatactcttccatccttctcttcctgaagaaactgaagtgtccaacttcctctaagtattgctatgcaaaagctgctgtaattaaactattgttatagggagtagttttttcccttaggactctgcactttatagaatgttgtaaaacagacaaacaagaaaacaaaccacatacttttgaagtgtattttatctttatatagtttgtttgcaagagtattttcctaataacttcacagtatgaatgtgcatcttttttttttgaacaaatgatggtgtaacattttgacatccataaggacaaatgtagatatttttcttaaaaactctgaggggactgacagcatggtcagggtgtattgtagcttataaacatgaaatcttataaggtttcagtttgacagaagtgtgatatatgtaacttgtgccatggaccaaatggtcactttaccacagctaaaaatgagttacgatagcagcttgatggtgattgtattgtattcctttaatcaaaaaggaaacacaatattctaagtatctttagcccaaataccatgacatattgagcatctttaaataaccagactgtattgtccttcatatgtgaagttgacactactgatttgtcaataccaaattttgggttaaagtgtttaatttttatgtatttattttcttgttgcctcaaaagatgattgcattctaacttttgtgacctaccaaatttaagatgtgtatacgttgttctttacgttgttctagaaaagagattttaatgctgtagtgactttgctcacttacactagagaaataaacaactttcaatggaagagaattttagtgctttttttttcctaaaatagatattaagctgctgttgtaaagtattgtttgcagctctttccaatatctagagacatttttatttatgaatatttatacaaaaaggaattctgtcaagatgactgctctatatcacttgagaatggcattatttaattaaagaacaaatagcattttttggtagtgcctgtccatacctattgtcattgtttgccttgtaatctgtttttttgaattcattttgggctgatagttttgtttaaggttttggataaggagcactttaaaacaaactggtgtgttgtttttaagttaatcatatgtttaataaatgcgtggtttttgcattcaaacac

SEQ ID NO: 421910 - DNA, 2301 bp, Homo sapiens
  misc_feature (15)..(15): n is a, c, g, or t
  misc_feature (41)..(41): n is a, c, g, or t
ttacccgggaatganggggtcagcgccttgtggacaccaancgcactcgtttaagtagagggggctgtgagccgccacgtccctgcggcgcgcgcaggcagaaagcggcttcgtgccggcggagggggcccgggcgggccgggaggggctgccccaggccctgcgcctaccccatcaccgcggccggcgccgggccgggaggatgcgcggtgtggggctctgaagcatggagggggtgttgtacaagtggaccaactatctcacaggctggcagcctcgttggtttgttttagataatggaatcttatcctactatgattcacaagatgatgtttgcaaagggagcaaaggaagcataaagatggcagtttgtgaaattaaagttcattcagcagacaacacaagaatggaattaatcattcctggagagcagcatttctacatgaaggcagtgaatgcagctgaaagacagaggtggctggtcgctctggggagctccaaagcatgtttgactgatacaaggactaaaaaagaaaaagaaataagtgaaaccagtgaatcgctgaaaaccaaaatgtctgaacttcgcctctactgtgacctcttaatgcagcaagttcatacaatacaggaatttgttcaccatgatgagaatcattcatctcctagtgcagagaacatgaatgaagcctcttctctgcttagtgccacgtgtaacacattcatcacaacgcttgaggaatgtgtgaagatagccaatgccaagtttaaacctgagatgtttcaactgcaccatccggatcccttagtttctcctgtgtcaccttctcctgttcaaatgatgaagcgttctgtcagccaccctggttcttgcagttcagagaggagtagccactctataaaagaaccagtatctacacttcaccgactctcccagcgacgccgaagaacctactcagatacagattcttgtagtgatattcctcttgaagacccagatagacctgttcactgttcaaaaaatacacttaatggagatttggcatcagcaaccattcctgaagaaagcagacttatggccaaaaaacaatctgaatcagaagatactcttccatccttctcttcctgaagaaactgaagtgtccaacttcctctaagtattgctatgcaaaagctgctgtaattaaactattgttatagggagtagttttttcccttaggactctgcactttatagaatgttgtaaaacagacaaacaagaaaacaaaccacatacttttgaagtgtattttatctttatatagtttgtttgcaagagtattttcctaataacttcacagtatgaatgtgcatcttttttttttgaacaaatgatggtgtaacattttgacatccataaggacaaatgtagatatttttcttaaaaactctgaggggactgacagcatggtcagggtgtattgtagcttataaacatgaaatcttataaggtttcagtttgacagaagtgtgatatatgtaacttgtgccatggaccaaatggtcactttaccacagctaaaaatgagttacgatagcagcttgatggtgattgtattgtattcctttaatcaaaaaggaaacacaatattctaagtatctttagcccaaataccatgacatattgagcatctttaaataaccagactgtattgtccttcatatgtgaagttgacactactgatttgtcaataccaaattttgggttaaagtgtttaatttttatgtatttattttcttgttgcctcaaaagatgattgcattctaacttttgtgacctaccaaatttaagatgtgtatacgttgttctttacgttgttctagaaaagagattttaatgctgtagtgactttgctcacttacactagagaaataaacaactttcaatggaagagaattttagtgctttttttttcctaaaatagatattaagctgctgttgtaaagtattgtttgcagctctttccaatatctagagacatttttatttatgaatatttatacaaaaaggaattctgtcaagatgactgctctatatcacttgagaatggcattatttaattaaagaacaaatagcattttttggtagtgcctgtccatacctattgtcattgtttgccttgtaatctgtttttttgaattcattttgggctgatagttttgtttaaggttttggataaggagcactttaaaacaaactggtgtgttgtttttaagttaatcatatgtttaataaatgcgtggtttttgcattcaaacac

SEQ ID NO: 421911 - DNA, 2235 bp, Homo sapiens
cggccgcgacaacggcaaaaatgcgcccgcgaccggcctcctgctcgcgcttccgcagcccggctgctccctccggcgccccggcgctgcctctttgcgcctaccccatcaccgcggccggcgccgggccgggaggatgcgcggtgtggggctctgaagcatggagggggtgttgtacaagtggaccaactatctcacaggctggcagcctcgttggtttgttttagataatggaatcttatcctactatgattcacaagatgatgtttgcaaagggagcaaaggaagcataaagatggcagtttgtgaaattaaagttcattcagcagacaacacaagaatggaattaatcattcctggagagcagcatttctacatgaaggcagtgaatgcagctgaaagacagaggtggctggtcgctctggggagctccaaagcatgtttgactgatacaaggactaaaaaagaaaaagaaataagtgaaaccagtgaatcgctgaaaaccaaaatgtctgaacttcgcctctactgtgacctcttaatgcagcaagttcatacaatacaggaatttgttcaccatgatgagaatcattcatctcctagtgcagagaacatgaatgaagcctcttctctgcttagtgccacgtgtaacacattcatcacaacgcttgaggaatgtgtgaagatagccaatgccaagtttaaacctgagatgtttcaactgcaccatccggatcccttagtttctcctgtgtcaccttctcctgttcaaatgatgaagcgttctgtcagccaccctggttcttgcagttcagagaggagtagccactctataaaagaaccagtatctacacttcaccgactctcccagcgacgccgaagaacctactcagatacagattcttgtagtgatattcctcttgaagacccagatagacctgttcactgttcaaaaaatacacttaatggagatttggcatcagcaaccattcctgaagaaagcagacttatggccaaaaaacaatctgaatcagaagatactcttccatccttctcttcctgaagaaactgaagtgtccaacttcctctaagtattgctatgcaaaagctgctgtaattaaactattgttatagggagtagttttttcccttaggactctgcactttatagaatgttgtaaaacagacaaacaagaaaacaaaccacatacttttgaagtgtattttatctttatatagtttgtttgcaagagtattttcctaataacttcacagtatgaatgtgcatcttttttttttgaacaaatgatggtgtaacattttgacatccataaggacaaatgtagatatttttcttaaaaactctgaggggactgacagcatggtcagggtgtattgtagcttataaacatgaaatcttataaggtttcagtttgacagaagtgtgatatatgtaacttgtgccatggaccaaatggtcactttaccacagctaaaaatgagttacgatagcagcttgatggtgattgtattgtattcctttaatcaaaaaggaaacacaatattctaagtatctttagcccaaataccatgacatattgagcatctttaaataaccagactgtattgtccttcatatgtgaagttgacactactgatttgtcaataccaaattttgggttaaagtgtttaatttttatgtatttattttcttgttgcctcaaaagatgattgcattctaacttttgtgacctaccaaatttaagatgtgtatacgttgttctttacgttgttctagaaaagagattttaatgctgtagtgactttgctcacttacactagagaaataaacaactttcaatggaagagaattttagtgctttttttttcctaaaatagatattaagctgctgttgtaaagtattgtttgcagctctttccaatatctagagacatttttatttatgaatatttatacaaaaaggaattctgtcaagatgactgctctatatcacttgagaatggcattatttaattaaagaacaaatagcattttttggtagtgcctgtccatacctattgtcattgtttgccttgtaatctgtttttttgaattcattttgggctgatagttttgtttaaggttttggataaggagcactttaaaacaaactggtgtgttgtttttaagttaatcatatgtttaataaatgcgtggtttttgcattcaaacac

SEQ ID NO: 421912 - DNA, 2352 bp, Homo sapiens
ccaataggcggctctccggctgctaagccgagagggcaggggcgccgtcagtagcaccaccgccttccaagtttccccttgtggatgcgcggccccgcggctctgctcctcccggcgcagaggggccgggagaggccacaggagcggacctggcacgggatttctgaggaacgggagaagactggcgcccgacccgctctggagggtcggtgaacgatgaagggccggcggcggcgacgccgagagtactgcaagttcgcgctgctgttggtgctgtacacgctggtgctgttgctcgtcccctccgtattggacggcggccgcgacggggacaagggcgccgagcactgccccggcctgcagcgcagcctgggagtgtggagcctggaggcggcggcggccggcgaacgcgagcagggagcggaggcgcgggccgccgaggaagggggcgcgaaccagtctcctcggttcccaagcaacctcagcggcgctgtcggggaggcagtgtctcgcgagaagcagcacatctacgtgcatgccacctggcgcaccggctcgtccttcctgggcgaactctttaaccagcacccggacgttttctacttgtatgagcccatgtggcatctatggcaggcgctgtatccgggcgacgccgagagcttgcagggcgcgctgcgcgacatgctgcgttcgctcttccgctgcgacttctccgtgctgcggctgtacgcgccgccgggggaccccgctgcgcgcgccccggacacggccaatcttaccacggccgccctcttccgctggcggactaacaaggtcatctgctcgccgccactgtgtcctggcgcaccccgtgcccgggccgaggtgggcctcgtcgaggacaccgcctgcgagcgcagctgcccacccgtggcgatacgcgccctggaggccgagtgccgaaagtacccggtggtggtcatcaaggacgtgcgcctgctcgatctgggcgtgctggtgcccctgttgcgtgatccaggcctcaacctgaaggtggtgcagcttttccgcgacccgagggcggtgcacaactcgcgcctcaagtctaggcagggactgctgcgcgagagcatccaggtgctgcgcacccgccagaggggcgaccgcttccaccgtgtgctgctggcgcacggcgtgggtgctcgccccgggggccagtctcgcgcgctgcccgccgcgccgcgcgccgatttcttcctgaccggtgcgctcgaggtgatctgcgaagcctggctgcgcgatctgcttttcgcgcgcggcgcgcccgcctggctgcggcgccgctacctgaggctgcgctatgaggacctggtgcggcagccacgcgcccagctgcgccgcctgctgcgcttctccgggctacgcgcgctcgcagcgctcgatgccttcgcgctcaacatgactcgcggcgcggcctacggcgccgaccggcccttccacctgtcagcgcgcgacgcccgggaggcggtgcacgcctggcgcgagcgcctgagccgagagcaggtgcgccaggtggaggccgcctgcgctccagccatgcgtctgctcgcctaccctcgcagcggagaggagggcgacgcggagcagcccagggaaggggagacgccgctggagatggatgccgacggcgccacgtagcctcccatccctgtccccggcacggatccgggtcagtcaccacgaacaggggcactcggcatgctgccccagcactggagaagcagcgctgtgggggcaatctgtcacactctcagagtctgggacttgacttgctaccaacaactgctgtgcaattctgctgagcaggaatatcatgagctgttcaataatgacggacgcattggttgagatgaagtttccagtaaggaagtgacagtgcaatgtggatatttatggctgtaaaataggaagagctttagttcccaggctgaacctgccactgctggagccatttcaacaaggcatcctcacaacaaagaagagatgtgatttggtaccatttcacaccagcaggtgtctggacgaaaacatcaatgtgaataagggccaagtgcagtcctgtcttgattaaattacttaataatattattaaataataataggtctgggcagtattgtttttaacctgactcatccagctgtccttcaaatagctccgtctccctctacccagaactgatttttaaaaagaagtaatttttctccctgggctgggaaaaccctaatgaactgaaacacacttttactttaaaatttttctgtctggcgtttttgtaatcatactattaaatgactctggagtcatgttaatga

SEQ ID NO: 421913 - DNA, 1008 bp, Homo sapiens
agtcaaagcaatgcgcacgcgcagtggctttgaaggcggggcaacaaagcctgtggccgatgtggcgctcctcggcccgcgcttcagtggttatgacagtgttcgctctaaggggagaaggaatgtgtgaccatttccaacggttaacttgcattccccagatagtttggatgagttacaacctaaatctgcaaactcaatacagccagaccctgggaagtgactctctccaagcctcctgtacaagtcccaggaaaagagcctgttttcccttggacatgtgagcagtgaattactgctcattcagaatttcatgtgtatgtgttactgatggccaggtttagagataccaacctatttatttctagaggagaggtgatttgataaccttttcagatatcactatcagtaggcagaaaagggttaatagtatgatagggttaatatgtcctgaggagagtaaagaaattgcaaactgcagaagcacctgatctgtggccctggccagcatctctccatatcctgattctgtaagatcaagtgtttatgcagaaagagaagggactgatgatttgaatgtgaccagatgcagggcatgcccttattgccatgccagcatttgctattcatgatgttagtattcaaaaatcaagaaacacccttcctgggccattggtgtctactaatccattggaagaaaagactggaatccaccacttactagcttcttgggcctcagtcccctcttttctgccatagctaaggaccacctaacctagatggctgttgttattgttcaaagggacatctttagagcctcaagcccaggaatagcccgtggcaggcacctggtaaatgttagttttcattgtcctatcccaacactatgaaacatgcagcactctctgcaactgcccctgtggatttccataggcaggagagtatccagtgttgagtggagctggtattctcagaaacgaagcccctttcctcattttgcgccaatct

SEQ ID NO: 421914 - DNA, 879 bp, Homo sapiens
agtcaaagcaatgcgcacgcgcagtggctttgaaggcggggcaacaaagcctgtggccgatgtggcgctcctcggcccgcgcttcagtggttatgacagtgttcgctctaaggggagaaggaatgtgtgaccatttccaacgagacagagtttcaccatgttgcccagactggtctcaaacacctggattcaagcaatccactcgccttggcctcccaaagtgctgggattacaggtcagtcaccacgaacaggggcactcggcatgctgccccagcactggagaagcagcgctgtgggggcaatctgtcacactctcagagtctgggacttgacttgctaccaacaactgctgtgcaattctgctgagcaggaatatcatgagctgttcaataatgacggacgcattggttgagatgaagtttccagtaaggaagtgacagtgcaatgtggatatttatggctgtaaaataggaagagctttagttcccaggctgaacctgccactgctggagccatttcaacaaggcatcctcacaacaaagaagagatgtgatttggtaccatttcacaccagcaggtgtctggacgaaaacatcaatgtgaataagggccaagtgcagtcctgtcttgattaaattacttaataatattattaaataataataggtctgggcagtattgtttttaacctgactcatccagctgtccttcaaatagctccgtctccctctacccagaactgatttttaaaaagaagtaatttttctccctgggctgggaaaaccctaatgaactgaaacacacttttactttaaaatttttctgtctggcgtttttgtaatcatactattaaatgactctggagtcatgttaatga

SEQ ID NO: 421915 - DNA, 2274 bp, Homo sapiens
ccaataggcggctctccggctgctaagccgagagggcaggggcgccgtcagtagcaccaccgccttccaagtttccccttgtggatgcgcggccccgcggctctgctcctcccggcgcagaggggccgggagaggccacaggagcggacctggcacgggatttctgaggaacgggagaagactggcgcccgacccgctctggagggtcggtgaacgatgaagggccggcggcggcgacgccgagagtactgcaagttcgcgctgctgttggtgctgtacacgctggtgctgttgctcgtcccctccgtattggacggcggccgcgacggggacaagggcgccgagcactgccccggcctgcagcgcagcctgggagtgtggagcctggaggcggcggcggccggcgaacgcgagcagggagcggaggcgcgggccgccgaggaagggggcgcgaaccagtctcctcggttcccaagcaacctcagcggcgctgtcggggaggcagtgtctcgcgagaagcagcacatctacgtgcatgccacctggcgcaccggctcgtccttcctgggcgaactctttaaccagcacccggacgttttctacttgtatgagcccatgtggcatctatggcaggcgctgtatccgggcgacgccgagagcttgcagggcgcgctgcgcgacatgctgcgttcgctcttccgctgcgacttctccgtgctgcggctgtacgcgccgccgggggaccccgctgcgcgcgccccggacacggccaatcttaccacggccgccctcttccgctggcggactaacaaggtcatctgctcgccgccactgtgtcctggcgcaccccgtgcccgggccgaggtgggcctcgtcgaggacaccgcctgcgagcgcagctgcccacccgtggcgatacgcgccctggaggccgagtgccgaaagtacccggtggtggtcatcaaggacgtgcgcctgctcgatctgggcgtgctggtgcccctgttgcgtgatccaggcctcaacctgaaggtggtgcagcttttccgcgacccgagggcggtgcacaactcgcgcctcaagtctaggcagggactgctgcgcgagagcatccaggtgctgcgcacccgccagaggggcgaccgcttccaccgtgtgctgctggcgcacggcgtgggtgctcgccccgggggccagtctcgcgcgctgcccgccgcgccgcgcgccgatttcttcctgaccggtgcgctcgaggtgatctgcgaagcctggctgcgcgatctgcttttcgcgcgcggcgcgcccgcctggctgcggcgccgctacctgaggctgcgctatgaggacctggtgcggcagccacgcgcccagctgcgccgcctgctgcgcttctccgggctacgcgcgctcgcagcgctcgatgccttcgcgctcaacatgactcgcggcgcggcctacggcgccgaccggcccttccacgccgcctgcgctccagccatgcgtctgctcgcctaccctcgcagcggagaggagggcgacgcggagcagcccagggaaggggagacgccgctggagatggatgccgacggcgccacgtagcctcccatccctgtccccggcacggatccgggtcagtcaccacgaacaggggcactcggcatgctgccccagcactggagaagcagcgctgtgggggcaatctgtcacactctcagagtctgggacttgacttgctaccaacaactgctgtgcaattctgctgagcaggaatatcatgagctgttcaataatgacggacgcattggttgagatgaagtttccagtaaggaagtgacagtgcaatgtggatatttatggctgtaaaataggaagagctttagttcccaggctgaacctgccactgctggagccatttcaacaaggcatcctcacaacaaagaagagatgtgatttggtaccatttcacaccagcaggtgtctggacgaaaacatcaatgtgaataagggccaagtgcagtcctgtcttgattaaattacttaataatattattaaataataataggtctgggcagtattgtttttaacctgactcatccagctgtccttcaaatagctccgtctccctctacccagaactgatttttaaaaagaagtaatttttctccctgggctgggaaaaccctaatgaactgaaacacacttttactttaaaatttttctgtctggcgtttttgtaatcatactattaaatgactctggagtcatgttaatga

SEQ ID NO: 421916 - DNA, 746 bp, Homo sapiens
ataaataaaagcaaggagattactaaaaacacactttgcatcctcttgtttctaagctgtatagttctgtgttcttaaaaaggcagttgaaatttctgttaggtggtgatctggcattgatatctttagagaaaaatccttaagtgtgattttaagatggggcagagaaggggttggaggtaggtagtacttttctaggcaaatgttttaaggccacacaagttttttgatagtgtgataacactccctagtttaaaaactttagcaggtgcttgaggaaggggagctcatggcattgtcattttcaatatgaggaagtgttctcaaagttggacttgtcagatttttgtcctttcaccttaaaacaatggtaggtattagggcaacagaagtgatttccccagggtgagaatgaagcataacaatggagtagaagcatttcctttcactttagttgacatgtggaaatccatggattatacaactaggaaagaacagtagagcttcctggagaagaggaggccctcctcaggaaaccctcctattctgtctcagccctagagctggaagtttttcctagattgctctgattgggatatttttgtttccacagccagtgctggtttcgggggtacataggtcacagtttgagttcggaaggcgctttacgcgagatttgggaccagatgtgactggtgtactgcggactgtgtataattcgagtgaagtcagaatctggaggtcgg

SEQ ID NO: 421917 - DNA, 6877 bp, Homo sapiens
gcggggcccaggctgcggctccgctcccggccacggggggcgctgcgctgcgccggtggttggtggtggctgttggggggggtgggggggaacggcggccgcgggtggtgcggagggaggccttgcgggcggatcgggcgcttggcggcggaggtggtgggaggcggcgggcgggagcgcgggtcaggccggccccggcgatggcggacgcggcggcctccccggtgggcaagcggctgctgctgctgttcgcggacactgcggcctcagcctcggcctcggctcccgcggcggcagcggcgagcggagatccggggcctgcgctgcgcactcgagcctggcgggccggcacggtgcgggccatgagcggggcggtgccccaggacctagcgatctttgtagaatttgatggctgtaactggaagcaacactcctgggtaaaagttcatgctgaggaagttattgtgcttctgctggaagggtctcttgtatgggcgccccgtgaggacccagtccttctccagggcattcgagtctccattgcacaatggccagccctgacttttactccccttgtagataaactgggtttgggttctgtggttccagtggaatatcttctggatcgagagcttcggttcctgtcagatgccaatgggttgcatctgtttcagatgggaacagatagccaaaaccagattcttttggaacatgctgcactgagagaaacagttaatgctttgatcagtgaccaaaagctacaagagatattcagccgaggtccctacagtgttcaaggtcacagggtcaaaatatatcagccagagggggaagaagggtggctctatggtgttgtgagccatcaggactccatcactcgtcttatggaggtgtctgtaactgagagtggtgagatcaagtcggtagatcccagactaatccatgtgatgctgatggataattcaacgcctcaaagcgaggggggtacgttaaaagcagtaaaatcttccaaaggaaagaagaagagagaaagcatagaggggaaagatggccggaggaggaaaagtgcttcggactctgggtgtgaccctgcatcaaagaaattaaaaggagacaggggtgaagtagacagtaatgggagcgatggagataaaccgcaacattcgctttgccacttacaccaaagaaaacggcaggactctggtggtgcaggatgagcctgtaggtggggacacacctgcatctttcactccatattctacagccacaggtcagacacctttggccccagaggtgggtggagccgaaaacaaagaggcaggaaaaacactggaacaagttggccagggcatagtggcttccgcagctgtggtcactaccgccagctccaccccaaacacagtgaggatctcagacactggccttgcagcagggactgtgccagaaaaacagaaaggcagccggtcgcaggcctcgggagagaattcaagaaattctattctggcctcttctggatttggagcacctctccctagttcatcgcaacctttgacttttggaagtggaaggagccagtccaatggtgttctagccacagagaacaaacctttgggcttctcttttggctgtagctctgcacaagaggcacagaaagacactgatctctccaaaaacttgttttttcaatgcatgtcccaaactttacctaccagtaactacttcactactgtttcagagagtttggctgatgattcttctagtcgggactcattcaaacaaagccttgagagcctgagctcaggcctgtgtaaaggcagatccgttcttggaacagacactaagccaggctctaaggctggcagctctgtggaccggaaagtgcctgcagagtccatgcccaccctcactccagccttcccacggagcctcctaaatgcccgtaccccagagaatcatgaaaatctatttttacagccccccaaattgtcccgagaagagccttctaatcctttcctggcatttgtggagaaagttgaacacagccctttcagtagttttgcatctcaggcatcaggtagctcctcttctgctaccactgtcacctccaaggtggcacccagctggcccgagtctcactcctctgcagattcggcatctttagcaaagaagaaacccctcttcattacaactgactcctccaagctagtatctggtgttctgggctcagctcttaccagtgggggcccaagcctctctgccatggggaatggccgctccagctcgcccaccagcagcctcactcagcccattgagatgccaactctctcctctagccccacagaggagaggccaactgtggggcctgggcagcaggacaatcccctcctcaaaacctttagtaacgtctttggcaggcactcaggcggctttctgtcctccccggcagatttttcacaggagaacaaagctccttttgaagctgtgaaaaggttctcactggatgaacgaagcttggcttgcagacaagactcggactccagcaccaacagtgacctgtcagatttgagtgactctgaggagcagctgcaggctaagacaggcctgaagggaattccagagcacctgatggggaagctgggccccaatggggagcgcagtgctgagctgttgctgggcaaaagcaaagggaagcaggcccccaagggccggcctcggactgcccccctgaaagttggccagtcagtgctgaaagatgtaagcaaagtgaagaagctgaagcaatctggagagcccttcctgcaggatgggtcatgcatcaatgtggcacctcatctgcacaagtgtcgtgaatgccgcctggagcggtaccggaagtttaaggaacaggagcaagatgattctactgtagcctgccgtttctttcacttccggaggttgatcttcactcgaaaaggggtactccgtgtggaggggtttttaagcccccagcaaagtgaccctgatgccatgaacctgtggattccctcttcctccctagcagaagggatagatctagagacctcaaaatacatcctggccaatgttggggaccagttctgccagctcgtaatgtctgagaaggaggccatgatgatggtggagccacaccagaaagtggcatggaagcgagctgtgcgtggtgtacgggagatgtgtgatgtgtgtgaaacaactctcttcaacatccactgggtttgtcgcaaatgtggatttggggtctgccttgactgttaccggctcaggaaaagccggccacgcagtgagacagaagagatgggtgatgaagaagttttctcctggttgaagtgtgcaaagggacagtcccacgaaccagagaatctcatgcccacacaaattattcctggcacagctctttacaatattggagacatggtacatgctgcccggggcaagtggggaattaaagcaaactgcccttgtatcagtcgacagaacaaatctgtattgagacctgccgtcaccaatgggatgtcacagcttcctagcataaaccctagtgcctcttctggaaacgaaactaccttctctggcggaggaggaccggcaccagtaacaactccagagccggaccatgttcccaaagccgacagcactgacatcagatctgaagagcctctgaaaacagacagttcggcatcaaatagcaatagtgaactgaaagccatcaggcctccttgccctgacacggccccaccctcctccgccctgcactggttggcagatttagcaactcagaaggctaaagaagaaacaaaagaagcagggtccctgaggtcggtgctcaataaagagtctcattcaccctttgggctggactcgttcaactccactgcaaaggtctctccgctgactccaaagctttttaacagtctgttgctgggtcccactgcctccaacaacaaaaccgaagggtctagccttcgagacctccttcactccgggccgggaaaacttcctcaaacccccttggacacaggcataccctttcccccggtcttctctacatcctcagcaggagtgaagagcaaggccagcctacccaactttcttgaccacatcattgcctcagtggtagaaaataagaaaacctcagatgcttcaaagcgggcctgcaacttgactgatacccagaaggaagtgaaggagatggtgatggggttaaatgtgctagatccccatacttctcactcctggctttgtgatgggaggcttctgtgtctccatgaccccagcaacaaaaacaattggaagatcttccgggagtgttggaagcaaggtcagccagtgctggtttcgggggtacataaaaagctcaagtctgagctctggaagccagaagcctttagccaggaatttggagaccaggatgtagacttggtgaactgcaggaactgtgctataatttccgatgtgaaagttcgggatttctgggatggtttcgagatcatatgcaaacgactacggtcagaagatgggcagccaatggtgctcaaactcaaggactggcctcctggggaagattttcgagacatgatgccaaccaggtttgaagatctgatggagaaccttcctctgccagaatataccaaacgagatggcaggctcaatctggcctctaggctacctagctactttgtaaggcctgatctgggccccaagatgtacaacgcctatgggttgataacagcagaagatagaagagttggtacaacaaatcttcacttagatgtgtctgatgctgttaatgtgatggtgtatgttgggattcccatcggggagggtgctcatgatgaagaggtactcaagacaattgacgagggagatgccgatgaggtgacgaagcagaggattcatgatggaaaagagaagccaggtgctttatggcacatctatgcagccaaggatgcagagaagatccgggagctgctccgaaaggttggagaagaacaaggccaagagaacccccctgatcatgacccaattcatgaccaaagttggtacctggaccagaccctccgtaagcgactctatgaggagtatggcgtgcaaggctgggctattgtgcagttcctaggtgatgctgttttcatacctgctggagccccacaccaggttcacaatctatacagttgcataaaagtagcagaagactttgtatctccagaacatgtaaagcactgtttccgcctgactcaggaattcaggcatctctctaacactcatacaaatcatgaggataaactgcaggtgaagaacatcatttaccatgcagtgaaagatgcggttggcaccctcaaggctcatgaatccaaactggcaaggtcctaggcatggagaaactccaagctcctctgtgaagcaggtctttcactcacaacacttaacagggaacggcagggctctttgctggagcagaggcccttcacccagagccagtgtggtcagtattccaaactctccagccactctcttctacgctgcctcaacactgaaggttgacacaggaaagtcgtactgttcacacacacagtttgagactccaagccaagagtgccacatccctatcctgtggccttttggaaatccaaattgcctgaacatggcggggctttcctgcacattctcctgatttgagattcacgggcacacctttcttttcttttcctcttgtgcctagttaagtgggaatgtgtttggagataggggaaatcacataactggtacaagtatggggtaattgcttaaacatgcctggtggaagtctgatagcgtctctgcacgtgacctctgacaaagcccatcccaggagacggggtgaagctattccccacactctcctgtgaacactggagtcttgcaagacccagggagaacccactgcttttcccaggaggctccaggattaggaaatgtgtgtatttagtgaaaaataggtttgtagtgaaatagttactatttcatgaaagtagatatttttagaatttttgaaataccacagttgttttcctggattataaggaaaggcacattacatttagtcttcctttcgatataaaactctttgaagaaatatgatttttagaaatcagctacccattatagcacaaaatcagccaaagcagaatttttaaaaattggcttttttaggattctttttctccccctcccatcttagtcttaccttgagggaacagtcatatgagaaggaactttgtcacatctaagctgtggtgtgttccccatgtgtgtgtacaacactggtgactccaggaaccattttcacctattaccagtgttccctggggactcctcttaatgtttccaaatgggaaggacagttgatttccaacatgaggttttttgttttttatccagaaatattttcagcaaaactttccaactgagtggagtctgattaaggatttatttgaaaatggtgggattcattggcccataggtacattggaaaatgtatatctctccagctgtactgtagtgccctgcaggctgtttatatgttcacagttactttttttttttttttaaataaaagtcatttaatgtagaatacttttaatttcactttctgtattttaattttgttgaagggctgattgggatttccatgttcttattaaaaatctacattcacaacacaacgagaagaaaaaaatttgcgggcgtttgacacgaaagtataacaatggtaggcggcgccagaagaatgactgcgctaggtccaagactcgggataatggtcgtcaccaaaaccgggaccggttaacccagggtggagcgcaggcacggtaacgccggg

SEQ ID NO: 421918 - DNA, 6661 bp, Homo sapiens
cctcccgggttcaacgcgattctgctgcctcggcctcccgtagttagttcggactgcaggcgttgccaccacgcccatatctttgtagaatttgatggctgtaactggaagcaacactcctgggtaaaagttcatgctgaggaagttattgtgcttctgctggaagggtctcttgtatgggcgccccgtgaggacccagtccttctccagggcattcgagtctccattgcacaatggccagccctgacttttactccccttgtagataaactgggtttgggttctgtggttccagtggaatatcttctggatcgagagcttcggttcctgtcagatgccaatgggttgcatctgtttcagatgggaacagatagccaaaaccagattcttttggaacatgctgcactgagagaaacagttaatgctttgatcagtgaccaaaagctacaagagatattcagccgaggtccctacagtgttcaaggtcacagggtcaaaatatatcagccagagggggaagaagggtggctctatggtgttgtgagccatcaggactccatcactcgtcttatggaggtgtctgtaactgagagtggtgagatcaagtcggtagatcccagactaatccatgtgatgctgatggataattcaacgcctcaaagcgaggggggtacgttaaaagcagtaaaatcttccaaaggaaagaagaagagagaaagcatagaggggaaagatggccggaggaggaaaagtgcttcggactctgggtgtgaccctgcatcaaagaaattaaaaggagacaggggtgaagtagacagtaatgggagcgatggaggtgaggcaagccgagggccctggaaaggagggaatgccagtggagagccagggctggatcagagagccaagcagccaccgtctacatttgtcccccagataaaccgcaacattcgctttgccacttacaccaaagaaaacggcaggactctggtggtgcaggatgagcctgtaggtggggacacacctgcatctttcactccatattctacagccacaggtcagacacctttggccccagaggtgggtggagccgaaaacaaagaggcaggaaaaacactggaacaagttggccagggcatagtggcttccgcagctgtggtcactaccgccagctccaccccaaacacagtgaggatctcagacactggccttgcagcagggactgtgccagaaaaacagaaaggcagccggtcgcaggcctcgggagagaattcaagaaattctattctggcctcttctggatttggagcacctctccctagttcatcgcaacctttgacttttggaagtggaaggagccagtccaatggtgttctagccacagagaacaaacctttgggcttctcttttggctgtagctctgcacaagaggcacagaaagacactgatctctccaaaaacttgttttttcaatgcatgtcccaaactttacctaccagtaactacttcactactgtttcagagagtttggctgatgattcttctagtcgggactcattcaaacaaagccttgagagcctgagctcaggcctgtgtaaaggcagatccgttcttggaacagacactaagccaggctctaaggctggcagctctgtggaccggaaagtgcctgcagagtccatgcccaccctcactccagccttcccacggagcctcctaaatgcccgtaccccagagaatcatgaaaatctatttttacagccccccaaattgtcccgagaagagccttctaatcctttcctggcatttgtggagaaagttgaacacagccctttcagtagttttgcatctcaggcatcaggtagctcctcttctgctaccactgtcacctccaaggtggcacccagctggcccgagtctcactcctctgcagattcggcatctttagcaaagaagaaacccctcttcattacaactgactcctccaagctagtatctggtgttctgggctcagctcttaccagtgggggcccaagcctctctgccatggggaatggccgctccagctcgcccaccagcagcctcactcagcccattgagatgccaactctctcctctagccccacagaggagaggccaactgtggggcctgggcagcaggacaatcccctcctcaaaacctttagtaacgtctttggcaggcactcaggcggctttctgtcctccccggcagatttttcacaggagaacaaagctccttttgaagctgtgaaaaggttctcactggatgaacgaagcttggcttgcagacaagactcggactccagcaccaacagtgacctgtcagatttgagtgactctgaggagcagctgcaggctaagacaggcctgaagggaattccagagcacctgatggggaagctgggccccaatggggagcgcagtgctgagctgttgctgggcaaaagcaaagggaagcaggcccccaagggccggcctcggactgcccccctgaaagttggccagtcagtgctgaaagatgtaagcaaagtgaagaagctgaagcaatctggagagcccttcctgcaggatgggtcatgcatcaatgtggcacctcatctgcacaagtgtcgtgaatgccgcctggagcggtaccggaagtttaaggaacaggagcaagatgattctactgtagcctgccgtttctttcacttccggaggttgatcttcactcgaaaaggggtactccgtgtggaggggtttttaagcccccagcaaagtgaccctgatgccatgaacctgtggattccctcttcctccctagcagaagggatagatctagagacctcaaaatacatcctggccaatgttggggaccagttctgccagctcgtaatgtctgagaaggaggccatgatgatggtggagccacaccagaaagtggcatggaagcgagctgtgcgtggtgtacgggagatgtgtgatgtgtgtgaaacaactctcttcaacatccactgggtttgtcgcaaatgtggatttggggtctgccttgactgttaccggctcaggaaaagccggccacgcagtgagacagaagagatgggtgatgaagaagttttctcctggttgaagtgtgcaaagggacagtcccacgaaccagagaatctcatgcccacacaaattattcctggcacagctctttacaatattggagacatggtacatgctgcccggggcaagtggggaattaaagcaaactgcccttgtatcagtcgacagaacaaatctgtattgagacctgccgtcaccaatgggatgtcacagcttcctagcataaaccctagtgcctcttctggaaacgaaactaccttctctggcggaggaggaccggcaccagtaacaactccagagccggaccatgttcccaaagccgacagcactgacatcagatctgaagagcctctgaaaacagacagttcggcatcaaatagcaatagtgaactgaaagccatcaggcctccttgccctgacacggccccaccctcctccgccctgcactggttggcagatttagcaactcagaaggctaaagaagaaacaaaagaagcagggtccctgaggtcggtgctcaataaagagtctcattcaccctttgggctggactcgttcaactccactgcaaaggtctctccgctgactccaaagctttttaacagtctgttgctgggtcccactgcctccaacaacaaaaccgaagggtctagccttcgagacctccttcactccgggccgggaaaacttcctcaaacccccttggacacaggcataccctttcccccggtcttctctacatcctcagcaggagtgaagagcaaggccagcctacccaactttcttgaccacatcattgcctcagtggtagaaaataagaaaacctcagatgcttcaaagcgggcctgcaacttgactgatacccagaaggaagtgaaggagatggtgatggggttaaatgtgctagatccccatacttctcactcctggctttgtgatgggaggcttctgtgtctccatgaccccagcaacaaaaacaattggaagatcttccgggagtgttggaagcaaggtcagccagtgctggtttcgggggtacataaaaagctcaagtctgagctctggaagccagaagcctttagccaggaatttggagaccaggatgtagacttggtgaactgcaggaactgtgctataatttccgatgtgaaagttcgggatttctgggatggtttcgagatcatatgcaaacgactacggtcagaagatgggcagccaatggtgctcaaactcaaggactggcctcctggggaagattttcgagacatgatgccaaccaggtttgaagatctgatggagaaccttcctctgccagaatataccaaacgagatggcaggctcaatctggcctctaggctacctagctactttgtaaggcctgatctgggccccaagatgtacaacgcctatgggttgataacagcagaagatagaagagttggtacaacaaatcttcacttagatgtgtctgatgctgttaatgtgatggtgtatgttgggattcccatcggggagggtgctcatgatgaagaggtactcaagacaattgacgagggagatgccgatgaggtgacgaagcagaggattcatgatggaaaagagaagccaggtgctttatggcacatctatgcagccaaggatgcagagaagatccgggagctgctccgaaaggttggagaagaacaaggccaagagaacccccctgatcatgacccaattcatgaccaaagttggtacctggaccagaccctccgtaagcgactctatgaggagtatggcgtgcaaggctgggctattgtgcagttcctaggtgatgctgttttcatacctgctggagccccacaccaggttcacaatctatacagttgcataaaagtagcagaagactttgtatctccagaacatgtaaagcactgtttccgcctgactcaggaattcaggcatctctctaacactcatacaaatcatgaggataaactgcaggtgaagaacatcatttaccatgcagtgaaagatgcggttggcaccctcaaggctcatgaatccaaactggcaaggtcctaggcatggagaaactccaagctcctctgtgaagcaggtctttcactcacaacacttaacagggaacggcagggctctttgctggagcagaggcccttcacccagagccagtgtggtcagtattccaaactctccagccactctcttctacgctgcctcaacactgaaggttgacacaggaaagtcgtactgttcacacacacagtttgagactccaagccaagagtgccacatccctatcctgtggccttttggaaatccaaattgcctgaacatggcggggctttcctgcacattctcctgatttgagattcacgggcacacctttcttttcttttcctcttgtgcctagttaagtgggaatgtgtttggagataggggaaatcacataactggtacaagtatggggtaattgcttaaacatgcctggtggaagtctgatagcgtctctgcacgtgacctctgacaaagcccatcccaggagacggggtgaagctattccccacactctcctgtgaacactggagtcttgcaagacccagggagaacccactgcttttcccaggaggctccaggattaggaaatgtgtgtatttagtgaaaaataggtttgtagtgaaatagttactatttcatgaaagtagatatttttagaatttttgaaataccacagttgttttcctggattataaggaaaggcacattacatttagtcttcctttcgatataaaactctttgaagaaatatgatttttagaaatcagctacccattatagcacaaaatcagccaaagcagaatttttaaaaattggcttttttaggattctttttctccccctcccatcttagtcttaccttgagggaacagtcatatgagaaggaactttgtcacatctaagctgtggtgtgttccccatgtgtgtgtacaacactggtgactccaggaaccattttcacctattaccagtgttccctggggactcctcttaatgtttccaaatgggaaggacagttgatttccaacatgaggttttttgttttttatccagaaatattttcagcaaaactttccaactgagtggagtctgattaaggatttatttgaaaatggtgggattcattggcccataggtacattggaaaatgtatatctctccagctgtactgtagtgccctgcaggctgtttatatgttcacagttactttttttttttttttaaataaaagtcatttaatgtagaatacttttaatttcactttctgtattttaattttgttgaagggctgattgggatttccatgttcttattaaaaatctacattcacaacacaacgagaagaaaaaaatttgcgggcgtttgacacgaaagtataacaatggtaggcggcgccagaagaatgactgcgctaggtccaagactcgggataatggtcgtcaccaaaaccgggaccggttaacccagggtggagcgcaggcacggtaacgccggg

SEQ ID NO: 421919 - DNA, 7042 bp, Homo sapiens
gcggggcccaggctgcggctccgctcccggccacggggggcgctgcgctgcgccggtggttggtggtggctgttggggggggtgggggggaacggcggccgcgggtggtgcggagggaggccttgcgggcggatcgggcgcttggcggcggaggtggtgggaggcggcgggcgggagcgcgggtcaggccggccccggcgatggcggacgcggcggcctccccggtgggcaagcggctgctgctgctgttcgcggacactgcggcctcagcctcggcctcggctcccgcggcggcagcggcgagcggagatccggggcctgcgctgcgcactcgagcctggcgggccggcacggtgcgggccatgagcggggcggtgccccaggacctagcgatctttgtagaatttgatggctgtaactggaagcaacactcctgggtaaaagttcatgctgaggaagttattgtgcttctgctggaagggtctcttgtatgggcgccccgtgaggacccagtccttctccagggcattcgagtctccattgcacaatggccagccctgacttttactccccttgtagataaactgggtttgggttctgtggttccagtggaatatcttctggatcgagagcttcggttcctgtcagatgccaatgggttgcatctgtttcagatgggaacagatagccaaaaccagattcttttggaacatgctgcactgagagaaacagttaatgctttgatcagtgaccaaaagctacaagagatattcagccgaggtccctacagtgttcaaggtcacagggtcaaaatatatcagccagagggggaagaagggtggctctatggtgttgtgagccatcaggactccatcactcgtcttatggaggtgtctgtaactgagagtggtgagatcaagtcggtagatcccagactaatccatgtgatgctgatggataattcaacgcctcaaagcgaggggggtacgttaaaagcagtaaaatcttccaaaggaaagaagaagagagaaagcatagaggggaaagatggccggaggaggaaaagtgcttcggactctgggtgtgaccctgcatcaaagaaattaaaaggagacaggggtgaagtagacagtaatgggagcgatggaggtgaggcaagccgagggccctggaaaggagggaatgccagtggagagccagggctggaactcagaagcaggcgcaaagccgaggcccaaacccgggtcagataaccacattacatggatcccccctcacaaagacaaataaaaaacccaggcaaaaccaattacccggacattttcaggcaccaaccttttaacaaccaaagaaaacggcaggactctggtggtgcaggatgagcctgtaggtggggacacacctgcatctttcactccatattctacagccacaggtcagacacctttggccccagaggtgggtggagccgaaaacaaagaggcaggaaaaacactggaacaagttggccagggcatagtggcttccgcagctgtggtcactaccgccagctccaccccaaacacagtgaggatctcagacactggccttgcagcagggactgtgccagaaaaacagaaaggcagccggtcgcaggcctcgggagagaattcaagaaattctattctggcctcttctggatttggagcacctctccctagttcatcgcaacctttgacttttggaagtggaaggagccagtccaatggtgttctagccacagagaacaaacctttgggcttctcttttggctgtagctctgcacaagaggcacagaaagacactgatctctccaaaaacttgttttttcaatgcatgtcccaaactttacctaccagtaactacttcactactgtttcagagagtttggctgatgattcttctagtcgggactcattcaaacaaagccttgagagcctgagctcaggcctgtgtaaaggcagatccgttcttggaacagacactaagccaggctctaaggctggcagctctgtggaccggaaagtgcctgcagagtccatgcccaccctcactccagccttcccacggagcctcctaaatgcccgtaccccagagaatcatgaaaatctatttttacagccccccaaattgtcccgagaagagccttctaatcctttcctggcatttgtggagaaagttgaacacagccctttcagtagttttgcatctcaggcatcaggtagctcctcttctgctaccactgtcacctccaaggtggcacccagctggcccgagtctcactcctctgcagattcggcatctttagcaaagaagaaacccctcttcattacaactgactcctccaagctagtatctggtgttctgggctcagctcttaccagtgggggcccaagcctctctgccatggggaatggccgctccagctcgcccaccagcagcctcactcagcccattgagatgccaactctctcctctagccccacagaggagaggccaactgtggggcctgggcagcaggacaatcccctcctcaaaacctttagtaacgtctttggcaggcactcaggcggctttctgtcctccccggcagatttttcacaggagaacaaagctccttttgaagctgtgaaaaggttctcactggatgaacgaagcttggcttgcagacaagactcggactccagcaccaacagtgacctgtcagatttgagtgactctgaggagcagctgcaggctaagacaggcctgaagggaattccagagcacctgatggggaagctgggccccaatggggagcgcagtgctgagctgttgctgggcaaaagcaaagggaagcaggcccccaagggccggcctcggactgcccccctgaaagttggccagtcagtgctgaaagatgtaagcaaagtgaagaagctgaagcaatctggagagcccttcctgcaggatgggtcatgcatcaatgtggcacctcatctgcacaagtgtcgtgaatgccgcctggagcggtaccggaagtttaaggaacaggagcaagatgattctactgtagcctgccgtttctttcacttccggaggttgatcttcactcgaaaaggggtactccgtgtggaggggtttttaagcccccagcaaagtgaccctgatgccatgaacctgtggattccctcttcctccctagcagaagggatagatctagagacctcaaaatacatcctggccaatgttggggaccagttctgccagctcgtaatgtctgagaaggaggccatgatgatggtggagccacaccagaaagtggcatggaagcgagctgtgcgtggtgtacgggagatgtgtgatgtgtgtgaaacaactctcttcaacatccactgggtttgtcgcaaatgtggatttggggtctgccttgactgttaccggctcaggaaaagccggccacgcagtgagacagaagagatgggtgatgaagaagttttctcctggttgaagtgtgcaaagggacagtcccacgaaccagagaatctcatgcccacacaaattattcctggcacagctctttacaatattggagacatggtacatgctgcccggggcaagtggggaattaaagcaaactgcccttgtatcagtcgacagaacaaatctgtattgagacctgccgtcaccaatgggatgtcacagcttcctagcataaaccctagtgcctcttctggaaacgaaactaccttctctggcggaggaggaccggcaccagtaacaactccagagccggaccatgttcccaaagccgacagcactgacatcagatctgaagagcctctgaaaacagacagttcggcatcaaatagcaatagtgaactgaaagccatcaggcctccttgccctgacacggccccaccctcctccgccctgcactggttggcagatttagcaactcagaaggctaaagaagaaacaaaagaagcagggtccctgaggtcggtgctcaataaagagtctcattcaccctttgggctggactcgttcaactccactgcaaaggtctctccgctgactccaaagctttttaacagtctgttgctgggtcccactgcctccaacaacaaaaccgaagggtctagccttcgagacctccttcactccgggccgggaaaacttcctcaaacccccttggacacaggcataccctttcccccggtcttctctacatcctcagcaggagtgaagagcaaggccagcctacccaactttcttgaccacatcattgcctcagtggtagaaaataagaaaacctcagatgcttcaaagcgggcctgcaacttgactgatacccagaaggaagtgaaggagatggtgatggggttaaatgtgctagatccccatacttctcactcctggctttgtgatgggaggcttctgtgtctccatgaccccagcaacaaaaacaattggaagatcttccgggagtgttggaagcaaggtcagccagtgctggtttcgggggtacataaaaagctcaagtctgagctctggaagccagaagcctttagccaggaatttggagaccaggatgtagacttggtgaactgcaggaactgtgctataatttccgatgtgaaagttcgggatttctgggatggtttcgagatcatatgcaaacgactacggtcagaagatgggcagccaatggtgctcaaactcaaggactggcctcctggggaagattttcgagacatgatgccaaccaggtttgaagatctgatggagaaccttcctctgccagaatataccaaacgagatggcaggctcaatctggcctctaggctacctagctactttgtaaggcctgatctgggccccaagatgtacaacgcctatgggttgataacagcagaagatagaagagttggtacaacaaatcttcacttagatgtgtctgatgctgttaatgtgatggtgtatgttgggattcccatcggggagggtgctcatgatgaagaggtactcaagacaattgacgagggagatgccgatgaggtgacgaagcagaggattcatgatggaaaagagaagccaggtgctttatggcacatctatgcagccaaggatgcagagaagatccgggagctgctccgaaaggttggagaagaacaaggccaagagaacccccctgatcatgacccaattcatgaccaaagttggtacctggaccagaccctccgtaagcgactctatgaggagtatggcgtgcaaggctgggctattgtgcagttcctaggtgatgctgttttcatacctgctggagccccacaccaggttcacaatctatacagttgcataaaagtagcagaagactttgtatctccagaacatgtaaagcactgtttccgcctgactcaggaattcaggcatctctctaacactcatacaaatcatgaggataaactgcaggtgaagaacatcatttaccatgcagtgaaagatgcggttggcaccctcaaggctcatgaatccaaactggcaaggtcctaggcatggagaaactccaagctcctctgtgaagcaggtctttcactcacaacacttaacagggaacggcagggctctttgctggagcagaggcccttcacccagagccagtgtggtcagtattccaaactctccagccactctcttctacgctgcctcaacactgaaggttgacacaggaaagtcgtactgttcacacacacagtttgagactccaagccaagagtgccacatccctatcctgtggccttttggaaatccaaattgcctgaacatggcggggctttcctgcacattctcctgatttgagattcacgggcacacctttcttttcttttcctcttgtgcctagttaagtgggaatgtgtttggagataggggaaatcacataactggtacaagtatggggtaattgcttaaacatgcctggtggaagtctgatagcgtctctgcacgtgacctctgacaaagcccatcccaggagacggggtgaagctattccccacactctcctgtgaacactggagtcttgcaagacccagggagaacccactgcttttcccaggaggctccaggattaggaaatgtgtgtatttagtgaaaaataggtttgtagtgaaatagttactatttcatgaaagtagatatttttagaatttttgaaataccacagttgttttcctggattataaggaaaggcacattacatttagtcttcctttcgatataaaactctttgaagaaatatgatttttagaaatcagctacccattatagcacaaaatcagccaaagcagaatttttaaaaattggcttttttaggattctttttctccccctcccatcttagtcttaccttgagggaacagtcatatgagaaggaactttgtcacatctaagctgtggtgtgttccccatgtgtgtgtacaacactggtgactccaggaaccattttcacctattaccagtgttccctggggactcctcttaatgtttccaaatgggaaggacagttgatttccaacatgaggttttttgttttttatccagaaatattttcagcaaaactttccaactgagtggagtctgattaaggatttatttgaaaatggtgggattcattggcccataggtacattggaaaatgtatatctctccagctgtactgtagtgccctgcaggctgtttatatgttcacagttactttttttttttttttaaataaaagtcatttaatgtagaatacttttaatttcactttctgtattttaattttgttgaagggctgattgggatttccatgttcttattaaaaatctacattcacaacacaacgagaagaaaaaaatttgcgggcgtttgacacgaaagtataacaatggtaggcggcgccagaagaatgactgcgctaggtccaagactcgggataatggtcgtcaccaaaaccgggaccggttaacccagggtggagcgcaggcacggtaacgccggg

SEQ ID NO: 421920 - DNA, 4651 bp, Homo sapiens
gcggggcccaggctgcggctccgctcccggccacggggggcgctgcgctgcgccggtggttggtggtggctgttggggggggtgggggggaacggcggccgcgggtggtgcggagggaggccttgcgggcggatcgggcgcttggcggcggaggtggtgggaggcggcgggcgggagcgcgggtcaggccggccccggcgatggcggacgcggcggcctccccggtgggcaagcggctgctgctgctgttcgcggacactgcggcctcagcctcggcctcggctcccgcggcggcagcggcgagcggagatccggggcctgcgctgcgcactcgagcctggcgggccggcacggtgcgggccatgagcggggcggtgccccaggacctagcgatctttgtagaatttgatggctgtaactggaagcaacactcctgggtaaaagttcatgctgaggaagttattgtgcttctgctggaagggtctcttgtatgggcgccccgtgaggacccagtccttctccagggcattcgagtctccattgcacaatggccagccctgacttttactccccttgtagataaactgggtttgggttctgtggttccagtggaatatcttctggatcgagagcttcggttcctgtcagatgccaatgggttgcatctgtttcagatgggaacagatagccaaaaccagattcttttggaacatgctgcactgagagaaacagttaatgctttgatcagtgaccaaaagctacaagagatattcagccgaggtccctacagtgttcaaggtcacagggtcaaaatatatcagccagagggggaagaagggtggctctatggtgttgtgagccatcaggactccatcactcgtaatgtctgagaaggaggccatgatgatggtggagccacaccagaaagtggcatggaagcgagctgtgcgtggtgtacgggagatgtgtgatgtgtgtgaaacaactctcttcaacatccactgggtttgtcgcaaatgtggatttggggtctgccttgactgttaccggctcaggaaaagccggccacgcagtgagacagaagagatgggtgatgaagaagttttctcctggttgaagtgtgcaaagggacagtcccacgaaccagagaatctcatgcccacacaaattattcctggcacagctctttacaatattggagacatggtacatgctgcccggggcaagtggggaattaaagcaaactgcccttgtatcagtcgacagaacaaatctgtattgagacctgccgtcaccaatgggatgtcacagcttcctagcataaaccctagtgcctcttctggaaacgaaactaccttctctggcggaggaggaccggcaccagtaacaactccagagccggaccatgttcccaaagccgacagcactgacatcagatctgaagagcctctgaaaacagacagttcggcatcaaatagcaatagtgaactgaaagccatcaggcctccttgccctgacacggccccaccctcctccgccctgcactggttggcagatttagcaactcagaaggctaaagaagaaacaaaagaagcagggtccctgaggtcggtgctcaataaagagtctcattcaccctttgggctggactcgttcaactccactgcaaaggtctctccgctgactccaaagctttttaacagtctgttgctgggtcccactgcctccaacaacaaaaccgaagggtctagccttcgagacctccttcactccgggccgggaaaacttcctcaaacccccttggacacaggcataccctttcccccggtcttctctacatcctcagcaggagtgaagagcaaggccagcctacccaactttcttgaccacatcattgcctcagtggtagaaaataagaaaacctcagatgcttcaaagcgggcctgcaacttgactgatacccagaaggaagtgaaggagatggtgatggggttaaatgtgctagatccccatacttctcactcctggctttgtgatgggaggcttctgtgtctccatgaccccagcaacaaaaacaattggaagatcttccgggagtgttggaagcaaggtcagccagtgctggtttcgggggtacataaaaagctcaagtctgagctctggaagccagaagcctttagccaggaatttggagaccaggatgtagacttggtgaactgcaggaactgtgctataatttccgatgtgaaagttcgggatttctgggatggtttcgagatcatatgcaaacgactacggtcagaagatgggcagccaatggtgctcaaactcaaggactggcctcctggggaagattttcgagacatgatgccaaccaggtttgaagatctgatggagaaccttcctctgccagaatataccaaacgagatggcaggctcaatctggcctctaggctacctagctactttgtaaggcctgatctgggccccaagatgtacaacgcctatgggttgataacagcagaagatagaagagttggtacaacaaatcttcacttagatgtgtctgatgctgttaatgtgatggtgtatgttgggattcccatcggggagggtgctcatgatgaagaggtactcaagacaattgacgagggagatgccgatgaggtgacgaagcagaggattcatgatggaaaagagaagccaggtgctttatggcacatctatgcagccaaggatgcagagaagatccgggagctgctccgaaaggttggagaagaacaaggccaagagaacccccctgatcatgacccaattcatgaccaaagttggtacctggaccagaccctccgtaagcgactctatgaggagtatggcgtgcaaggctgggctattgtgcagttcctaggtgatgctgttttcatacctgctggagccccacaccaggttcacaatctatacagttgcataaaagtagcagaagactttgtatctccagaacatgtaaagcactgtttccgcctgactcaggaattcaggcatctctctaacactcatacaaatcatgaggataaactgcaggtgaagaacatcatttaccatgcagtgaaagatgcggttggcaccctcaaggctcatgaatccaaactggcaaggtcctaggcatggagaaactccaagctcctctgtgaagcaggtctttcactcacaacacttaacagggaacggcagggctctttgctggagcagaggcccttcacccagagccagtgtggtcagtattccaaactctccagccactctcttctacgctgcctcaacactgaaggttgacacaggaaagtcgtactgttcacacacacagtttgagactccaagccaagagtgccacatccctatcctgtggccttttggaaatccaaattgcctgaacatggcggggctttcctgcacattctcctgatttgagattcacgggcacacctttcttttcttttcctcttgtgcctagttaagtgggaatgtgtttggagataggggaaatcacataactggtacaagtatggggtaattgcttaaacatgcctggtggaagtctgatagcgtctctgcacgtgacctctgacaaagcccatcccaggagacggggtgaagctattccccacactctcctgtgaacactggagtcttgcaagacccagggagaacccactgcttttcccaggaggctccaggattaggaaatgtgtgtatttagtgaaaaataggtttgtagtgaaatagttactatttcatgaaagtagatatttttagaatttttgaaataccacagttgttttcctggattataaggaaaggcacattacatttagtcttcctttcgatataaaactctttgaagaaatatgatttttagaaatcagctacccattatagcacaaaatcagccaaagcagaatttttaaaaattggcttttttaggattctttttctccccctcccatcttagtcttaccttgagggaacagtcatatgagaaggaactttgtcacatctaagctgtggtgtgttccccatgtgtgtgtacaacactggtgactccaggaaccattttcacctattaccagtgttccctggggactcctcttaatgtttccaaatgggaaggacagttgatttccaacatgaggttttttgttttttatccagaaatattttcagcaaaactttccaactgagtggagtctgattaaggatttatttgaaaatggtgggattcattggcccataggtacattggaaaatgtatatctctccagctgtactgtagtgccctgcaggctgtttatatgttcacagttactttttttttttttttaaataaaagtcatttaatgtagaatacttttaatttcactttctgtattttaattttgttgaagggctgattgggatttccatgttcttattaaaaatctacattcacaacacaacgagaagaaaaaaatttgcgggcgtttgacacgaaagtataacaatggtaggcggcgccagaagaatgactgcgctaggtccaagactcgggataatggtcgtcaccaaaaccgggaccggttaacccagggtggagcgcaggcacggtaacgccggg

SEQ ID NO: 421921 - DNA, 6406 bp, Homo sapiens
gcggggcccaggctgcggctccgctcccggccacggggggcgctgcgctgcgccggtggttggtggtggctgttggggggggtgggggggaacggcggccgcgggtggtgcggagggaggccttgcgggcggatcgggcgcttggcggcggaggtggtgggaggcggcgggcgggagcgcgggtcaggccggccccggcgatggcggacgcggcggcctccccggtgggcaagcggctgctgctgctgttcgcggacactgcggcctcagcctcggcctcggctcccgcggcggcagcggcgagcggagatccggggcctgcgctgcgcactcgagcctggcgggccggcacggtgcgggccatgagcggggcggtgccccaggacctagcgatctttgtagaatttgatggctgtaactggaagcaacactcctgggtaaaagttcatgctgaggaagttattgtgcttctgctggaagggtctcttgtatgggcgccccgtgaggacccagtccttctccagggcattcgagtctccattgcacaatggccagccctgacttttactccccttgtagataaactgggtttgggttctgtggttccagtggaatatcttctggatcgagagcttcggttcctgtcagatgccaatgggttgcatctgtttcagatgggaacagatagccaaaaccagattcttttggaacatgctgcactgagagaaacagttaatgctttgatcagtgaccaaaagctacaagagatattcagccgaggtccctacagtgttcaaggtcacagggtcaaaatatatcagccagagggggaagaagggtggctctatggtgttgtgagccatcaggactccatcactcgtcttatggaggtgtctgtaactgagagtggtgagatcaagtcggtagatcccagactaatccatgtgatgctgatggataattcaacgcctcaaagcgaggggggtacgttaaaagcagtaaaatcttccaaaggaaagaagaagagagaaagcatagaggggaaagatggccggaggaggaaaagtgcttcggactctgggtgtgaccctgcatcaaagaaattaaaaggagacaggggtgaagtagacagtaatgggagcgatggaggtgaggcaagccgagggccctggaaaggagggaatgccagtggagagccagggctggatcagagagccaagcagccaccgtctacatttgtcccccagataaaccgcaacattcgctttgccacttacaccaaagaaaacggcaggactctggtggtgcaggatgagcctgtaggtggggacacacctgcatctttcactccatattctacagccacaggtcagacacctttggccccagaggtgggtggagccgaaaacaaagaggcaggaaaaacactggaacaagttggccagggcatagtggcttccgcagctgtggtcactaccgccagctccaccccaaacacagtgaggatctcagacactggccttgcagcagggactgtgccagaaaaacagaaaggcagccggtcgcaggcctcgggagagaattcaagaaattctattctggcctcttctggatttggagcacctctccctagttcatcgcaacctttgacttttggaagtggaaggagccagtccaatggtgttctagccacagagaacaaacctttgggcttctcttttggctgtagctctgcacaagaggcacagaaagacactgatctctccaaaaacttgttttttcaatgcatgtcccaaactttacctaccagtaactacttcactactgtttcagagagtttggctgatgattcttctagtcgggactcattcaaacaaagccttgagagcctgagctcaggcctgtgtaaaggcagatccgttcttggaacagacactaagccaggctctaaggctggcagctctgtggaccggaaagtgcctgcagagtccatgcccaccctcactccagccttcccacggagcctcctaaatgcccgtaccccagagaatcatgaaaatctatttttacagccccccaaattgtcccgagaagagccttctaatcctttcctggcatttgtggagaaagttgaacacagccctttcagtagttttgcatctcaggcatcaggtagctcctcttctgctaccactgtcacctccaaggtggcacccagctggcccgagtctcactcctctgcagattcggcatctttagcaaagaagaaacccctcttcattacaactgactcctccaagctagtatctggtgttctgggctcagctcttaccagtgggggcccaagcctctctgccatggggaatggccgctccagctcgcccaccagcagcctcactcagcccattgagatgccaactctctcctctagccccacagaggagaggccaactgtggggcctgggcagcaggacaatcccctcctcaaaacctttagtaacgtctttggcaggcactcaggcggctttctgtcctccccggcagatttttcacaggagaacaaagctccttttgaagctgtgaaaaggttctcactggatgaacgaagcttggcttgcagacaagactcggactccagcaccaacagtgacctgtcagatttgagtgactctgaggagcagctgcaggctaagacaggcctgaagggaattccagagcacctgatggggaagctgggccccaatggggagcgcagtgctgagctgttgctgggcaaaagcaaagggaagcaggcccccaagggccggcctcggactgcccccctgaaagttggccagtcagtgctgaaagatgtaagcaaagtgaagaagctgaagcaatctggagagcccttcctgcaggatgggtcatgcatcaatgtggcacctcatctgcacaagtgtcgtgaatgccgcctggagcggtaccggaagtttaaggaacaggagcaagatgattctactgtagcctgccgtttctttcacttccggaggttgatcttcactcgaaaaggggtactccgtgtggaggggtttttaagcccccagcaaagtgaccctgatgccatgaacctgtggattccctcttcctccctagcagaagggatagatctagagacctcaaaatacatcctggccaatgttggggaccagttctgccagctcgtaatgtctgagaaggaggccatgatgatggtggagccacaccagaaagtggcatggaagcgagctgtgcgtggtgtacgggagatgtgtgatgtgtgtgaaacaactctcttcaacatccactgggtttgtcgcaaatgtggatttggggtctgccttgactgttaccggctcaggaaaagccggccacgcagtgagacagaagagatgggtgatgaagaagttttctcctggttgaagtgtgcaaagggacagtcccacgaaccagagaatctcatgcccacacaaattattcctggcacagctctttacaatattggagacatggtacatgctgcccggggcaagtggggaattaaagcaaactgcccttgtatcagtcgacagaacaaatctgtattgagacctgccgtcaccaatgggatgtcacagcttcctagcataaaccctagtgcctcttctggaaacgaaactaccttctctggcggaggaggaccggcaccagtaacaactccagagccggaccatgttcccaaagccgacagcactgacatcagatctgaagagcctctgaaaacagacagttcggcatcaaatagcaatagtgaactgaaagccatcaggcctccttgccctgacacggccccaccctcctccgccctgcactggttggcagatttagcaactcagaaggctaaagaagaaacaaaagaagcagggtccctgaggtcggtgctcaataaagagtctcattcaccctttgggctggactcgttcaactccactgcaaaggtctctccgctgactccaaagctttttaacagtctgttgctgggtcccactgcctccaacaacaaaaccgaagggtctagccttcgagacctccttcactccgggccgggaaaacttcctcaaacccccttggacacaggcataccctttcccccggtcttctctacatcctcagcaggagtgaagagcaaggccagcctacccaactttcttgaccacatcattgcctcagtggtagaaaataagaaaacctcagatgcttcaaagcgggcctgcaacttgactgatacccagaaggaagtgaaggagatggtgatggggttaaatgtgctagatccccatacttctcactcctggctttgtgatgggaggcttctgtgtctccatgaccccagcaacaaaaacaattggaagatcttccgggagtgttggaagcaaggtcagccagtgctggtttcgggggtacataaaaagctcaagtctgagctctggaagccagaagcctttagccaggaatttggagaccagggttggagaagaacaaggccaagagaacccccctgatcatgacccaattcatgaccaaagttggtacctggaccagaccctccgtaagcgactctatgaggagtatggcgtgcaaggctgggctattgtgcagttcctaggtgatgctgttttcatacctgctggagccccacaccaggttcacaatctatacagttgcataaaagtagcagaagactttgtatctccagaacatgtaaagcactgtttccgcctgactcaggaattcaggcatctctctaacactcatacaaatcatgaggataaactgcaggtgaagaacatcatttaccatgcagtgaaagatgcggttggcaccctcaaggctcatgaatccaaactggcaaggtcctaggcatggagaaactccaagctcctctgtgaagcaggtctttcactcacaacacttaacagggaacggcagggctctttgctggagcagaggcccttcacccagagccagtgtggtcagtattccaaactctccagccactctcttctacgctgcctcaacactgaaggttgacacaggaaagtcgtactgttcacacacacagtttgagactccaagccaagagtgccacatccctatcctgtggccttttggaaatccaaattgcctgaacatggcggggctttcctgcacattctcctgatttgagattcacgggcacacctttcttttcttttcctcttgtgcctagttaagtgggaatgtgtttggagataggggaaatcacataactggtacaagtatggggtaattgcttaaacatgcctggtggaagtctgatagcgtctctgcacgtgacctctgacaaagcccatcccaggagacggggtgaagctattccccacactctcctgtgaacactggagtcttgcaagacccagggagaacccactgcttttcccaggaggctccaggattaggaaatgtgtgtatttagtgaaaaataggtttgtagtgaaatagttactatttcatgaaagtagatatttttagaatttttgaaataccacagttgttttcctggattataaggaaaggcacattacatttagtcttcctttcgatataaaactctttgaagaaatatgatttttagaaatcagctacccattatagcacaaaatcagccaaagcagaatttttaaaaattggcttttttaggattctttttctccccctcccatcttagtcttaccttgagggaacagtcatatgagaaggaactttgtcacatctaagctgtggtgtgttccccatgtgtgtgtacaacactggtgactccaggaaccattttcacctattaccagtgttccctggggactcctcttaatgtttccaaatgggaaggacagttgatttccaacatgaggttttttgttttttatccagaaatattttcagcaaaactttccaactgagtggagtctgattaaggatttatttgaaaatggtgggattcattggcccataggtacattggaaaatgtatatctctccagctgtactgtagtgccctgcaggctgtttatatgttcacagttactttttttttttttttaaataaaagtcatttaatgtagaatacttttaatttcactttctgtattttaattttgttgaagggctgattgggatttccatgttcttattaaaaatctacattcacaacacaacgagaagaaaaaaatttgcgggcgtttgacacgaaagtataacaatggtaggcggcgccagaagaatgactgcgctaggtccaagactcgggataatggtcgtcaccaaaaccgggaccggttaacccagggtggagcgcaggcacggtaacgccggg

SEQ ID NO: 421922 - DNA, 2025 bp, Homo sapiens
ggccggtcctacgcttataagtgacgggagatgccgatgaggtgacgaagcagaggattcatgatggaaaagagaagccaggtgctttatggcacatctatgcagccaaggatgcagagaagatccgggagctgctccgaaaggttggagaagaacaaggccaagagaacccccctgatcatgacccaattcatgaccaaagttggtacctggaccagaccctccgtaagcgactctatgaggagtatggcgtgcaaggctgggctattgtgcagttcctaggtgatgctgttttcatacctgctggagccccacaccaggttcacaatctatacagttgcataaaagtagcagaagactttgtatctccagaacatgtaaagcactgtttccgcctgactcaggaattcaggcatctctctaacactcatacaaatcatgaggataaactgcaggtgaagaacatcatttaccatgcagtgaaagatgcggttggcaccctcaaggctcatgaatccaaactggcaaggtcctaggcatggagaaactccaagctcctctgtgaagcaggtctttcactcacaacacttaacagggaacggcagggctctttgctggagcagaggcccttcacccagagccagtgtggtcagtattccaaactctccagccactctcttctacgctgcctcaacactgaaggttgacacaggaaagtcgtactgttcacacacacagtttgagactccaagccaagagtgccacatccctatcctgtggccttttggaaatccaaattgcctgaacatggcggggctttcctgcacattctcctgatttgagattcacgggcacacctttcttttcttttcctcttgtgcctagttaagtgggaatgtgtttggagataggggaaatcacataactggtacaagtatggggtaattgcttaaacatgcctggtggaagtctgatagcgtctctgcacgtgacctctgacaaagcccatcccaggagacggggtgaagctattccccacactctcctgtgaacactggagtcttgcaagacccagggagaacccactgcttttcccaggaggctccaggattaggaaatgtgtgtatttagtgaaaaataggtttgtagtgaaatagttactatttcatgaaagtagatatttttagaatttttgaaataccacagttgttttcctggattataaggaaaggcacattacatttagtcttcctttcgatataaaactctttgaagaaatatgatttttagaaatcagctacccattatagcacaaaatcagccaaagcagaatttttaaaaattggcttttttaggattctttttctccccctcccatcttagtcttaccttgagggaacagtcatatgagaaggaactttgtcacatctaagctgtggtgtgttccccatgtgtgtgtacaacactggtgactccaggaaccattttcacctattaccagtgttccctggggactcctcttaatgtttccaaatgggaaggacagttgatttccaacatgaggttttttgttttttatccagaaatattttcagcaaaactttccaactgagtggagtctgattaaggatttatttgaaaatggtgggattcattggcccataggtacattggaaaatgtatatctctccagctgtactgtagtgccctgcaggctgtttatatgttcacagttactttttttttttttttaaataaaagtcatttaatgtagaatacttttaatttcactttctgtattttaattttgttgaagggctgattgggatttccatgttcttattaaaaatctacattcacaacacaacgagaagaaaaaaatttgcgggcgtttgacacgaaagtataacaatggtaggcggcgccagaagaatgactgcgctaggtccaagactcgggataatggtcgtcaccaaaaccgggaccggttaacccagggtggagcgcaggcacggtaacgccggg

SEQ ID NO: 421923 - DNA, 6467 bp, Homo sapiens
gcggggcccaggctgcggctccgctcccggccacggggggcgctgcgctgcgccggtggttggtggtggctgttggggggggtgggggggaacggcggccgcgggtggtgcggagggaggccttgcgggcggatcgggcgcttggcggcggaggtggtgggaggcggcgggcgggagcgcgggtcaggccggccccggcgatggcggacgcggcggcctccccggtgggcaagcggctgctgctgctgttcgcggacactgcggcctcagcctcggcctcggctcccgcggcggcagcggcgagcggagatccggggcctgcgctgcgcactcgagcctggcgggccggcacggtgcgggccatgagcggggcggtgccccaggacctagcgatctttgtagaatttgatggctgtaactggaagcaacactcctgggtaaaagttcatgctgaggaagttattgtgcttctgctggaagggtctcttgtatgggcgccccgtgaggacccagtccttctccagggcattcgagtctccattgcacaatggccagccctgacttttactccccttgtagataaactgggtttgggttctgtggttccagtggaatatcttctggatcgagagcttcggttcctgtcagatgccaatgggttgcatctgtttcagatgggaacagatagccaaaaccagattcttttggaacatgctgcactgagagaaacagttaatgctttgatcagtgaccaaaagctacaagagatattcagccgaggtccctacagtgttcaaggtcacagggtcaaaatatatcagccagagggggaagaagggtggctctatggtgttgtgagccatcaggactccatcactcgtcttatggaggtgtctgtaactgagagtggtgagatcaagtcggtagatcccagactaatccatgtgatgctgatggataattcaacgcctcaaagcgaggggggtacgttaaaagcagtaaaatcttccaaaggaaagaagaagagagaaagcatagaggggaaagatggccggaggaggaaaagtgcttcggactctgggtgtgaccctgcatcaaagaaattaaaaggagacaggggtgaagtagacagtaatgggagcgatggaggtgaggcaagccgagggccctggaaaggagggaatgccagtggagagccagggctggatcagagagccaagcagccaccgtctacatttgtcccccagataaaccgcaacattcgctttgccacttacaccaaagaaaacggcaggactctggtggtgcaggatgagcctgtaggtggggacacacctgcatctttcactccatattctacagccacaggtcagacacctttggccccagaggtgggtggagccgaaaacaaagaggcaggaaaaacactggaacaagttggccagggcatagtggcttccgcagctgtggtcactaccgccagctccaccccaaacacagtgaggatctcagacactggccttgcagcagggactgtgccagaaaaacagaaaggcagccggtcgcaggcctcgggagagaattcaagaaattctattctggcctcttctggatttggagcacctctccctagttcatcgcaacctttgacttttggaagtggaaggagccagtccaatggtgttctagccacagagaacaaacctttgggcttctcttttggctgtagctctgcacaagaggcacagaaagacactgatctctccaaaaacttgttttttcaatgcatgtcccaaactttacctaccagtaactacttcactactgtttcagagagtttggctgatgattcttctagtcgggactcattcaaacaaagccttgagagcctgagctcaggcctgtgtaaaggcagatccgttcttggaacagacactaagccaggctctaaggctggcagctctgtggaccggaaagtgcctgcagagtccatgcccaccctcactccagccttcccacggagcctcctaaatgcccgtaccccagagaatcatgaaaatctatttttacagccccccaaattgtcccgagaagagccttctaatcctttcctggcatttgtggagaaagttgaacacagccctttcagtagttttgcatctcaggcatcaggtagctcctcttctgctaccactgtcacctccaaggtggcacccagctggcccgagtctcactcctctgcagattcggcatctttagcaaagaagaaacccctcttcattacaactgactcctccaagctagtatctggtgttctgggctcagctcttaccagtgggggcccaagcctctctgccatggggaatggccgctccagctcgcccaccagcagcctcactcagcccattgagatgccaactctctcctctagccccacagaggagaggccaactgtggggcctgggcagcaggacaatcccctcctcaaaacctttagtaacgtctttggcaggcactcaggcggctttctgtcctccccggcagatttttcacaggagaacaaagctccttttgaagctgtgaaaaggttctcactggatgaacgaagcttggcttgcagacaagactcggactccagcaccaacagtgacctgtcagatttgagtgactctgaggagcagctgcaggctaagacaggcctgaagggaattccagagcacctgatggggaagctgggccccaatggggagcgcagtgctgagctgttgctgggcaaaagcaaagggaagcaggcccccaagggccggcctcggactgcccccctgaaagttggccagtcagtgctgaaagatgtaagcaaagtgaagaagctgaagcaatctggagagcccttcctgcaggatgggtcatgcatcaatgtggcacctcatctgcacaagtgtcgtgaatgccgcctggagcggtaccggaagtttaaggaacaggagcaagatgattctactgtagcctgccgtttctttcacttccggaggttgatcttcactcgaaaaggggtactccgtgtggaggggtttttaagcccccagcaaagtgaccctgatgccatgaacctgtggattccctcttcctccctagcagaagggatagatctagagacctcaaaatacatcctggccaatgttggggaccagttctgccagctcgtaatgtctgagaaggaggccatgatgatggtggagccacaccagaaagtggcatggaagcgagctgtgcgtggtgtacgggagatgtgtgatgtgtgtgaaacaactctcttcaacatccactgggtttgtcgcaaatgtggatttggggtctgccttgactgttaccggctcaggaaaagccggccacgcagtgagacagaagagatgggtgatgaagaagttttctcctggttgaagtgtgcaaagggacagtcccacgaaccagagaatctcatgcccacacaaattattcctggcacagctctttacaatattggagacatggtacatgctgcccggggcaagtggggaattaaagcaaactgcccttgtatcagtcgacagaacaaatctgtattgagacctgccgtcaccaatgggatgtcacagcttcctagcataaaccctagtgcctcttctggaaacgaaactaccttctctggcggaggaggaccggcaccagtaacaactccagagccggaccatgttcccaaagccgacagcactgacatcagatctgaagagcctctgaaaacagacagttcggcatcaaatagcaatagtgaactgaaagccatcaggcctccttgccctgacacggccccaccctcctccgccctgcactggttggcagatttagcaactcagaaggctaaagaagaaacaaaagaagcagggtccctgaggtcggtgctcaataaagagtctcattcaccctttgggctggactcgttcaactccactgcaaaggtctctccgctgactccaaagctttttaacagtctgttgctgggtcccactgcctccaacaacaaaaccgaagggtctagccttcgagacctccttcactccgggccgggaaaacttcctcaaacccccttggacacaggcataccctttcccccggtcttctctacatcctcagcaggagtgaagagcaaggccagcctacccaactttcttgaccacatcattgcctcagtggtagaaaataagaaaacctcagatgcttcaaagcgggcctgcaacttgactgatacccagaaggaagtgaaggagatggtgatggggttaaatgtgctagatccccatacttctcactcctggctttgtgatgggaggcttctgtgtctccatgaccccagcaacaaaaacaattggaagatcttccgggagtgttggaagcaaggtcagccagtgctggtttcgggggtacataaaaagctcaagtctgagctctggaagccagaagcctttagccaggaatttggagaccaggatgtagacttggtgaactgcaggaactgtgctataatttccgatgtgaaagttcgggatttctgggatggtttcgagatcatatgcaaacgactacggtcagaagatgggcagccaatggtgctcaaactcaaggactggcctcctggggaagattttcgagacatgatgccaaccaggtttgaagatctgatggagaaccttcctctgccagaatataccaaacgagatggcaggctcaatctggcctctaggctacctagctactttgtaaggcctgatctgggccccaagatgtacaacgcctatgggttgataacagcagaagatagaagagttggtacaacaaatcttcacttagatgtgtctgatgctgttaatgtgatggtgtatgttgggattcccatcggggagggtgctcatgatgaagaggtactcaagacaattgacgagggagatgccgatgaggtgacgaagcagaggattcatgaatccaaactggcaaggtcctaggcatggagaaactccaagctcctctgtgaagcaggtctttcactcacaacacttaacagggaacggcagggctctttgctggagcagaggcccttcacccagagccagtgtggtcagtattccaaactctccagccactctcttctacgctgcctcaacactgaaggttgacacaggaaagtcgtactgttcacacacacagtttgagactccaagccaagagtgccacatccctatcctgtggccttttggaaatcccacacctttcttttcttttcctcttgtgcctagttaagtgggaatgtgtttggagataggggaaatcacataactggtacaagtatggggtaattgcttaaacatgcctggtggaagtctgatagcgtctctgcacgtgacctctgacaaagcccatcccaggagacggggtgaagctattccccacactctcctgtgaacactggagtcttgcaagacccagggagaacccactgcttttcccaggaggctccaggattaggaaatgtgtgtatttagtgaaaaataggtttgtagtgaaatagttactatttcatgaaagtagatatttttagaatttttgaaataccacagttgttttcctggattataaggaaaggcacattacatttagtcttcctttcgatataaaactctttgaagaaatatgatttttagaaatcagctacccattatagcacaaaatcagccaaagcagaatttttaaaaattggcttttttaggattctttttctccccctcccatcttagtcttaccttgagggaacagtcatatgagaaggaactttgtcacatctaagctgtggtgtgttccccatgtgtgtgtacaacactggtgactccaggaaccattttcacctattaccagtgttccctggggactcctcttaatgtttccaaatgggaaggacagttgatttccaacatgaggttttttgttttttatccagaaatattttcagcaaaactttccaactgagtggagtctgattaaggatttatttgaaaatggtgggattcattggcccataggtacattggaaaatgtatatctctccagctgtactgtagtgccctgcaggctgtttatatgttcacagttactttttttttttttttaaataaaagtcatttaatgtagaatacttttaatttcactttctgtattttaattttgttgaagggctgattgggatttccatgttcttattaaaaatctacattcacaacacaacgagaagaaaaaaatttgcgggcgtttgacacgaaagtataacaatggtaggcggcgccagaagaatgactgcgctaggtccaagactcgggataatggtcgtcaccaaaaccgggaccggttaacccagggtggagcgcaggcacggtaacgccggg

SEQ ID NO: 421924 - DNA, 6653 bp, Homo sapiens
gcggggcccaggctgcggctccgctcccggccacggggggcgctgcgctgcgccggtggttggtggtggctgttggggggggtgggggggaacggcggccgcgggtggtgcggagggaggccttgcgggcggatcgggcgcttggcggcggaggtggtgggaggcggcgggcgggagcgcgggtcaggccggccccggcgatggcggacgcggcggcctccccggtgggcaagcggctgctgctgctgttcgcggacactgcggcctcagcctcggcctcggctcccgcggcggcagcggcgagcggagatccggggcctgcgctgcgcactcgagcctggcgggccggcacggtgcgggccatgagcggggcggtgccccaggacctagcgatctttgtagaatttgatggctgtaactggaagcaacactcctgggtaaaagttcatgctgaggaagttattgtgcttctgctggaagggtctcttgtatgggcgccccgtgaggacccagtccttctccagggcattcgagtctccattgcacaatggccagccctgacttttactccccttgtagataaactgggtttgggttctgtggttccagtggaatatcttctggatcgagagcttcggttcctgtcagatgccaatgggttgcatctgtttcagatgggaacagatagccaaaaccagattcttttggaacatgctgcactgagagaaacagttaatgctttgatcagtgaccaaaagctacaagagatattcagccgaggtccctacagtgttcaaggtcacagggtcaaaatatatcagccagagggggaagaagggtggctctatggtgttgtgagccatcaggactccatcactcgtcttatggaggtgtctgtaactgagagtggtgagatcaagtcggtagatcccagactaatccatgtgatgctgatggataattcaacgcctcaaagcgaggggggtacgttaaaagcagtaaaatcttccaaaggaaagaagaagagagaaagcatagaggggaaagatggccggaggaggaaaagtgcttcggactctgggtgtgaccctgcatcaaagaaattaaaaggagacaggggtgaagtagacagtaatgggagcgatggaggtgaggcaagccgagggccctggaaaggagggaatgccagtggagagccagggctggatcagagagccaagcagccaccgtctacatttgtcccccagataaaccgcaacattcgctttgccacttacaccaaagaaaacggcaggactctggtggtgcaggatgagcctgtaggtggggacacacctgcatctttcactccatattctacagccacaggtcagacacctttggccccagaggtgggtggagccgaaaacaaagaggcaggaaaaacactggaacaagttggccagggcatagtggcttccgcagctgtggtcactaccgccagctccaccccaaacacagtgaggatctcagacactggccttgcagcagggactgtgccagaaaaacagaaaggcagccggtcgcaggcctcgggagagaattcaagaaattctattctggcctcttctggatttggagcacctctccctagttcatcgcaacctttgacttttggaagtggaaggagccagtccaatggtgttctagccacagagaacaaacctttgggcttctcttttggctgtagctctgcacaagaggcacagaaagacactgatctctccaaaaacttgttttttcaatgcatgtcccaaactttacctaccagtaactacttcactactgtttcagagagtttggctgatgattcttctagtcgggactcattcaaacaaagccttgagagcctgagctcaggcctgtgtaaaggcagatccgttcttggaacagacactaagccaggctctaaggctggcagctctgtggaccggaaagtgcctgcagagtccatgcccaccctcactccagccttcccacggagcctcctaaatgcccgtaccccagagaatcatgaaaatctatttttacagccccccaaattgtcccgagaagagccttctaatcctttcctggcatttgtggagaaagttgaacacagccctttcagtagttttgcatctcaggcatcaggtagctcctcttctgctaccactgtcacctccaaggtggcacccagctggcccgagtctcactcctctgcagattcggcatctttagcaaagaagaaacccctcttcattacaactgactcctccaagctagtatctggtgttctgggctcagctcttaccagtgggggcccaagcctctctgccatggggaatggccgctccagctcgcccaccagcagcctcactcagcccattgagatgccaactctctcctctagccccacagaggagaggccaactgtggggcctgggcagcaggacaatcccctcctcaaaacctttagtaacgtctttggcaggcactcaggcggctttctgtcctccccggcagatttttcacaggagaacaaagctccttttgaagctgtgaaaaggttctcactggatgaacgaagcttggcttgcagacaagactcggactccagcaccaacagtgacctgtcagatttgagtgactctgaggagcagctgcaggctaagacaggcctgaagggaattccagagcacctgatggggaagctgggccccaatggggagcgcagtgctgagctgttgctgggcaaaagcaaagggaagcaggcccccaagggccggcctcggactgcccccctgaaagttggccagtcagtgctgaaagatgtaagcaaagtgaagaagctgaagcaatctggagagcccttcctgcaggatgggtcatgcatcaatgtggcacctcatctgcacaagtgtcgtgaatgccgcctggagcggtaccggaagtttaaggaacaggagcaagatgattctactgtagcctgccgtttctttcacttccggaggttgatcttcactcgaaaaggggtactccgtgtggaggggtttttaagcccccagcaaagtgaccctgatgccatgaacctgtggattccctcttcctccctagcagaagggatagatctagagacctcaaaatacatcctggccaatgttggggaccagttctgccagctcgtaatgtctgagaaggaggccatgatgatggtggagccacaccagaaagtggcatggaagcgagctgtgcgtggtgtacgggagatgtgtgatgtgtgtgaaacaactctcttcaacatccactgggtttgtcgcaaatgtggatttggggtctgccttgactgttaccggctcaggaaaagccggccacgcagtgagacagaagagatgggtgatgaagaagttttctcctggttgaagtgtgcaaagggacagtcccacgaaccagagaatctcatgcccacacaaattattcctggcacagctctttacaatattggagacatggtacatgctgcccggggcaagtggggaattaaagcaaactgcccttgtatcagtcgacagaacaaatctgtattgagacctgccgtcaccaatgggatgtcacagcttcctagcataaaccctagtgcctcttctggaaacgaaactaccttctctggcggaggaggaccggcaccagtaacaactccagagccggaccatgttcccaaagccgacagcactgacatcagatctgaagagcctctgaaaacagacagttcggcatcaaatagcaatagtgaactgaaagccatcaggcctccttgccctgacacggccccaccctcctccgccctgcactggttggcagatttagcaactcagaaggctaaagaagaaacaaaagaagcagggtccctgaggtcggtgctcaataaagagtctcattcaccctttgggctggactcgttcaactccactgcaaaggtctctccgctgactccaaagctttttaacagtctgttgctgggtcccactgcctccaacaacaaaaccgaagggtctagccttcgagacctccttcactccgggccgggaaaacttcctcaaacccccttggacacaggcataccctttcccccggtcttctctacatcctcagcaggagtgaagagcaaggccagcctacccaactttcttgaccacatcattgcctcagtggtagaaaataagaaaacctcagatgcttcaaagcgggcctgcaacttgactgatacccagaaggaagtgaaggagatggtgatggggttaaatgtgctagatccccatacttctcactcctggctttgtgatgggaggcttctgtgtctccatgaccccagcaacaaaaacaattggaagatcttccgggagtgttggaagcaaggtcagccagtgctggtttcgggggtacataaaaagctcaagtctgagctctggaagccagaagcctttagccaggaatttggagaccaggatgtagacttggtgaactgcaggaactgtgctataatttccgatgtgaaagttcgggatttctgggatggtttcgagatcatatgcaaacgactacggtcagaagatgggcagccaatggtgctcaaactcaaggactggcctcctggggaagattttcgagacatgatgccaaccaggtttgaagatctgatggagaaccttcctctgccagaatataccaaacgagatggcaggctcaatctggcctctaggctacctagctactttgtaaggcctgatctgggccccaagatgtacaacgcctatgggttgataacagcagaagatagaagagttggtacaacaaatcttcacttagatgtgtctgatgctgttaatgtgatggtgtatgttgggattcccatcggggagggtgctcatgatgaagaggtactcaagacaattgacgagggagatgccgatgaggtgacgaagcagaggattcatgatggaaaagagaagccaggtgctttatggcacatctatgcagccaaggatgcagagaagatccgggagctgctccgaaaggttggagaagaacaaggccaagagaacccccctgatcatgacccaattcatgaccaaagttggtacctggaccagaccctccgtaagcgactctatgaggagtatggcgtgcaaggctgggctattgtgcagttcctaggtgatgctgttttcatacctgctggagccccacaccaggttcacaatctatacagttgcataaaagtagcagaagactttgtatctccagaacatgtaaagcactgtttccgcctgactcaggaattcaggcatctctctaacactcatacaaatcatgaggataaactgcaggtgaagaacatcatttaccatgcagtgaaagatgcggttggcaccctcaaggctcatgaatccaaactggcaaggtcctaggcatggagaaactccaagctcctctgtgaagcaggtctttcactcacaacacttaacagggaacggcagggctctttgctggagcagaggcccttcacccagagccagtgtggtcagtattccaaactctccagccactctcttctacgctgcctcaacactgaaggttgacacaggaaagtcgtactgttcacacacacagtttgagactccaagccaagagtgccacatccctatcctgtggccttttggaaatccaaattgcctgaacatggcggggctttcctgcacattctcctgatttgagattcacgggcacacctttcttttcttttcctcttgtgcctagttaagtgggaatgtgtttggagataggggaaatcacataactggtacaagtatggggtaattgcttaaacatgcctggtggaagtctgatagcgtctctgcacgtgacctctgacaaagcccatcccaggagacggggtgaagctattccccacactctcctgtgaacactggagtcttgcaagacccagggagaacccactgcttttcccaggaggctccaggattaggaaatgtgtgtatttagtgaaaaataggtttgtagtgaaatagttactatttcatgaaagtagatatttttagaatttttgaaataccacagttgttttcctggattataaggaaaggcacattacatttagtcttcctttcgatataaaactctttgaagaaatatgatttttagaaatcagctacccattatagcacaaaatcagccaaagcagaatttttaaaaattggcttttttaggattctttttctccccctcccatcttagtcttaccttgagggaacagtcatatgagaaggaactttgtcacatctaagctgtggtgtgttccccatgtgtgtgtacaacactggtgactccaggaaccattttcacctattaccagtgttccctggggactcctcttaatgtttccaaatgggaaggacagttgatttccaacatgaggttttttgttttttatccagaaatattttcagcaaaactttccaactgagtggagtctgattaaggatttatttgaaaatggtgggattcattggcccataggtacattgggacagttcctttttttttttttataagaa

SEQ ID NO: 421925 - DNA, 5600 bp, Homo sapiens
gcggggcccaggctgcggctccgctcccggccacggggggcgctgcgctgcgccggtggttggtggtggctgttggggggggtgggggggaacggcggccgcgggtggtgcggagggaggccttgcgggcggatcgggcgcttggcggcggaggtggtgggaggcggcgggcgggagcgcgggtcaggccggccccggcgatggcggacgcggcggcctccccggtgggcaagcggctgctgctgctgttcgcggacactgcggcctcagcctcggcctcggctcccgcggcggcagcggcgagcggagatccggggcctgcgctgcgcactcgagcctggcgggccggcacggtgcgggccatgagcggggcggtgccccaggacctagcgatctttgtagaatttgatggctgtaactggaagcaacactcctgggtaaaagttcatgctgaggaagttattgtgcttctgctggaagggtctcttgtatgggcgccccgtgaggacccagtccttctccagggcattcgagtctccattgcacaatggccagccctgacttttactccccttgtagataaactgggtttgggttctgtggttccagtggaatatcttctggatcgagagcttcggttcctgtcagatgccaatgggttgcatctgtttcagatgggaacagatagccaaaaccagattcttttggaacatgctgcactgagagaaacagttaatgctttgatcagtgaccaaaagctacaagagatattcagccgaggtccctacagtgttcaaggtcacagggtcaaaatatatcagccagagggggaagaagggtggctctatggtgttgtgagccatcaggactccatcactcgtcttatggaggtgtctgtaactgagagtggtgagatcaagtcggtagatcccagactaatccatgtgatgctgatggataattcaacgcctcaaagcgaggggggtacgttaaaagcagtaaaatcttccaaaggaaagaagaagagagaaagcatagaggggaaagatggccggaggaggaaaagtgcttcggactctgggtgtgaccctgcatcaaagaaattaaaaggagacaggggtgaagtagacagtaatgggagcgatggaggtgaggcaagccgagggccctggaaaggagggaatgccagtggagagccagggctggatcagagagccaagcagccaccgtctacatttgtcccccagataaaccgcaacattcgctttgccacttacaccaaagaaaacggcaggactctggtggtgcaggatgagcctgtaggtggggacacacctgcatctttcactccatattctacagccacaggtcagacacctttggccccagaggtgggtggagccgaaaacaaagaggcaggaaaaacactggaacaagttggccagggcatagtggcttccgcagctgtggtcactaccgccagctccaccccaaacacagtgaggatctcagacactggccttgcagcagggactgtgccagaaaaacagaaaggcagccggtcgcaggcctcgggagagaattcaagaaattctattctggcctcttctggatttggagcacctctccctagttcatcgcaacctttgacttttggaagtggaaggagccagtccaatggtgttctagccacagagaacaaacctttgggcttctcttttggctgtagctctgcacaagaggcacagaaagacactgatctctccaaaaacttgttttttcaatgcatgtcccaaactttacctaccagtaactacttcactactgtttcagagagtttggctgatgattcttctagtcgggactcattcaaacaaagccttgagagcctgagctcaggcctgtgtaaaggcagatccgttcttggaacagacactaagccaggctctaaggctggcagctctgtggaccggaaagtgcctgcagagtccatgcccaccctcactccagccttcccacggagcctcctaaatgcccgtaccccagagaatcatgaaaatctatttttacagccccccaaattgtcccgagaagagccttctaatcctttcctggcatttgtggagaaagttgaacacagccctttcagtagttttgcatctcaggcatcaggtagctcctcttctgctaccactgtcacctccaaggtggcacccagctggcccgagtctcactcctctgcagattcggcatctttagcaaagaagaaacccctcttcattacaactgactcctccaagctagtatctggtgttctgggctcagctcttaccagtgggggcccaagcctctctgccatggggaatggccgctccagctcgcccaccagcagcctcactcagcccattgagatgccaactctctcctctagccccacagaggagaggccaactgtggggcctgggcagcaggacaatcccctcctcaaaacctttagtaacgtctttggcaggcactcaggcggctttctgtcctccccggcagatttttcacaggagaacaaagctccttttgaagctgtgaaaaggttctcactggatgaacgaagcttggcttgcagacaagactcggactccagcaccaacagtgacctgtcagatttgagtgactctgaggagcagctgcaggctaagacaggcctgaagggaattccagagcacctgatggggaagctgggccccaatggggagcgcagtgctgagctgttgctgggcaaaagcaaagggaagcaggcccccaagggccggcctcggactgcccccctgaaagttggccagtcagtgctgaaagatgtaagcaaagtgaagaagctgaagcaatctggagagcccttcctgcaggatgggtcatgcatcaatgtggcacctcatctgcacaagtgtcgtgaatgccgcctggagcggtaccggaagtttaaggaacaggagcaagatgattctactgtagcctgccgtttctttcacttccggaggttgatcttcactcgaaaaggggtactccgtgtggaggggtttttaagcccccagcaaagtgaccctgatgccatgaacctgtggattccctcttcctccctagcagaagggatagatctagagacctcaaaatacatcctggccaatgttggggaccagttctgccagctcgtaatgtctgagaaggaggccatgatgatggtggagccacaccagaaagtggcatggaagcgagctgtgcgtggtgtacgggagatgtgtgatgtgtgtgaaacaactctcttcaacatccactgggtttgtcgcaaatgtggatttggggtctgccttgactgttaccggctcaggaaaagccggccacgcagtgagacagaagagatgggtgatgaagaagttttctcctggttgaagtgtgcaaagggacagtcccacgaaccagagaatctcatgcccacacaaattattcctggcacagctctttacaatattggagacatggtacatgctgcccggggcaagtggggaattaaagcaaactgcccttgtatcagtcgacagaacaaatctgtattgagacctgccgtcaccaatgggatgtcacagcttcctagcataaaccctagtgcctcttctggaaacgaaactaccttctctggcggaggaggaccggcaccagtaacaactccagagccggaccatgttcccaaagccgacagcactgacatcagatctgaagagcctctgaaaacagacagttcggcatcaaatagcaatagtgaactgaaagccatcaggcctccttgccctgacacggccccaccctcctccgccctgcactggttggcagatttagcaactcagaaggctaaagaagaaacaaaagaagcagggtccctgaggtcggtgctcaataaagagtctcattcaccctttgggctggactcgttcaactccactgcaaaggtctctccgctgactccaaagctttttaacagtctgttgctgggtcccactgcctccaacaacaaaaccgaagggtctagccttcgagacctccttcactccgggccgggaaaacttcctcaaacccccttggacacaggcataccctttcccccggtcttctctacatcctcagcaggagtgaagagcaaggccagcctacccaactttcttgaccacatcattgcctcagtggtagaaaataagaaaacctcagatgcttcaaagcgggcctgcaacttgactgatacccagaaggaagtgaaggagatggtgatggggttaaatgtgctagatccccatacttctcactcctggctttgtgatgggaggcttctgtgtctccatgaccccagcaacaaaaacaattggaagatcttccgggagtgttggaagcaaggtcagccagtgctggtttcgggggtacataaaaagctcaagtctgagctctggaagccagaagcctttagccaggaatttggagaccaggatgtagacttggtgaactgcaggaactgtgctataatttccgatgtgaaagttcgggatttctgggatggtttcgagatcatatgcagtaagtagctttcatatctagttcagtgatagcagactggaaaataagccatctatacgcccagctctgcccttgaataataaattatattctggggcataatgggacttgaaaaaataaatgaataaaaaattaaaaacagacagccgggcgtggttgctcgctcctgtaatttcagtctttttggaggctgatgtgtggatcacttggggtcaggagttcaagaccagcctggccaacttagcgaaaccccacctctactaaaaatacaaaaattagctgggtatggtggtgtgtgcctataatcccagctactcaggaggctgaggcaggacagtcacttgaacccaggaggcagaggttgcagtgagccaagatggcaccactgctctccagcctcggtgatggagtgagactgtctcaaaaataaataaataaataaatccaaattatacccacttggtgggggaacattctgccctggtgccaactgtgtagcttacatggcaatcacatgactcccagagcatgcctggacttaatcatgtgattccatgggctatgcagagcactttcactctgaggaatggggatagaatccccgtaagatggaaaaataagacacacactaaagtagcaagtgaggaaaacaaagcccaccttgtccattatgggggtttacaagtctgaaataaaaggttaatctcccagggccaggcacggtggctcacacctgtaatcccgggacccagggcagtacgcgagtcggatcgatagcacaagttgaaagagctagagagcatcatcatttaacggtgcaggaatcctatatctacttggcatacatggcaataccccgtgtatgctggcaaaaaccctattagtgccaggtattgctgctggttgagctaataaccatgtaatgcacggagatgcgggtgatcccgggagccaagatagtgccacatcactcagcccgaacgacaccc

SEQ ID NO: 421926 - DNA, 3481 bp, Homo sapiens
gcggggcccaggctgcggctccgctcccggccacggggggcgctgcgctgcgccggtggttggtggtggctgttggggggggtgggggggaacggcggccgcgggtggtgcggagggaggccttgcgggcggatcgggcgcttggcggcggaggtggtgggaggcggcgggcgggagcgcgggtcaggccggccccggcgatggcggacgcggcggcctccccggtgggcaagcggctgctgctgctgttcgcggacactgcggcctcagcctcggcctcggctcccgcggcggcagcggcgagcggagatccggggcctgcgctgcgcactcgagcctggcgggccggcacggtgcgggccatgagcggggcggtgccccaggacctagcgatctttgtagaatttgatggctgtaactggaagcaacactcctgggtaaaagttcatgctgaggaagttattgtgcttctgctggaagggtctcttgtatgggcgccccgtgaggacccagtccttctccagggcattcgagtctccattgcacaatggccagccctgacttttactccccttgtagataaactgggtttgggttctgtggttccagtggaatatcttctggatcgagagcttcggttcctgtcagatgccaatgggttgcatctgtttcagatgggaacagatagccaaaaccagattcttttggaacatgctgcactgagagaaacagttaatgctttgatcagtgaccaaaagctacaagagatattcagccgaggtccctacagtgttcaaggtcacagggtcaaaatatatcagccagagggggaagaagggtggctctatggtgttgtgagccatcaggactccatcactcgtcttatggaggtgtctgtaactgagagtggtgagatcaagtcggtagatcccagactaatccatgtgatgctgatggataattcaacgcctcaaagcgaggggggtacgttaaaagcagtaaaatcttccaaaggaaagaagaagagagaaagcatagaggggaaagatggccggaggaggaaaagtgcttcggactctgggtgtgaccctgcatcaaagaaattaaaaggagacaggggtgaagtagacagtaatgggagcgatggaggtgaggcaagccgagggccctggaaaggagggaatgccagtggagagccagggctggatcagagagccaagcagccaccgtctacatttgtcccccagataaaccgcaacattcgctttgccacttacaccaaagaaaacggcaggactctggtggtgcaggatgagcctgtaggtggggacacacctgcatctttcactccatattctacagccacaggtcagacacctttggccccagaggtgggtggagccgaaaacaaagaggcaggaaaaacactggaacaagttggccagggcatagtggcttccgcagctgtggtcactaccgccagctccaccccaaacacagtgaggatctcagacactggccttgcagcagggactgtgccagaaaaacagaaaggcagccggtcgcaggcctcgggagagaattcaagaaattctattctggcctcttctggatttggagcacctctccctagttcatcgcaacctttgacttttggaagtggaaggagccagtccaatggtgttctagccacagagaacaaacctttgggcttctcttttggctgtagctctgcacaagaggcacagaaagacactgatctctccaaaaacttgttttttcaatgcatgtcccaaactttacctaccagtaactacttcactactgtttcagagagtttggctgatgattcttctagtcgggactcattcaaacaaagccttgagagcctgagctcaggcctgtgtaaaggcagatccgttcttggaacagacactaagccaggctctaaggctggcagctctgtggaccggaaagtgcctgcagagtccatgcccaccctcactccagccttcccacggagcctcctaaatgcccgtaccccagagaatcatgaaaatctatttttacagccccccaaattgtcccgagaagagccttctaatcctttcctggcatttgtggagaaagttgaacacagccctttcagtagttttgcatctcaggcatcaggtagctcctcttctgctaccactgtcacctccaaggtggcacccagctggcccgagtctcactcctctgcagattcggcatctttagcaaagaagaaacccctcttcattacaactgactcctccaagctagtatctggtgttctgggctcagctcttaccagtgggggcccaagcctctctgccatggggaatggccgctccagctcgcccaccagcagcctcactcagcccattgagatgccaactctctcctctagccccacagaggagaggccaactgtggggcctgggcagcaggacaatcccctcctcaaaacctttagtaacgtctttggcaggcactcaggcggctttctgtcctccccggcagatttttcacaggagaacaaagctccttttgaagctgtgaaaaggttctcactggatgaacgaagcttggcttgcagacaagactcggactccagcaccaacagtgacctgtcagatttgagtgactctgaggagcagctgcaggctaagacaggcctgaagggaattccagagcacctgatggggaagctgggccccaatggggagcgcagtgctgagctgttgctgggcaaaagcaaagggaagcaggcccccaagggccggcctcggactgcccccctgaaagttggccagtcagtgctgaaagatgtaagcaaagtgaagaagctgaagcaatctggagagcccttcctgcaggatgggtcatgcatcaatgtggcacctcatctgcacaagtgtcgtgaatgccgcctggagcggtaccggaagtttaaggaacaggagcaagatgattctactgtagcctgccgtttctttcacttccggaggttgatcttcactcgaaaaggggtactccgtgtggaggggtttttaagcccccagcaaagtgaccctgatgccatgaacctgtggattccctcttcctccctagcagaagggatagatctagagacctcaaaatacatcctggccaatgttggggaccagttctgccagctcgtaatgtctgagaaggaggccatgatgatggtggagccacaccagaaagtggcatggaagcgagctgtgcgtggtgtacgggagatgtgtgatgtgtgtgaaacaactctcttcaacatccactgggtttgtcgcaaatgtggatttggggtctgccttgactgttaccggctcaggaaaagccggccacgcagtgagacagaagagataggtgatgtataagtgttaaactgcgtcaagtgagcacatagtcatgctcatagctgcttcttatatat

SEQ ID NO: 421927 - DNA, 2192 bp, Homo sapiens
gcggggcccaggctgcggctccgctcccggccacggggggcgctgcgctgcgccggtggttggtggtggctgttggggggggtgggggggaacggcggccgcgggtggtgcggagggaggccttgcgggcggatcgggcgcttggcggcggaggtggtgggaggcggcgggcgggagcgcgggtcaggccggccccggcgatggcggacgcggcggcctccccggtgggcaagcggctgctgctgctgttcgcggacactgcggcctcagcctcggcctcggctcccgcggcggcagcggcgagcggagatccggggcctgcgctgcgcactcgagcctggcgggccggcacggtgcgggccatgagcggggcggtgccccaggacctagcgatctttgtagaatttgatggctgtaactggaagcaacactcctgggtaaaagttcatgctgaggaagttattgtgcttctgctggaagggtctcttgtatgggcgccccgtgaggacccagtccttctccagggcattcgagtctccattgcacaatggccagccctgacttttactccccttgtagataaactgggtttgggttctgtggttccagtggaatatcttctggatcgagagcttcggttcctgtcagatgccaatgggttgcatctgtttcagatgggaacagatagccaaaaccagattcttttggaacatgctgcactgagagaaacagttaatgctttgatcagtgaccaaaagctacaagagatattcagccgaggtccctacagtgttcaaggtcacagggtcaaaatatatcagccagagggggaagaagggtggctctatggtgttgtgagccatcaggactccatcactcgtcttatggaggtgtctgtaactgagagtggtgagatcaagtcggtagatcccagactaatccatgtgatgctgatggataattcaacgcctcaaagcgaggggggtacgttaaaagcagtaaaatcttccaaaggaaagaagaagagagaaagcatagaggggaaagatggccggaggaggaaaagtgcttcggactctgggtgtgaccctgcatcaaagaaattaaaaggagacaggggtgaagtagacagtaatgggagcgatggaggtgaggcaagccgagggccctggaaaggagggaatgccagtggagagccagggctggatcagagagccaagcagccaccgtctacatttgtcccccagataaaccgcaacattcgctttgccacttacaccaaagaaaacggcaggactctggtggtgcaggatgagcctgtaggtggggacacacctgcatctttcactccatattctacagccacaggtcagacacctttggccccagaggtgggtggagccgaaaacaaagaggcaggaaaaacactggaacaagttggccagggcatagtggcttccgcagctgtggtcactaccgccagctccaccccaaacacagtgaggatctcagacactggccttgcagcagggactgtgccagaaaaacagaaaggcagccggtcgcaggcctcgggagagaattcaagaaattctattctggcctcttctggatttggagcacctctccctagttcatcgcaacctttgacttttggaagtggaaggagccagtccaatggtgttctagccacagagaacaaacctttgggcttctcttttggctgtagctctgcacaagaggcacagaaagacactgatctctccaaaaacttgttttttcaatgcatgtcccaaactttacctaccagtaactacttcactactgtttcagagagtttggctgatgattcttctagtcgggactcattcaaacaaagccttgagagcctgagctcaggcctgtgtaaaggcagatccgttcttggaacagacactaagccaggctctaaggctggcagctctgtggaccggaaagtgcctgcagagtccatgcccacctgcactccagcctgggcaacagagcgagactccatctcaaaaaaaaaaaaaaaaaaaaagattagtctcctaggctgggcgcagtgccttacgcctgtaatcccagctactcagggagaatcgcttgaacccgggaggccaagatcatgccactgcactgcagcccgggtgacagagcaagactctgtctca

SEQ ID NO: 421928 - DNA, 1199 bp, Homo sapiens
gcggggcccaggctgcggctccgctcccggccacggggggcgctgcgctgcgccggtggttggtggtggctgttggggggggtgggggggaacggcggccgcgggtggtgcggagggaggccttgcgggcggatcgggcgcttggcggcggaggtggtgggaggcggcgggcgggagcgcgggtcaggccggccccggcgatggcggacgcggcggcctccccggtgggcaagcggctgctgctgctgttcgcggacactgcggcctcagcctcggcctcggctcccgcggcggcagcggcgagcggagatccggggcctgcgctgcgcactcgagcctggcgggccggcacggtgcgggccatgagcggggcggtgccccaggacctagcgatctttgtagaatttgatggctgtaactggaagcaacactcctgggtaaaagttcatgctgaggaagttattgtgcttctgctggaagggtctcttgtatgggcgccccgtgaggacccagtccttctccagggcattcgagtctccattgcacaatggccagccctgacttttactccccttgtagataaactgggtttgggttctgtggttccagtggaatatcttctggatcgagagcttcggttcctgtcagatgccaatgggttgcatctgtttcagatgggaacagatagccaaaaccagattcttttggaacatgctgcactgagagaaacagttaatgctttgatcagtgaccaaaagctacaagagatattcagccgaggtccctacagtgttcaaggtcacagggtcaaaatatatcagccagagggggaagaagggtggctctatggtgttgtgagccatcaggactccatcactcgtcttatggaggtgtctgtaactgagagtggtgagatcaagtcggtagatcccagactaatccatgtgatgctgatggataattcaacgcctcaaagcgaggtacagtaatggactgcattcctgagcagactcatgagcttgcattatcttgctgtgtgtagatcccttatatatgtgttttccatggatgccttttgagttgttcagctttagccactgtacatttttttgctctctccacagtctgtctaattaaggggggatattctcaagaaagagacctagtttgagcaaacccttttaagcatgactatgttc

SEQ ID NO: 421929 - DNA, 631 bp, Homo sapiens
acccttgagcatgttttcagatgtagtgtcgacgtggattcttccaactattggcccttcaccttgcatattttcctttctcctttagggttgataacagcagaagatagaagagttggtacaacaaatcttcacttagatgtgtctgatgctgttaatgtgatggtgtatgttgggattcccatcggggagggtgctcatgatgaaggtatgctttctagaatccactgctttaggatggtgaggctttgtcttgggaatacagttttgtgttttcatccttagggccagtggcttttccttttttttttctttttcttttttctgtttttttttttggggggcggggaggcagagtctcgctctgtcccccaggctagagtgcagaggtgcgatcttggctcaccgcaacctccgctgcctcccacgttcaagcgattctcctgcctcagcctcccaagtagctgggattacaggtgcctgccaccacgcccggctaatttttgtatttttagtagagacgggtttcgccatgttggccaggctggtctcaaactcctgacctcaggtgatccgtctgcctcagcctcccaaagtgctgggattacaggcgtcagccactgcacccggc

SEQ ID NO: 421930 - DNA, 331 bp, Homo sapiens
gggatagaatccccgtaagatggaaaaataagacacacactaaagtagcaagtgaggaaaacaaagcccaccttgtccattatgggggtttacaagtctgaaataaaaggttaatctcccagggccaggcacggtggctcacacctgtaatcccagcactttgggaggccgaggcgggtggatcacaaggtaaggagatcgagaccatcctggctaacatggtgaaaccctgtctctactaaaaatacaaaaaaattagccgggcatggtggcagacacctatagtcccagctactcggcaggctgagccaggagaatggcatgaacctgg

SEQ ID NO: 421931 - DNA, 427 bp, Homo sapiens
caaggccttctagcactgtgacgaccaattggataacaaccaagggaattgcaggatgaatgacatcctgctatctctggttcaccttgctaaagatgccctcagtgtagtctgtggcagatttcttccccactgctggtgaactccagttacaagagcagatccatggaattgtaaaagagaaaagttgatggacccccaagaaatgttgatctggtgatagtgaggtccaagaaagagatcattagattgtcatgagaagccagcatcactaattcaggctatcttcctttcagaattcaagaaattctattctggcctcttctggatttggagcacctctccctagttcatcgcaacctttgacttttggaagtggaaggagccagtccaatggtgttctagccacagagaacaaacctttggg

SEQ ID NO: 421932 - DNA, 528 bp, Homo sapiens
taaagaatctagacctactaaatgttatgttaacaagctttactattagcagagaatgcatactgttttggtcgactggtgaaaattcttagtctgattcctgttgtctcattttacttctgtttaggtcccaggagtttaggtgtgtgttagtttgcgttgctcctgcgatttaccatgtatttgatcatgtctcaggttgatcttcactcgaaaaggggtactccgtgtggaggggtttttaagcccccagcaaagtgaccctgatgccatgaacctgtggattccctcttcctccctagcagaagggatagatctagagacctcaaaatacatcctggccaatgttggggaccagttctgccagctcgtaatgtctgagaaggaggccatgatgatggtggagccacaccgtaagtcaccttctcacttgtcttccaggtgctcctagtgaaaaacttttattttctttcacttaacgggaagattggggacagtggcagatggcattttctgtgaatgaattaa

SEQ ID NO: 421933 - DNA, 323 bp, Homo sapiens
atgctattggttcctgtttacacctcatgacaaacttttcttctctcccccttgccacagttggccagtcagtgctgaaagatgtaagcaaagtgaagaagctgaagcaatctggagagcccttcctgcaggatgggtcatgcatcaatgtggcacctcatctgcacaagtgtcgtgaatgccgcctggagcggtaccggaagtttaaggaacaggagcaagatgattctactgtagcctgccgtttctttcacttccggaggtacccaaactcctgttttcctcctttgctagttttcattagtgacacataacttccactc

SEQ ID NO: 421934 - DNA, 429 bp, Homo sapiens
aagagccttctaatcctttcctggcatttgtggagaaagttgaacacagccctttcagtagttttgcatctcaggcatcaggtagctcctcttctgctaccactgtcacctccaaggtggcacccagctggcccgagtctcactcctctgcagattcggcatctttagcaaagaagaaacccctcttcattacaactgactcctccaagctagtatctggtgttctgggctcagctcttaccagtgggggcccaagcctctctgccatggggaatggccgctccagctcgcccaccagcagcctcactcagcccattgagatgccaactctctcctctagccccacagaggagaggccaactgtggggcctgggcagcaggacaatcccctcctcaaaacctttagtaacgtctttggcaggcactcag

SEQ ID NO: 421935 - DNA, 6975 bp, Homo sapiens
gcggggcccaggctgcggctccgctcccggccacggggggcgctgcgctgcgccggtggttggtggtggctgttggggggggtgggggggaacggcggccgcgggtggtgcggagggaggccttgcgggcggatcgggcgcttggcggcggaggtggtgggaggcggcgggcgggagcgcgggtcaggccggccccggcgatggcggacgcggcggcctccccggtgggcaagcggctgctgctgctgttcgcggacactgcggcctcagcctcggcctcggctcccgcggcggcagcggcgagcggagatccggggcctgcgctgcgcactcgagcctggcgggccggcacggtgcgggccatgagcggggcggtgccccaggacctagcgatctttgtagaatttgatggctgtaactggaagcaacactcctgggtaaaagttcatgctgaggaagttattgtgcttctgctggaagggtctcttgtatgggcgccccgtgaggacccagtccttctccagggcattcgagtctccattgcacaatggccagccctgacttttactccccttgtagataaactgggtttgggttctgtggttccagtggaatatcttctggatcgagagcttcggttcctgtcagatgccaatgggttgcatctgtttcagatgggaacagatagccaaaaccagattcttttggaacatgctgcactgagagaaacagttaatgctttgatcagtgaccaaaagctacaagagatattcagccgaggtccctacagtgttcaaggtcacagggtcaaaatatatcagccagagggggaagaagggtggctctatggtgttgtgagccatcaggactccatcactcgtcttatggaggtgtctgtaactgagagtggtgagatcaagtcggtagatcccagactaatccatgtgatgctgatggataattcaacgcctcaaagcgaggggggtacgttaaaagcagtaaaatcttccaaaggaaagaagaagagagaaagcatagaggggaaagatggccggaggaggaaaagtgcttcggactctgggtgtgaccctgcatcaaagaaattaaaaggagacaggggtgaagtagacagtaatgggagcgatggaggtgaggcaagccgagggccctggaaaggagggaatgccagtggagagccagggctggatcagagagccaagcagccaccgtctacatttgtcccccagataaaccgcaacattcgctttgccacttacaccaaagaaaacggcaggactctggtggtgcaggatgagcctgtaggtggggacacacctgcatctttcactccatattctacagccacaggtcagacacctttggccccagaggtgggtggagccgaaaacaaagaggcaggaaaaacactggaacaagttggccagggcatagtggcttccgcagctgtggtcactaccgccagctccaccccaaacacagtgaggatctcagacactggccttgcagcagggactgtgccagaaaaacagaaaggcagccggtcgcaggcctcgggagagaattcaagaaattctattctggcctcttctggatttggagcacctctccctagttcatcgcaacctttgacttttggaagtggaaggagccagtccaatggtgttctagccacagagaacaaacctttgggcttctcttttggctgtagctctgcacaagaggcacagaaagacactgatctctccaaaaacttgttttttcaatgcatgtcccaaactttacctaccagtaactacttcactactgtttcagagagtttggctgatgattcttctagtcgggactcattcaaacaaagccttgagagcctgagctcaggcctgtgtaaaggcagatccgttcttggaacagacactaagccaggctctaaggctggcagctctgtggaccggaaagtgcctgcagagtccatgcccaccctcactccagccttcccacggagcctcctaaatgcccgtaccccagagaatcatgaaaatctatttttacagccccccaaattgtcccgagaagagccttctaatcctttcctggcatttgtggagaaagttgaacacagccctttcagtagttttgcatctcaggcatcaggtagctcctcttctgctaccactgtcacctccaaggtggcacccagctggcccgagtctcactcctctgcagattcggcatctttagcaaagaagaaacccctcttcattacaactgactcctccaagctagtatctggtgttctgggctcagctcttaccagtgggggcccaagcctctctgccatggggaatggccgctccagctcgcccaccagcagcctcactcagcccattgagatgccaactctctcctctagccccacagaggagaggccaactgtggggcctgggcagcaggacaatcccctcctcaaaacctttagtaacgtctttggcaggcactcaggcggctttctgtcctccccggcagatttttcacaggagaacaaagctccttttgaagctgtgaaaaggttctcactggatgaacgaagcttggcttgcagacaagactcggactccagcaccaacagtgacctgtcagatttgagtgactctgaggagcagctgcaggctaagacaggcctgaagggaattccagagcacctgatggggaagctgggccccaatggggagcgcagtgctgagctgttgctgggcaaaagcaaagggaagcaggcccccaagggccggcctcggactgcccccctgaaagttggccagtcagtgctgaaagatgtaagcaaagtgaagaagctgaagcaatctggagagcccttcctgcaggatgggtcatgcatcaatgtggcacctcatctgcacaagtgtcgtgaatgccgcctggagcggtaccggaagtttaaggaacaggagcaagatgattctactgtagcctgccgtttctttcacttccggaggttgatcttcactcgaaaaggggtactccgtgtggaggggtttttaagcccccagcaaagtgaccctgatgccatgaacctgtggattccctcttcctccctagcagaagggatagatctagagacctcaaaatacatcctggccaatgttggggaccagttctgccagctcgtaatgtctgagaaggaggccatgatgatggtggagccacaccagaaagtggcatggaagcgagctgtgcgtggtgtacgggagatgtgtgatgtgtgtgaaacaactctcttcaacatccactgggtttgtcgcaaatgtggatttggggtctgccttgactgttaccggctcaggaaaagccggccacgcagtgagacagaagagatgggtgatgaagaagttttctcctggttgaagtgtgcaaagggacagtcccacgaaccagagaatctcatgcccacacaaattattcctggcacagctctttacaatattggagacatggtacatgctgcccggggcaagtggggaattaaagcaaactgcccttgtatcagtcgacagaacaaatctgtattgagacctgccgtcaccaatgggatgtcacagcttcctagcataaaccctagtgcctcttctggaaacgaaactaccttctctggcggaggaggaccggcaccagtaacaactccagagccggaccatgttcccaaagccgacagcactgacatcagatctgaagagcctctgaaaacagacagttcggcatcaaatagcaatagtgaactgaaagccatcaggcctccttgccctgacacggccccaccctcctccgccctgcactggttggcagatttagcaactcagaaggctaaagaagaaacaaaagaagcagggtccctgaggtcggtgctcaataaagagtctcattcaccctttgggctggactcgttcaactccactgcaaaggtctctccgctgactccaaagctttttaacagtctgttgctgggtcccactgcctccaacaacaaaaccgaagggtctagccttcgagacctccttcactccgggccgggaaaacttcctcaaacccccttggacacaggcataccctttcccccggtcttctctacatcctcagcaggagtgaagagcaaggccagcctacccaactttcttgaccacatcattgcctcagtggtagaaaataagaaaacctcagatgcttcaaagcgggcctgcaacttgactgatacccagaaggaagtgaaggagatggtgatggggttaaatgtgctagatccccatacttctcactcctggctttgtgatgggaggcttctgtgtctccatgaccccagcaacaaaaacaattggaagatcttccgggagtgttggaagcaaggtcagccagtgctggtttcgggggtacataaaaagctcaagtctgagctctggaagccagaagcctttagccaggaatttggagaccaggatgtagacttggtgaactgcaggaactgtgctataatttccgatgtgaaagttcgggatttctgggatggtttcgagatcatatgcaaacgactacggtcagaagatgggcagccaatggtgctcaaactcaaggactggcctcctggggaagattttcgagacatgatgccaaccaggtttgaagatctgatggagaaccttcctctgccagaatataccaaacgagatggcaggctcaatctggcctctaggctacctagctactttgtaaggcctgatctgggccccaagatgtacaacgcctatgggttgataacagcagaagatagaagagttggtacaacaaatcttcacttagatgtgtctgatgctgttaatgtgatggtgtatgttgggattcccatcggggagggtgctcatgatgaagaggtactcaagacaattgacgagggagatgccgatgaggtgacgaagcagaggattcatgatggaaaagagaagccaggtgctttatggcacatctatgcagccaaggatgcagagaagatccgggagctgctccgaaaggttggagaagaacaaggccaagagaacccccctgatcatgacccaattcatgaccaaagttggtacctggaccagaccctccgtaagcgactctatgaggagtatggcgtgcaaggctgggctattgtgcagttcctaggtgatgctgttttcatacctgctggagccccacaccaggttcacaatctatacagttgcataaaagtagcagaagactttgtatctccagaacatgtaaagcactgtttccgcctgactcaggaattcaggcatctctctaacactcatacaaatcatgaggataaactgcaggtgaagaacatcatttaccatgcagtgaaagatgcggttggcaccctcaaggctcatgaatccaaactggcaaggtcctaggcatggagaaactccaagctcctctgtgaagcaggtctttcactcacaacacttaacagggaacggcagggctctttgctggagcagaggcccttcacccagagccagtgtggtcagtattccaaactctccagccactctcttctacgctgcctcaacactgaaggttgacacaggaaagtcgtactgttcacacacacagtttgagactccaagccaagagtgccacatccctatcctgtggccttttggaaatccaaattgcctgaacatggcggggctttcctgcacattctcctgatttgagattcacgggcacacctttcttttcttttcctcttgtgcctagttaagtgggaatgtgtttggagataggggaaatcacataactggtacaagtatggggtaattgcttaaacatgcctggtggaagtctgatagcgtctctgcacgtgacctctgacaaagcccatcccaggagacggggtgaagctattccccacactctcctgtgaacactggagtcttgcaagacccagggagaacccactgcttttcccaggaggctccaggattaggaaatgtgtgtatttagtgaaaaataggtttgtagtgaaatagttactatttcatgaaagtagatatttttagaatttttgaaataccacagttgttttcctggattataaggaaaggcacattacatttagtcttcctttcgatataaaactctttgaagaaatatgatttttagaaatcagctacccattatagcacaaaatcagccaaagcagaatttttaaaaattggcttttttaggattctttttctccccctcccatcttagtcttaccttgagggaacagtcatatgagaaggaactttgtcacatctaagctgtggtgtgttccccatgtgtgtgtacaacactggtgactccaggaaccattttcacctattaccagtgttccctggggactcctcttaatgtttccaaatgggaaggacagttgatttccaacatgaggttttttgttttttatccagaaatattttcagcaaaactttccaactgagtggagtctgattaaggatttatttgaaaatggtgggattcattggcccataggtacattggaaaatgtatatctctccagctgtactgtagtgccctgcaggctgtttatatgttcacagttactttttttttttttttaaataaaagtcatttaatgtagaatacttttaatttcactttctgtattttaattttgttgaagggctgattgggatttccatgttcttattaaaaatctacattcacaacacaacgagaagaaaaaaatttgcgggcgtttgacacgaaagtataacaatggtaggcggcgccagaagaatgactgcgctaggtccaagactcgggataatggtcgtcaccaaaaccgggaccggttaacccagggtggagcgcaggcacggtaacgccggg

SEQ ID NO: 421936 - DNA, 4416 bp, Homo sapiens
gcggggcccaggctgcggctccgctcccggccacggggggcgctgcgctgcgccggtggttggtggtggctgttggggggggtgggggggaacggcggccgcgggtggtgcggagggaggccttgcgggcggatcgggcgcttggcggcggaggtggtgggaggcggcgggcgggagcgcgggtcaggccggccccggcgatggcggacgcggcggcctccccggtgggcaagcggctgctgctgctgttcgcggacactgcggcctcagcctcggcctcggctcccgcggcggcagcggcgagcggagatccggggcctgcgctgcgcactcgagcctggcgggccggcacggtgcgggccatgagcggggcggtgccccaggacctagcgatctttgtagaatttgatggctgtaactggaagcaacactcctgggtaaaagttcatgctgaggaagttattgtgcttctgctggaagggtctcttgtatgggcgccccgtgaggacccagtccttctccagggcattcgagtctccattgcacaatggccagccctgacttttactccccttgtagataaactgggtttgggttctgtggttccagtggaatatcttctggatcgagagcttcggttcctgtcagatgccaatgggttgcatctgtttcagatgggaacagatagccaaaaccagattcttttggaacatgctgcactgagagaaacagttaatgctttgatcagtgaccaaaagctacaagagatattcagccgaggtccctacagtgttcaaggtcacagggtcaaaatatatcagccagagggggaagaagggtggctctatggtgttgtgagccatcaggactccatcactcgtaatgtctgagaaggaggccatgatgatggtggagccacaccagaaagtggcatggaagcgagctgtgcgtggtgtacgggagatgtgtgatgtgtgtgaaacaactctcttcaacatccactgggtttgtcgcaaatgtggatttggggtctgccttgactgttaccggctcaggaaaagccggccacgcagtgagacagaagagatgggtgatgaagaagttttctcctggttgaagtgtgcaaagggacagtcccacgaaccagagaatctcatgcccacacaaattattcctggcacagctctttacaatattggagacatggtacatgctgcccggggcaagtggggaattaaagcaaactgcccttgtatcagtcgacagaacaaatctgtattgagacctgccgtcaccaatgggatgtcacagcttcctagcataaaccctagtgcctcttctggaaacgaaactaccttctctggcggaggaggaccggcaccagtaacaactccagagccggaccatgttcccaaagccgacagcactgacatcagatctgaagagcctctgaaaacagacagttcggcatcaaatagcaatagtgaactgaaagccatcaggcctccttgccctgacacggccccaccctcctccgccctgcactggttggcagatttagcaactcagaaggctaaagaagaaacaaaagaagcagggtccctgaggtcggtgctcaataaagagtctcattcaccctttgggctggactcgttcaactccactgcaaaggtctctccgctgactccaaagctttttaacagtctgttgctgggtcccactgcctccaacaacaaaaccgaagggtctagccttcgagacctccttcactccgggccgggaaaacttcctcaaacccccttggacacaggcataccctttcccccggtcttctctacatcctcagcaggagtgaagagcaaggccagcctacccaactttcttgaccacatcattgcctcagtggtagaaaataagaaaacctcagatgcttcaaagcgggcctgcaacttgactgatacccagaaggaagtgaaggagatggtgatggggttaaatgtgctagatccccatacttctcactcctggctttgtgatgggaggcttctgtgtctccatgaccccagcaacaaaaacaattggaagatcttccgggagtgttggaagcaaggtcagccagtgctggtttcgggggtacataaaaagctcaagtctgagctctggaagccagaagcctttagccaggaatttggagaccaggatgtagacttggtgaactgcaggaactgtgctataatttccgatgtgaaagttcgggatttctgggatggtttcgagatcatatgcaaacgactacggtcagaagatgggcagccaatggtgctcaaactcaaggactggcctcctggggaagattttcgagacatgatgccaaccaggtttgaagatctgatggagaaccttcctctgccagaatataccaaacgagatggcaggctcaatctggcctctaggctacctagctactttgtaaggcctgatctgggccccaagatgtacaacgcctatgggttgataacagcagaagatagaagagttggtacaacaaatcttcacttagatgtgtctgatgctgttaatgtgatggtgtatgttgggattcccatcggggagggtgctcatgatgaagaggtactcaagacaattgacgagggagatgccgatgaggtgacgaagcagaggattcatgatggaaaagagaagccaggtgctttatggcacatctatgcagccaaggatgcagagaagatccgggagctgctccgaaaggttggagaagaacaaggccaagagaacccccctgatcatgacccaattcatgaccaaagttggtacctggaccagaccctccgtaagcgactctatgaggagtatggcgtgcaaggctgggctattgtgcagttcctaggtgatgctgttttcatacctgctggagccccacaccaggttcacaatctatacagttgcataaaagtagcagaagactttgtatctccagaacatgtaaagcactgtttccgcctgactcaggaattcaggcatctctctaacactcatacaaatcatgaggataaactgcaggtgaagaacatcatttaccatgcagtgaaagatgcggttggcaccctcaaggctcatgaatccaaactggcaaggtcctaggcatggagaaactccaagctcctctgtgaagcaggtctttcactcacaacacttaacagggaacggcagggctctttgctggagcagaggcccttcacccagagccagtgtggtcagtattccaaactctccagccactctcttctacgctgcctcaacactgaaggttgacacaggaaagtcgtactgttcacacacacagtttgagactccaagccaagagtgccacatccctatcctgtggccttttggaaatccaaattgcctgaacatggcggggctttcctgcacattctcctgatttgagattcacgggcacacctttcttttcttttcctcttgtgcctagttaagtgggaatgtgtttggagataggggaaatcacataactggtacaagtatggggtaattgcttaaacatgcctggtggaagtctgatagcgtctctgcacgtgacctctgacaaagcccatcccaggagacggggtgaagctattccccacactctcctgtgaacactggagtcttgcaagacccagggagaacccactgcttttcccaggaggctccaggattaggaaatgtgtgtatttagtgaaaaataggtttgtagtgaaatagttactatttcatgaaagtagatatttttagaatttttgaaataccacagttgttttcctggattataaggaaaggcacattacatttagtcttcctttcgatataaaactctttgaagaaatatgatttttagaaatcagctacccattatagcacaaaatcagccaaagcagaatttttaaaaattggcttttttaggattctttttctccccctcccatcttagtcttaccttgagggaacagtcatatgagaaggaactttgtcacatctaagctgtggtgtgttccccatgtgtgtgtacaacactggtgactccaggaaccattttcacctattaccagtgttccctggggactcctcttaatgtttccaaatgggaaggacagttgatttccaacatgaggttttttgttttttatccagaaatattttcagcaaaactttccaactgagtggagtctgattaaggatttatttgaaaatggtgggattcattggcccataggtacattggaaaatgtatatctctccagctgtactgtagtgccctgcaggctgtttatatgttcacagttactttttttttttttttaaataaaagtcatttaatgtagaatacttttaatttca

SEQ ID NO: 421937 - DNA, 6921 bp, Homo sapiens
gcggggcccaggctgcggctccgctcccggccacggggggcgctgcgctgcgccggtggttggtggtggctgttggggggggtgggggggaacggcggccgcgggtggtgcggagggaggccttgcgggcggatcgggcgcttggcggcggaggtggtgggaggcggcgggcgggagcgcgggtcaggccggccccggcgatggcggacgcggcggcctccccggtgggcaagcggctgctgctgctgttcgcggacactgcggcctcagcctcggcctcggctcccgcggcggcagcggcgagcggagatccggggcctgcgctgcgcactcgagcctggcgggccggcacggtgcgggccatgagcggggcggtgccccaggacctagcgatctttgtagaatttgatggctgtaactggaagcaacactcctgggtaaaagttcatgctgaggaagttattgtgcttctgctggaagggtctcttgtatgggcgccccgtgaggacccagtccttctccagggcattcgagtctccattgcacaatggccagccctgacttttactccccttgtagataaactgggtttgggttctgtggttccagtggaatatcttctggatcgagagcttcggttcctgtcagatgccaatgggttgcatctgtttcagatgggaacagatagccaaaaccagattcttttggaacatgctgcactgagagaaacagttaatgctttgatcagtgaccaaaagctacaagagatattcagccgaggtccctacagtgttcaaggtcacagggtcaaaatatatcagccagagggggaagaagggtggctctatggtgttgtgagccatcaggactccatcactcgtcttatggaggtgtctgtaactgagagtggtgagatcaagtcggtagatcccagactaatccatgtgatgctgatggataattcaacgcctcaaagcgaggggggtacgttaaaagcagtaaaatcttccaaaggaaagaagaagagagaaagcatagaggggaaagatggccggaggaggaaaagtgcttcggactctgggtgtgaccctgcatcaaagaaattaaaaggagacaggggtgaagtagacagtaatgggagcgatggaggtgaggcaagccgagggccctggaaaggagggaatgccagtggagagccagggctggatcagagagccaagcagccaccgtctacatttgtcccccagataaaccgcaacattcgctttgccacttacaccaaagaaaacggcaggactctggtggtgcaggatgagcctgtaggtggggacacacctgcatctttcactccatattctacagccacaggtcagacacctttggccccagaggtgggtggagccgaaaacaaagaggcaggaaaaacactggaacaagttggccagggcatagtggcttccgcagctgtggtcactaccgccagctccaccccaaacacagtgaggatctcagacactggccttgcagcagggactgtgccagaaaaacagaaaggcagccggtcgcaggcctcgggagagaattcaagaaattctattctggcctcttctggatttggagcacctctccctagttcatcgcaacctttgacttttggaagtggaaggagccagtccaatggtgttctagccacagagaacaaacctttgggcttctcttttggctgtagctctgcacaagaggcacagaaagacactgatctctccaaaaacttgttttttcaatgcatgtcccaaactttacctaccagtaactacttcactactgtttcagagagtttggctgatgattcttctagtcgggactcattcaaacaaagccttgagagcctgagctcaggcctgtgtaaaggcagatccgttcttggaacagacactaagccaggctctaaggctggcagctctgtggaccggaaagtgcctgcagagtccatgcccaccctcactccagccttcccacggagcctcctaaatgcccgtaccccagagaatcatgaaaatctatttttacagccccccaaattgtcccgagaagagccttctaatcctttcctggcatttgtggagaaagttgaacacagccctttcagtagttttgcatctcaggcatcaggtagctcctcttctgctaccactgtcacctccaaggtggcacccagctggcccgagtctcactcctctgcagattcggcatctttagcaaagaagaaacccctcttcattacaactgactcctccaagctagtatctggtgttctgggctcagctcttaccagtgggggcccaagcctctctgccatggggaatggccgctccagctcgcccaccagcagcctcactcagcccattgagatgccaactctctcctctagccccacagaggagaggccaactgtggggcctgggcagcaggacaatcccctcctcaaaacctttagtaacgtctttggcaggcactcaggcggctttctgtcctccccggcagatttttcacaggagaacaaagctccttttgaagctgtgaaaaggttctcactggatgaacgaagcttggcttgcagacaagactcggactccagcaccaacagtgacctgtcagatttgagtgactctgaggagcagctgcaggctaagacaggcctgaagggaattccagagcacctgatggggaagctgggccccaatggggagcgcagtgctgagctgttgctgggcaaaagcaaagggaagcaggcccccaagggccggcctcggactgcccccctgaaagttggccagtcagtgctgaaagatgtaagcaaagtgaagaagctgaagcaatctggagagcccttcctgcaggatgggtcatgcatcaatgtggcacctcatctgcacaagtgtcgtgaatgccgcctggagcggtaccggaagtttaaggaacaggagcaagatgattctactgtagcctgccgtttctttcacttccggaggttgatcttcactcgaaaaggggtactccgtgtggaggggtttttaagcccccagcaaagtgaccctgatgccatgaacctgtggattccctcttcctccctagcagaagggatagatctagagacctcaaaatacatcctggccaatgttggggaccagttctgccagctcgtaatgtctgagaaggaggccatgatgatggtggagccacaccagaaagtggcatggaagcgagctgtgcgtggtgtacgggagatgtgtgatgtgtgtgaaacaactctcttcaacatccactgggtttgtcgcaaatgtggatttggggtctgccttgactgttaccggctcaggaaaagccggccacgcagtgagacagaagagatgggtgatgaagaagttttctcctggttgaagtgtgcaaagggacagtcccacgaaccagagaatctcatgcccacacaaattattcctggcacagctctttacaatattggagacatggtacatgctgcccggggcaagtggggaattaaagcaaactgcccttgtatcagtcgacagaacaaatctgtattgagacctgccgtcaccaatgggatgtcacagcttcctagcataaaccctagtgcctcttctggaaacgaaactaccttctctggcggaggaggaccggcaccagtaacaactccagagccggaccatgttcccaaagccgacagcactgacatcagatctgaagagcctctgaaaacagacagttcggcatcaaatagcaatagtgaactgaaagccatcaggcctccttgccctgacacggccccaccctcctccgccctgcactggttggcagatttagcaactcagaaggctaaagaagaaacaaaagaagcagggtccctgaggtcggtgctcaataaagagtctcattcaccctttgggctggactcgttcaactccactgcaaaggtctctccgctgactccaaagctttttaacagtctgttgctgggtcccactgcctccaacaacaaaaccgaagggtctagccttcgagacctccttcactccgggccgggaaaacttcctcaaacccccttggacacaggcataccctttcccccggtcttctctacatcctcagcaggagtgaagagcaaggccagcctacccaactttcttgaccacatcattgcctcagtggtagaaaataagaaaacctcagatgcttcaaagcgggcctgcaacttgactgatacccagaaggaagtgaaggagatggtgatggggttaaatgtgctagatccccatacttctcactcctggctttgtgatgggaggcttctgtgtctccatgaccccagcaacaaaaacaattggaagatcttccgggagtgttggaagcaaggtcagccagtgctggtttcgggggtacataaaaagctcaagtctgagctctggaagccagaagcctttagccaggaatttggagaccaggatgtagacttggtgaactgcaggaactgtgctataatttccgatgtgaaagttcgggatttctgggatggtttcgagatcatatgcaaacgactacggtcagaagatgggcagccaatggtgctcaaactcaaggactggcctcctggggaagattttcgagacatgatgccaaccaggtttgaagatctgatggagaaccttcctctgccagaatataccaaacgagatggcaggctcaatctggcctctaggctacctagctactttgtaaggcctgatctgggccccaagatgtacaacgcctatgggttgataacagcagaagatagaagagttggtacaacaaatcttcacttagatgtgtctgatgctgttaatgtgatggtgtatgttgggattcccatcggggagggtgctcatgatgaagaggtactcaagacaattgacgagggagatgccgatgaggtgacgaagcagaggattcatgatggaaaagagaagccaggtgctttatggcacatctatgcagccaaggatgcagagaagatccgggagctgctccgaaaggttggagaagaacaaggccaagagaacccccctgatcatgacccaattcatgaccaaagttggtacctggaccagaccctccgtaagcgactctatgaggagtatggcgtgcaaggctgggctattgtgcagttcctaggtgatgctgttttcatacctgctggagccccacaccaggttcacaatctatacagttgcataaaagtagcagaagactttgtatctccagaacatgtaaagcactgtttccgcctgactcaggaattcaggcatctctctaacactcatacaaatcatgaggataaactgcaggtgaagaacatcatttaccatgcagtgaaagatgcggttggcaccctcaaggctcatgaatccaaactggcaaggtcctaggcatggagaaactccaagctcctctgtgaagcaggtctttcactcacaacacttaacagggaacggcagggctctttgctggagcagaggcccttcacccagagccagtgtggtcagtattccaaactctccagccactctcttctacgctgcctcaacactgaaggttgacacaggaaagtcgtactgttcacacacacagtttgagactccaagccaagagtgccacatccctatcctgtggccttttggaaatccaaattgcctgaacatggcggggctttcctgcacattctcctgatttgagattcacgggcacacctttcttttcttttcctcttgtgcctagttaagtgggaatgtgtttggagataggggaaatcacataactggtacaagtatggggtaattgcttaaacatgcctggtggaagtctgatagcgtctctgcacgtgacctctgacaaagcccatcccaggagacggggtgaagctattccccacactctcctgtgaacactggagtcttgcaagacccagggagaacccactgcttttcccaggaggctccaggattaggaaatgtgtgtatttagtgaaaaataggtttgtagtgaaatagttactatttcatgaaagtagatatttttagaatttttgaaataccacagttgttttcctggattataaggaaaggcacattacatttagtcttcctttcgatataaaactctttgaagaaatatgatttttagaaatcagctacccattatagcacaaaatcagccaaagcagaatttttagagggaacagtcatatgagaaggaactttgtcacatctaagctgtggtgtgttccccatgtgtgtgtacaacactggtgactccaggaaccattttcacctattaccagtgttccctggggactcctcttaatgtttccaaatgggaaggacagttgatttccaacatgaggttttttgttttttatccagaaatattttcagcaaaactttccaactgagtggagtctgattaaggatttatttgaaaatggtgggattcattggcccataggtacattggaaaatgtatatctctccagctgtactgtagtgccctgcaggctgtttatatgttcacagttactttttttttttttttaaataaaagtcatttaatgtagaatacttttaatttcactttctgtattttaattttgttgaagggctgattgggatttccatgttcttattaaaaatctacattcacaacacaacgagaagaaaaaaatttgcgggcgtttgacacgaaagtataacaatggtaggcggcgccagaagaatgactgcgctaggtccaagactcgggataatggtcgtcaccaaaaccgggaccggttaacccagggtggagcgcaggcacggtaacgccggg

SEQ ID NO: 421938 - DNA, 1867 bp, Homo sapiens
ctaggtgatgctgttttcatacctgctggagccccacaatagcccagccttgcacgccatactcctcatagagtcgcttacggagggtatggcgtgcaaggctgggctattgtgcagttcctaggtgatgctgttttcatacctgctggagccccacaccaggttcacaatctatacagttgcataaaagtagcagaagactttgtatctccagaacatgtaaagcactgtttccgcctgactcaggaattcaggcatctctctaacactcatacaaatcatgaggataaactgcaggtgaagaacatcatttaccatgcagtgaaagatgcggttggcaccctcaaggctcatgaatccaaactggcaaggtcctaggcatggagaaactccaagctcctctgtgaagcaggtctttcactcacaacacttaacagggaacggcagggctctttgctggagcagaggcccttcacccagagccagtgtggtcagtattccaaactctccagccactctcttctacgctgcctcaacactgaaggttgacacaggaaagtcgtactgttcacacacacagtttgagactccaagccaagagtgccacatccctatcctgtggccttttggaaatccaaattgcctgaacatggcggggctttcctgcacattctcctgatttgagattcacgggcacacctttcttttcttttcctcttgtgcctagttaagtgggaatgtgtttggagataggggaaatcacataactggtacaagtatggggtaattgcttaaacatgcctggtggaagtctgatagcgtctctgcacgtgacctctgacaaagcccatcccaggagacggggtgaagctattccccacactctcctgtgaacactggagtcttgcaagacccagggagaacccactgcttttcccaggaggctccaggattaggaaatgtgtgtatttagtgaaaaataggtttgtagtgaaatagttactatttcatgaaagtagatatttttagaatttttgaaataccacagttgttttcctggattataaggaaaggcacattacatttagtcttcctttcgatataaaactctttgaagaaatatgatttttagaaatcagctacccattatagcacaaaatcagccaaagcagaatttttaaaaattggcttttttaggattctttttctccccctcccatcttagtcttaccttgagggaacagtcatatgagaaggaactttgtcacatctaagctgtggtgtgttccccatgtgtgtgtacaacactggtgactccaggaaccattttcacctattaccagtgttccctggggactcctcttaatgtttccaaatgggaaggacagttgatttccaacatgaggttttttgttttttatccagaaatattttcagcaaaactttccaactgagtggagtctgattaaggatttatttgaaaatggtgggattcattggcccataggtacattggaaaatgtatatctctccagctgtactgtagtgccctgcaggctgtttatatgttcacagttactttttttttttttttaaataaaagtcatttaatgtagaatacttttaatttcactttctgtattttaattttgttgaagggctgattgggatttccatgttcttattaaaaatctacattcacaacacaacgagaagaaaaaaatttgcgggcgtttgacacgaaagtataacaatggtaggcggcgccagaagaatgactgcgctaggtccaagactcgggataatggtcgtcaccaaaaccgggaccggttaacccagggtggagcgcaggcacggtaacgccggg

SEQ ID NO: 421939 - DNA, 6876 bp, Homo sapiens
gcggggcccaggctgcggctccgctcccggccacggggggcgctgcgctgcgccggtggttggtggtggctgttggggggggtgggggggaacggcggccgcgggtggtgcggagggaggccttgcgggcggatcgggcgcttggcggcggaggtggtgggaggcggcgggcgggagcgcgggtcaggccggccccggcgatggcggacgcggcggcctccccggtgggcaagcggctgctgctgctgttcgcggacactgcggcctcagcctcggcctcggctcccgcggcggcagcggcgagcggagatccggggcctgcgctgcgcactcgagcctggcgggccggcacggtgcgggccatgagcggggcggtgccccaggacctagcgatctttgtagaatttgatggctgtaactggaagcaacactcctgggtaaaagttcatgctgaggaagttattgtgcttctgctggaagggtctcttgtatgggcgccccgtgaggacccagtccttctccagggcattcgagtctccattgcacaatggccagccctgacttttactccccttgtagataaactgggtttgggttctgtggttccagtggaatatcttctggatcgagagcttcggttcctgtcagatgccaatgggttgcatctgtttcagatgggaacagatagccaaaaccagattcttttggaacatgctgcactgagagaaacagttaatgctttgatcagtgaccaaaagctacaagagatattcagccgaggtccctacagtgttcaaggtcacagggtcaaaatatatcagccagagggggaagaagggtggctctatggtgttgtgagccatcaggactccatcactcgtcttatggaggtgtctgtaactgagagtggtgagatcaagtcggtagatcccagactaatccatgtgatgctgatggataattcaacgcctcaaagcgaggggggtacgttaaaagcagtaaaatcttccaaaggaaagaagaagagagaaagcatagaggggaaagatggccggaggaggaaaagtgcttcggactctgggtgtgaccctgcatcaaagaaattaaaaggagacaggggtgaagtagacagtaatgggagcgatggaggtgaggcaagccgagggccctggaaaggagggaatgccagtggagagccagggctggatcagagagccaagcagccaccgtctacatttgtcccccagataaaccgcaacattcgctttgccacttacaccaaagaaaacggcaggactctggtggtgcaggatgagcctgtaggtggggacacacctgcatctttcactccatattctacagccacaggtcagacacctttggccccagaggtgggtggagccgaaaacaaagaggcaggaaaaacactggaacaagttggccagggcatagtggcttccgcagctgtggtcactaccgccagctccaccccaaacacagtgaggatctcagacactggccttgcagcagggactgtgccagaaaaacagaaaggcagccggtcgcaggcctcgggagagaattcaagaaattctattctggcctcttctggatttggagcacctctccctagttcatcgcaacctttgacttttggaagtggaaggagccagtccaatggtgttctagccacagagaacaaacctttgggcttctcttttggctgtagctctgcacaagaggcacagaaagacactgatctctccaaaaacttgttttttcaatgcatgtcccaaactttacctaccagtaactacttcactactgtttcagagagtttggctgatgattcttctagtcgggactcattcaaacaaagccttgagagcctgagctcaggcctgtgtaaaggcagatccgttcttggaacagacactaagccaggctctaaggctggcagctctgtggaccggaaagtgcctgcagagtccatgcccaccctcactccagccttcccacggagcctcctaaatgcccgtaccccagagaatcatgaaaatctatttttacagccccccaaattgtcccgagaagagccttctaatcctttcctggcatttgtggagaaagttgaacacagccctttcagtagttttgcatctcaggcatcaggtagctcctcttctgctaccactgtcacctccaaggtggcacccagctggcccgagtctcactcctctgcagattcggcatctttagcaaagaagaaacccctcttcattacaactgactcctccaagctagtatctggtgttctgggctcagctcttaccagtgggggcccaagcctctctgccatggggaatggccgctccagctcgcccaccagcagcctcactcagcccattgagatgccaactctctcctctagccccacagaggagaggccaactgtggggcctgggcagcaggacaatcccctcctcaaaacctttagtaacgtctttggcaggcactcaggcggctttctgtcctccccggcagatttttcacaggagaacaaagctccttttgaagctgtgaaaaggttctcactggatgaacgaagcttggcttgcagacaagactcggactccagcaccaacagtgacctgtcagatttgagtgactctgaggagcagctgcaggctaagacaggcctgaagggaattccagagcacctgatggggaagctgggccccaatggggagcgcagtgctgagctgttgctgggcaaaagcaaagggaagcaggcccccaagggccggcctcggactgcccccctgaaagttggccagtcagtgctgaaagatgtaagcaaagtgaagaagctgaagcaatctggagagcccttcctgcaggatgggtcatgcatcaatgtggcacctcatctgcacaagtgtcgtgaatgccgcctggagcggtaccggaagtttaaggaacaggagcaagatgattctactgtagcctgccgtttctttcacttccggaggttgatcttcactcgaaaaggggtactccgtgtggaggggtttttaagcccccagcaaagtgaccctgatgccatgaacctgtggattccctcttcctccctagcagaagggatagatctagagacctcaaaatacatcctggccaatgttggggaccagttctgccagctcgtaatgtctgagaaggaggccatgatgatggtggagccacaccagaaagtggcatggaagcgagctgtgcgtggtgtacgggagatgtgtgatgtgtgtgaaacaactctcttcaacatccactgggtttgtcgcaaatgtggatttggggtctgccttgactgttaccggctcaggaaaagccggccacgcagtgagacagaagagatgggtgatgaagaagttttctcctggttgaagtgtgcaaagggacagtcccacgaaccagagaatctcatgcccacacaaattattcctggcacagctctttacaatattggagacatggtacatgctgcccggggcaagtggggaattaaagcaaactgcccttgtatcagtcgacagaacaaatctgtattgagacctgccgtcaccaatgggatgtcacagcttcctagcataaaccctagtgcctcttctggaaacgaaactaccttctctggcggaggaggaccggcaccagtaacaactccagagccggaccatgttcccaaagccgacagcactgacatcagatctgaagagcctctgaaaacagacagttcggcatcaaatagcaatagtgaactgaaagccatcaggcctccttgccctgacacggccccaccctcctccgccctgcactggttggcagatttagcaactcagaaggctaaagaagaaacaaaagaagcagggtccctgaggtcggtgctcaataaagagtctcattcaccctttgggctggactcgttcaactccactgcaaaggtctctccgctgactccaaagctttttaacagtctgttgctgggtcccactgcctccaacaacaaaaccgaagggtctagccttcgagacctccttcactccgggccgggaaaacttcctcaaacccccttggacacaggcataccctttcccccggtcttctctacatcctcagcaggagtgaagagcaaggccagcctacccaactttcttgaccacatcattgcctcagtggtagaaaataagaaaacctcagatgcttcaaagcgggcctgcaacttgactgatacccagaaggaagtgaaggagatggtgatggggttaaatgtgctagatccccatacttctcactcctggctttgtgatgggaggcttctgtgtctccatgaccccagcaacaaaaacaattggaagatcttccgggagtgttggaagcaaggtcagccagtgctggtttcgggggtacataaaaagctcaagtctgagctctggaagccagaagcctttagccaggaatttggagaccaggatgtagacttggtgaactgcaggaactgtgctataatttccgatgtgaaagttcgggatttctgggatggtttcgagatcatatgcaaacgactacggtcagaagatgggcagccaatggtgctcaaactcaaggactggcctcctggggaagattttcgagacatgatgccaaccaggtttgaagatctgatggagaaccttcctctgccagaatataccaaacgagatggcaggctcaatctggcctctaggctacctagctactttgtaaggcctgatctgggccccaagatgtacaacgcctatgggttgataacagcagaagatagaagagttggtacaacaaatcttcacttagatgtgtctgatgctgttaatgtgatggtgtatgttgggattcccatcggggagggtgctcatgatgaagaggtactcaagacaattgacgagggagatgccgatgaggtgacgaagcagaggattcatgatggaaaagagaagccaggtgctttatggcacatctatgcagccaaggatgcagagaagatccgggagctgctccgaaaggttggagaagaacaaggccaagagaacccccctgatcatgacccaattcatgaccaaagttggtacctggaccagaccctccgtaagcgactctatgaggagtatggcgtgcaaggctgggctattgtgcagttcctaggtgatgctgttttcatacctgctggagccccacaccaggttcacaatctatacagttgcataaaagtagcagaagactttgtatctccagaacatgtaaagcactgtttccgcctgactcaggaattcaggcatctctctaacactcatacaaatcatgaggataaactgcaggtgaagaacatcatttaccatgcagtgaaagatgcggttggcaccctcaaggctcatgaatccaaactggcaaggtcctaggcatggagaaactccaagctcctctgtgaagcaggtctttcactcacaacacttaacagggaacggcagggctctttgctggagcagaggcccttcacccagagccagtgtggtcagtattccaaactctccagccactctcttctacgctgcctcaacactgaaggttgacacaggaaagtcgtactgttcacacacacagtttgagactccaagccaagagtgccacatccctatcctgtggccttttggaaatccaaattgcctgaacatggcggggctttcctgcacattctcctgatttgagattcacgggcacacctttcttttcttttcctcttgtgcctagttaagtgggaatgtgtttggagataggggaaatcacataactggtacaagtatggggtaattgcttaaacatgcctggtggaagtctgatagcgtctctgcacgtgacctctgacaaagcccatcccaggagacggggtgaagctattccccacactctcctgtgaacactggagtcttgcaagacccagggagaacccactgcttttcccaggaggctccaggattaggaaatgtgtgtatttagtgaaaaataggtttgtagtgaaatagttactatttcatgaaagtagatatttttagaatttttgaaataccacagttgttttcctggattataaggaaaggcacattacatttagtcttcctttcgatataaaactctttgaagaaatatgatttttagaaatcagctacccattatagcacaaaatcagccaaagcagaatttttaaaaattggcttttttaggattctttttctccccctcccatcttagtcttaccttgagggaacagtcatatgagaaggaactttgtcacatctaagctgtggtgtgttccccatgtgtgtgtacaacactggtgactccaggaaccattttcacctattaccagtgttccctggggactcctcttaatgtttccaaatgggaaggacagttgatttccaacatgaggttttttgttttttatccagaaatattttcagcaaaactttccaactgagtggagtctgattaaggatttatttgaaaatgtttttttttaaataaaagtcatttaatgtagaatacttttaatttcactttctgtattttaattttgttgaagggctgattgggatttccatgttcttattaaaaatctacattcacaacacaacgagaagaaaaaaatttgcgggcgtttgacacgaaagtataacaatggtaggcggcgccagaagaatgactgcgctaggtccaagactcgggataatggtcgtcaccaaaaccgggaccggttaacccagggtggagcgcaggcacggtaacgccggg

SEQ ID NO: 421940 - DNA, 4184 bp, Homo sapiens
gcggggcccaggctgcggctccgctcccggccacggggggcgctgcgctgcgccggtggttggtggtggctgttggggggggtgggggggaacggcggccgcgggtggtgcggagggaggccttgcgggcggatcgggcgcttggcggcggaggtggtgggaggcggcgggcgggagcgcgggtcaggccggccccggcgatggcggacgcggcggcctccccggtgggcaagcggctgctgctgctgttcgcggacactgcggcctcagcctcggcctcggctcccgcggcggcagcggcgagcggagatccggggcctgcgctgcgcactcgagcctggcgggccggcacggtgcgggccatgagcggggcggtgccccaggacctagcgatctttgtagaatttgatggctgtaactggaagcaacactcctgggtaaaagttcatgctgaggaagttattgtgcttctgctggaagggtctcttgtatgggcgccccgtgaggacccagtccttctccagggcattcgagtctccattgcacaatggccagccctgacttttactccccttgtagataaactgggtttgggttctgtggttccagtggaatatcttctggatcgagagcttcggttcctgtcagatgccaatgggttgcatctgtttcagatgggaacagatagccaaaaccagattcttttggaacatgctgcactgagagaaacagttaatgctttgatcagtgaccaaaagctacaagagatattcagccgaggtccctacagtgttcaaggtcacagggtcaaaatatatcagccagagggggaagaagggtggctctatggtgttgtgagccatcaggactccatcactcgtcttatggaggtgtctgtaactgagagtggtgagatcaagtcggtagatcccagactaatccatgtgatgctgatggataattcaacgcctcaaagcgaggggggtacgttaaaagcagtaaaatcttccaaaggaaagaagaagagagaaagcatagaggggaaagatggccggaggaggaaaagtgcttcggactctgggtgtgaccctgcatcaaagaaattaaaaggagacaggggtgaagtagacagtaatgggagcgatggaggtgaggcaagccgagggccctggaaaggagggaatgccagtggagagccagggctggatcagagagccaagcagccaccgtctacatttgtcccccagataaaccgcaacattcgctttgccacttacaccaaagaaaacggcaggactctggtggtgcaggatgagcctgtaggtggggacacacctgcatctttcactccatattctacagccacaggtcagacacctttggccccagaggtgggtggagccgaaaacaaagaggcaggaaaaacactggaacaagttggccagggcatagtggcttccgcagctgtggtcactaccgccagctccaccccaaacacagtgaggatctcagacactggccttgcagcagggactgtgccagaaaaacagaaaggcagccggtcgcaggcctcgggagagaattcaagaaattctattctggcctcttctggatttggagcacctctccctagttcatcgcaacctttgacttttggaagtggaaggagccagtccaatggtgttctagccacagagaacaaacctttgggcttctcttttggctgtagctctgcacaagaggcacagaaagacactgatctctccaaaaacttgttttttcaatgcatgtcccaaactttacctaccagtaactacttcactactgtttcagagagtttggctgatgattcttctagtcgggactcattcaaacaaagccttgagagcctgagctcaggcctgtgtaaaggcagatccgttcttggaacagacactaagccaggctctaaggctggcagctctgtggaccggaaagtgcctgcagagtccatgcccaccctcactccagccttcccacggagcctcctaaatgcccgtaccccagagaatcatgaaaatctatttttacagccccccaaattgtcccgagaagagccttctaatcctttcctggcatttgtggagaaagttgaacacagccctttcagtagttttgcatctcaggcatcaggtagctcctcttctgctaccactgtcacctccaaggtggcacccagctggcccgagtctcactcctctgcagattcggcatctttagcaaagaagaaacccctcttcattacaactgactcctccaagctagtatctggtgttctgggctcagctcttaccagtgggggcccaagcctctctgccatggggaatggccgctccagctcgcccaccagcagcctcactcagcccattgagatgccaactctctcctctagccccacagaggagaggccaactgtggggcctgggcagcaggacaatcccctcctcaaaacctttagtaacgtctttggcaggcactcaggcggctttctgtcctccccggcagatttttcacaggagaacaaagctccttttgaagctgtgaaaaggttctcactggatgaacgaagcttggcttgcagacaagactcggactccagcaccaacagtgacctgtcagatttgagtgactctgaggagcagctgcaggctaagacaggcctgaagggaattccagagcacctgatggggaagctgggccccaatggggagcgcagtgctgagctgttgctgggcaaaagcaaagggaagcaggcccccaagggccggcctcggactgcccccctgaaagttggccagtcagtgctgaaagatgtaagcaaagtgaagaagctgaagcaatctggagagcccttcctgcaggatgggtcatgcatcaatgtggcacctcatctgcacaagtgtcgtgaatgccgcctggagcggtaccggaagtttaaggaacaggagcaagatgattctactgtagcctgccgtttctttcacttccggaggttgatcttcactcgaaaaggggtactccgtgtggaggggtttttaagcccccagcaaagtgaccctgatgccatgaacctgtggattccctcttcctccctagcagaagggatagatctagagacctcaaaatacatcctggccaatgttggggaccagttctgccagctcgtaatgtctgagaaggaggccatgatgatggtggagccacaccagaaagtggcatggaagcgagctgtgcgtggtgtacgggagatgtgtgatgtgtgtgaaacaactctcttcaacatccactgggtttgtcgcaaatgtggatttggggtctgccttgactgttaccggctcaggaaaagccggccacgcagtgagacagaagagatgggtgatgaagaagttttctcctggttgaagtgtgcaaagggacagtcccacgaaccagagaatctcatgcccacacaaattattcctggcacagctctttacaatattggagacatggtacatgctgcccggggcaagtggggaattaaagcaaactgcccttgtatcagtcgacagaacaaatctgtattgagacctgccgtcaccaatgggatgtcacagcttcctagcataaaccctagtgcctcttctggaaacgaaactaccttctctggcggaggaggaccggcaccagtaacaactccagagccggaccatgttcccaaagccgacagcactgacatcagatctgaagagcctctgaaaacagacagttcggcatcaaatagcaatatgctgggattataggcgtgagccaccattcccagccatatacaagacttttaacaagcttctgagatggttctgttatgcagccagggttgagagctagacttagagcagaagttttcactgggcacaagaatcatctggggaatggttaaaaatgcagattcctgtgtcccgcccagaactatgaaatcagaatctctgggggtaaagatctccatttttaacaagcactccaagtgacttcagtacaggtatcctgaagatacacttgaaacactgtcttaggaagtgagggagatgaaagatggatgacaacaaaagggagtttgaaattcagatctggtaaagaagtagtaggagagtttctccttggctgtg

SEQ ID NO: 421941 - DNA, 1558 bp, Homo sapiens
atcacgtgggggcactttcgtcttagcttttggacaagacgcaggcgcaacccacggctgctgcggggatccttgtggcccttccggtcgatggaaccaatccgtgcacagagaagcggggcgaactgaggcgagtgaagtggactctgagggctaccgctaccgccactgctgcggcaggggcgtggagggcagagggccgcggaggccgcagttgcaaacatggctcagagcagagacggcggaaacccgttcgccgagcccagcgagcttgacaacccctttcaggacccagctgtgatccagcaccgacccagccggcagtatgccacgcttgacgtctacaacccttttgagacccgggagccaccaccagcctatgagcctccagcccctgccccattgcctccaccctcagctccctccttgcagccctcgagaaagctcagccccacagaacctaagaactatggctcatacagcactcaggcctcagctgcagcagccacagctgagctgctgaagaaacaggaggagctcaaccggaaggcagaggagttggaccgaagggagcgagagctgcagcatgctgccctggggggcacagctactcgacagaacaattggccccctctaccttctttttgtccagttcagccctgctttttccaggacatctccatggagatcccccaagaatttcagaagactgtatccaccatgtactacctctggatgtgcagcacgctggctcttctcctgaacttcctcgcctgcctggccagcttctgtgtggaaaccaacaatggcgcaggctttgggctttctatcctctgggtcctccttttcactccctgctcctttgtctgctggtaccgccccatgtataaggctttccggagtgacagttcattcaatttcttcgttttcttcttcattttcttcgtccaggatgtgctctttgtcctccaggccattggtatcccaggttggggattcagtggctggatctctgctctggtggtgccgaagggcaacacagcagtatccgtgctcatgctgctggtcgccctgctcttcactggcattgctgtgctaggaattgtcatgctgaaacggatccactccttataccgccgcacaggtgccagctttcagaaggcccagcaagaatttgctgctggtgtcttctccaaccctgcggtgcgaaccgcagctgccaatgcagccgctggggctgctgaaaatgccttccgggccccgtgacccctgactgggatgccctggccctgctacttgagggagctgacttagctcccgtccctaaggtctctgggacttggagagacatcactaactgatggctcctccgtagtgctcccaatcctatggccatgactgctgaacctgacaggcgtgtggggagttcactgtgacctagtccccccatcaggccacactgctgccacctctcacacgccccaacccagcttccctctgctgtgccacggctgttgcttcggttatttaaataaaaagaaagtggaactggaactga

SEQ ID NO: 421942 - DNA, 1480 bp, Homo sapiens
atcacgtgggggcactttcgtcttagcttttggacaagacgcaggcgcaacccacggctgctgcggggatccttgtggcccttccggtcgatggaaccaatccgtgcacagagaagcggggcgaactgaggcgagtgaagtggactctgagggctaccgctaccgccactgctgcggcaggggcgtggagggcagagggccgcggaggccgcagttgcaaacatggctcagagcagagacggcggaaacccgttcgccgagcccagcgagcttgacaacccctttcagccaccaccagcctatgagcctccagcccctgccccattgcctccaccctcagctccctccttgcagccctcgagaaagctcagccccacagaacctaagaactatggctcatacagcactcaggcctcagctgcagcagccacagctgagctgctgaagaaacaggaggagctcaaccggaaggcagaggagttggaccgaagggagcgagagctgcagcatgctgccctggggggcacagctactcgacagaacaattggccccctctaccttctttttgtccagttcagccctgctttttccaggacatctccatggagatcccccaagaatttcagaagactgtatccaccatgtactacctctggatgtgcagcacgctggctcttctcctgaacttcctcgcctgcctggccagcttctgtgtggaaaccaacaatggcgcaggctttgggctttctatcctctgggtcctccttttcactccctgctcctttgtctgctggtaccgccccatgtataaggctttccggagtgacagttcattcaatttcttcgttttcttcttcattttcttcgtccaggatgtgctctttgtcctccaggccattggtatcccaggttggggattcagtggctggatctctgctctggtggtgccgaagggcaacacagcagtatccgtgctcatgctgctggtcgccctgctcttcactggcattgctgtgctaggaattgtcatgctgaaacggatccactccttataccgccgcacaggtgccagctttcagaaggcccagcaagaatttgctgctggtgtcttctccaaccctgcggtgcgaaccgcagctgccaatgcagccgctggggctgctgaaaatgccttccgggccccgtgacccctgactgggatgccctggccctgctacttgagggagctgacttagctcccgtccctaaggtctctgggacttggagagacatcactaactgatggctcctccgtagtgctcccaatcctatggccatgactgctgaacctgacaggcgtgtggggagttcactgtgacctagtccccccatcaggccacactgctgccacctctcacacgccccaacccagcttccctctgctgtgccacggctgttgcttcggttatttaaataaaaagaaagtggaactggaactga

SEQ ID NO: 421943 - DNA, 220 bp, Homo sapiens
gcggccgcctactactactactgctcgaattcaagcttctaatgatgtacggggacatgactgctgaacctgacaggcgtgtggggagttcactgtgacctagtccccccatcaggccacactgctgccacctctcacacgccccaacccagcttccctctgctgtgccacggctgttgcttcggttatttaaataaaaagaaagtggaactggaactga

SEQ ID NO: 421944 - DNA, 228 bp, Homo sapiens
agacaaagcccacaaaacaccacggggggagagggacatcttcttttatggtcacacacctgtcaggtccccccgtcatggacataggattgggagttcactgtgacctagtccccccatcaggccacactgctgccacctctcacacgccccaacccagcttccctctgctgtgccacggctgttgcttcggttatttaaataaaaagaaagtggaactggaactga

SEQ ID NO: 421945 - DNA, 1468 bp, Homo sapiens
ccaggctggtactgcccgggggttatggatccgaactgaggcgagtgaagtggactctgagggctaccgctaccgccactgctgcggcaggggcgtggagggcagagggccgcggaggccgcagttgcaaacatggctcagagcagagacggcggaaacccgttcgccgagcccagcgagcttgacaacccctttcaggacccagctgtgatccagcaccgacccagccggcagtatgccacgcttgacgtctacaacccttttgagacccgggagccaccaccagcctatgagcctccagcccctgccccattgcctccaccctcagctccctccttgcagccctcgagaaagctcagccccacagaacctaagaactatggctcatacagcactcaggcctcagctgcagcagccacagctgagctgctgaagaaacaggaggagctcaaccggaaggcagaggagttggaccgaagggagcgagagctgcagcatgctgccctggggggcacagctactcgacagaacaattggccccctctaccttctttttgtccagttcagccctgctttttccaggacatctccatggagatcccccaagaatttcagaagactgtatccaccatgtactacctctggatgtgcagcacgctggctcttctcctgaacttcctcgcctgcctggccagcttctgtgtggaaaccaacaatggcgcaggctttgggctttctatcctctgggtcctccttttcactccctgctcctttgtctgctggtaccgccccatgtataaggctttccggagtgacagttcattcaatttcttcgttttcttcttcattttcttcgtccaggatgtgctctttgtcctccaggccattggtatcccaggttggggattcagtggctggatctctgctctggtggtgccgaagggcaacacagcagtatccgtgctcatgctgctggtcgccctgctcttcactggcattgctgtgctaggaattgtcatgctgaaacggatccactccttataccgccgcacaggtgccagctttcagaaggcccagcaagaatttgctgctggtgtcttctccaaccctgcggtgcgaaccgcagctgccaatgcagccgctggggctgctgaaaatgccttccgggccccgtgacccctgactgggatgccctggccctgctacttgagggagctgacttagctcccgtccctaaggtctctgggacttggagagacatcactaactgatggctcctccgtagtgctcccaatcctatggccatgactgctgaacctgacaggcgtgtggggagttcactgtgacctagtccccccatcaggccacactgctgccacctctcacacgccccaacccagcttccctctgctgtgccacggctgttgcttcggttatttaaataaaaagaaagtggaactggaactga

SEQ ID NO: 421946 - DNA, 1946 bp, Homo sapiens
atcacgtgggggcactttcgtcttagcttttggacaagacgcaggcgcaacccacggctgctgcggggatccttgtggcccttccggtcgatggaaccaatccgtgcacagagaagcggggcgaactgaggcgagtgaagtggactctgagggctaccgctaccgccactgctgcggcaggggcgtggagggcagagggccgcggaggccgcagttgcaaacatggctcagagcagagacggcggaaacccgttcgccgagcccagcgagcttgacaacccctttcaggacccagctgtgatccagcaccgacccagccggcagtatgccacgcttgacgtctacaacccttttgagacccgggagccaccaccagcctatgagcctccagcccctgccccattgcctccaccctcagctccctccttgcagccctcgagaaagctcagccccacagaacctaagaactatggctcatacagcactcaggcctcagctgcagcagccacagctgagctgctgaagaaacaggaggagctcaaccggaaggcagaggagttggaccgaagggagcgagagctgcagcatgctgccctggggggcacagctactcgacagaacaattggccccctctaccttctttttgtccagttcagccctgctttttccaggacatctccatggagatcccccaagaatttcagaagactgtatccaccatgtactacctctggatgtgcagcacgctggctcttctcctgaacttcctcgcctgcctggccagcttctgtgtggaaaccaacaatggcgcaggctttgggctttctatcctctgggtcctccttttcactccctgctcctttgtctgctggtaccgccccatgtataaggctttccggagtgacagttcattcaatttcttcgttttcttcttcattttcttcgtccaggatgtgctctttgtcctccaggccattggtatcccaggttggggattcagtggctggatctctgctctggtggtgccgaagggcaacacagcagtatccgtgctcatgctgctggtcgccctgctcttcactggcattgctgtgctaggaattgtcatgctgaaacggatccactccttataccgccgcacaggtgccagctttcagaaggcccagcaagaatttgctgctggtgtcttctccaaccctgcggtgcgaaccgcagctgccaatgcagccgctggggctgctgaaaatgccttccgggccccgtgacccctgactgggatgccctggccctgctacttgagggagctgacttagctcccgtccctaaggtctctgggacttggagagacatcactaactgatggctcctccgtagtgctcccaatcctatggccatgactgctgaacctgacaggcgtgtggggagttcactgtgacctagtccccccatcaggccacactgctgccacctctcacacgccccaacccagcttccctctgctgtgccacggctgttgcttcggttatttaaataaaaagaaagtggaactggaactgaaaaaaaaaaaaaaaaaaaaaaaaaaaaaaaaaaaaaaaagggggcggcgcccgccccaaaaacaacccccagtcgcccccccggaccacaacgcgcgtcccccgagccaaagcccgccccgggggggcgccaaacccccccccccgcttacgcccctggtggaaacagcgggctcccagaatgtattgcacagccggcccagcagccgtcgaaccctctgtctattaatgtacccacaacacccccgggcgtgttgtgccacacaccgggggcatggaccaacgcgcagcggaattctaggggacatcacccacggccagggatataaggtgcggcccccaggtacaactcggcgcgggaacacgagcaactctttccttgagtggcg

SEQ ID NO: 421947 - DNA, 1826 bp, Homo sapiens
atcacgtgggggcactttcgtcttagcttttggacaagacgcaggcgcaacccacggctgctgcggggatccttgtggcccttccggtcgatggaaccaatccgtgcacagagaagcggggcgaactgaggcgagtgaagtggactctgagggctaccgctaccgccactgctgcggcaggggcgtggagggcagagggccgcggaggccgcagttgcaaacatggctcagagcagagacggcggaaacccgttcgccgagcccagcgagcttgacaacccctttcaggacccagctgtgatccagcaccgacccagccggcagtatgccacgcttgacgtctacaacccttttgagacccgggagccaccaccagcctatgagcctccagcccctgccccattgcctccaccctcagctccctccttgcagccctcgagaaagctcagccccacagaacctaagaactatggctcatacagcactcaggcctcagctgcagcagccacagctgagctgctgaagaaacaggaggagctcaaccggaaggcagaggagttggaccgaagggagcgagagctgcagcatgctgccctggggggcacagctactcgacagaacaattggccccctctaccttctttttgtccagttcagccctgctttttccaggacatctccatggagatcccccaagaatttcagaagactgtatccaccatgtactacctctggatgtgcagcacgctggctcttctcctgaacttcctcgcctgcctggccagcttctgtgtggaaaccaacaatggcgcaggctttgggctttctatcctctgggtcctccttttcactccctgctcctttgtctgctggtaccgccccatgtataaggctttccggagtgacagttcattcaatttcttcgttttcttcttcattttcttcgtccaggatgtgctctttgtcctccaggccattggtatcccaggttggggattcagtggctggatctctgctctggtggtgccgaagggcaacacagcagtatccgtgctcatgctgctggtcgccctgctcttcactggcattgctgtgctaggaattgtcatgctgaaacggatccactccttataccgccgcacaggtgccagctttcagaaggcccagcaagaatttgctgctggtgtcttctccaaccctgcggtgcgaaccgcagctgccaatgcagccgctggggctgctgaaaatgccttccgggccccgtgacccctgactgggatgccctggccctgctacttgagggagctgacttagctcccgtccctaaggtctctgggacttggagagacatcactaactgatggctcctccgtagtgctcccaatcctatggccatgactgctgaacctgacaggcgtgtggggagttcactgtgacctagtccccccatcaggccacactgctgccacctctcacacgccccaacccagcttccctctgctgtgccacggctgttgcttcggttatttaaataaaaagaaagtggaactggaactgaaaaacaaacatagatgcaaagaatccaataacaacaaaaaggggggggctcaaaaatacccagagggaccaattagctgacaccgtttgtggaaaggggcctaaagagagcaataaaaaagacacggcgtaaacacgacgaaaatagttgtacggggaaaccttcgtggaacggaccaccaatagccgcaaatattgatggacacttctgttcgttattacgcattaacagtaaacacgcgaatctaggcaaaagctcttcactacca

SEQ ID NO: 421948 - DNA, 1698 bp, Homo sapiens
atcacgtgggggcactttcgtcttagcttttggacaagacgcaggcgcaacccacggctgctgcggggatccttgtggcccttccggtcgatggaaccaatccgtgcacagagaagcggggcgaactgaggcgagtgaagtggactctgagggctaccgctaccgccactgctgcggcaggggcgtggagggcagagggccgcggaggccgcagttgcaaacatggctcagagcagagacggcggaaacccgttcgccgagcccagcgagcttgacaacccctttcaggtgacttgcgccagtcggcctcttttgggcggtcaggttgattcttcccggttctgtagggtcgggctaacttgtatccccatttgtgacatttgatcctgggaagagccgccacgtggggtgacagtgactccagaccagacccagctgtgatccagcaccgacccagccggcagtatgccacgcttgacgtctacaacccttttgagacccgggagccaccaccagcctatgagcctccagcccctgccccattgcctccaccctcagctccctccttgcagccctcgagaaagctcagccccacagaacctaagaactatggctcatacagcactcaggcctcagctgcagcagccacagctgagctgctgaagaaacaggaggagctcaaccggaaggcagaggagttggaccgaagggagcgagagctgcagcatgctgccctggggggcacagctactcgacagaacaattggccccctctaccttctttttgtccagttcagccctgctttttccaggacatctccatggagatcccccaagaatttcagaagactgtatccaccatgtactacctctggatgtgcagcacgctggctcttctcctgaacttcctcgcctgcctggccagcttctgtgtggaaaccaacaatggcgcaggctttgggctttctatcctctgggtcctccttttcactccctgctcctttgtctgctggtaccgccccatgtataaggctttccggagtgacagttcattcaatttcttcgttttcttcttcattttcttcgtccaggatgtgctctttgtcctccaggccattggtatcccaggttggggattcagtggctggatctctgctctggtggtgccgaagggcaacacagcagtatccgtgctcatgctgctggtcgccctgctcttcactggcattgctgtgctaggaattgtcatgctgaaacggatccactccttataccgccgcacaggtgccagctttcagaaggcccagcaagaatttgctgctggtgtcttctccaaccctgcggtgcgaaccgcagctgccaatgcagccgctggggctgctgaaaatgccttccgggccccgtgacccctgactgggatgccctggccctgctacttgagggagctgacttagctcccgtccctaaggtctctgggacttggagagacatcactaactgatggctcctccgtagtgctcccaatcctatggccatgactgctgaacctgacaggcgtgtggggagttcactgtgacctagtccccccatcaggccacactgctgccacctctcacacgccccaacccagcttccctctgctgtgccacggctgttgcttcggttatttaaataaaaagaaagtggaactggaactga

SEQ ID NO: 421949 - DNA, 1386 bp, Homo sapiens
tgggctggtacggccggaagtacgggacgaactgaggcgagtgaagtggactctgagggctaccgctaccgccactgctgcggcaggggcgtggagggcagagggccgcggaggccgcagttgcaaacatggctcagagcagagacggcggaaacccgttcgccgagcccagcgagcttgacaacccctttcagccaccaccagcctatgagcctccagcccctgccccattgcctccaccctcagctccctccttgcagccctcgagaaagctcagccccacagaacctaagaactatggctcatacagcactcaggcctcagctgcagcagccacagctgagctgctgaagaaacaggaggagctcaaccggaaggcagaggagttggaccgaagggagcgagagctgcagcatgctgccctggggggcacagctactcgacagaacaattggccccctctaccttctttttgtccagttcagccctgctttttccaggacatctccatggagatcccccaagaatttcagaagactgtatccaccatgtactacctctggatgtgcagcacgctggctcttctcctgaacttcctcgcctgcctggccagcttctgtgtggaaaccaacaatggcgcaggctttgggctttctatcctctgggtcctccttttcactccctgctcctttgtctgctggtaccgccccatgtataaggctttccggagtgacagttcattcaatttcttcgttttcttcttcattttcttcgtccaggatgtgctctttgtcctccaggccattggtatcccaggttggggattcagtggctggatctctgctctggtggtgccgaagggcaacacagcagtatccgtgctcatgctgctggtcgccctgctcttcactggcattgctgtgctaggaattgtcatgctgaaacggatccactccttataccgccgcacaggtgccagctttcagaaggcccagcaagaatttgctgctggtgtcttctccaaccctgcggtgcgaaccgcagctgccaatgcagccgctggggctgctgaaaatgccttccgggccccgtgacccctgactgggatgccctggccctgctacttgagggagctgacttagctcccgtccctaaggtctctgggacttggagagacatcactaactgatggctcctccgtagtgctcccaatcctatggccatgactgctgaacctgacaggcgtgtggggagttcactgtgacctagtccccccatcaggccacactgctgccacctctcacacgccccaacccagcttccctctgctgtgccacggctgttgcttcggttatttaaataaaaagaaagtggaactggaactga

SEQ ID NO: 421950 - DNA, 1320 bp, Homo sapiens
gtgcacagagaagcggggcgaactgaagcgagcttgacaacccctttcaggacccagctgtgatccagcaccgacccagccggcagtatgccacgcttgacgtctacaacccttttgagacccgggagccaccaccagcctatgagcctccagcccctgccccattgcctccaccctcagctccctccttgcagccctcgagaaagctcagccccacagaacctaagaactatggctcatacagcactcaggcctcagctgcagcagccacagctgagctgctgaagaaacaggaggagctcaaccggaaggcagaggagttggaccgaagggagcgagagctgcagcatgctgccctggggggcacagctactcgacagaacaattggccccctctaccttctttttgtccagttcagccctgctttttccaggacatctccatggagatcccccaagaatttcagaagactgtatccaccatgtactacctctggatgtgcagcacgctggctcttctcctgaacttcctcgcctgcctggccagcttctgtgtggaaaccaacaatggcgcaggctttgggctttctatcctctgggtcctccttttcactccctgctcctttgtctgctggtaccgccccatgtataaggctttccggagtgacagttcattcaatttcttcgttttcttcttcattttcttcgtccaggatgtgctctttgtcctccaggccattggtatcccaggttggggattcagtggctggatctctgctctggtggtgccgaagggcaacacagcagtatccgtgctcatgctgctggtcgccctgctcttcactggcattgctgtgctaggaattgtcatgctgaaacggatccactccttataccgccgcacaggtgccagctttcagaaggcccagcaagaatttgctgctggtgtcttctccaaccctgcggtgcgaaccgcagctgccaatgcagccgctggggctgctgaaaatgccttccgggccccgtgacccctgactgggatgccctggccctgctacttgagggagctgacttagctcccgtccctaaggtctctgggacttggagagacatcactaactgatggctcctccgtagtgctcccaatcctatggccatgactgctgaacctgacaggcgtgtggggagttcactgtgacctagtccccccatcaggccacactgctgccacctctcacacgccccaacccagcttccctctgctgtgccacggctgttgcttcggttatttaaataaaaagaaagtggaactggaactga

SEQ ID NO: 421951 - DNA, 1516 bp, Homo sapiens
atcacgtgggggcactttcgtcttagcttttggacaagacgcaggcgcaacccacggctgctgcggggatccttgtggcccttccggtcgatggaaccaatccgtgcacagagaagcggggcgaactgaggcgagtgaagtggactctgagggctaccgctaccgccactgctgcggcaggggcgtggagggcagagggccgcggaggccgcagttgcaaacatggctcagagcagagacggcggaaacccgttcgccgagcccagcgagcttgacaacccctttcaggacccagctgtgatccagcaccgacccagccggcagtatgccacgcttgacgtctacaacccttttgagacccgggagccaccaccagcctatgagcctccagcccctgccccattgcctccaccctcagctccctccttgcagccctcgagaaagctcagccccacagaacctaagaactatggctcatacagcactcaggcctcagctgcagcagccacagctgagctgctgaagaaacaggaggagctcaaccggaaggcagaggagttggaccgaagggagcgagagctgcagcatgctgccctggggggcacagctattcagccctgctttttccaggacatctccatggagatcccccaagaatttcagaagactgtatccaccatgtactacctctggatgtgcagcacgctggctcttctcctgaacttcctcgcctgcctggccagcttctgtgtggaaaccaacaatggcgcaggctttgggctttctatcctctgggtcctccttttcactccctgctcctttgtctgctggtaccgccccatgtataaggctttccggagtgacagttcattcaatttcttcgttttcttcttcattttcttcgtccaggatgtgctctttgtcctccaggccattggtatcccaggttggggattcagtggctggatctctgctctggtggtgccgaagggcaacacagcagtatccgtgctcatgctgctggtcgccctgctcttcactggcattgctgtgctaggaattgtcatgctgaaacggatccactccttataccgccgcacaggtgccagctttcagaaggcccagcaagaatttgctgctggtgtcttctccaaccctgcggtgcgaaccgcagctgccaatgcagccgctggggctgctgaaaatgccttccgggccccgtgacccctgactgggatgccctggccctgctacttgagggagctgacttagctcccgtccctaaggtctctgggacttggagagacatcactaactgatggctcctccgtagtgctcccaatcctatggccatgactgctgaacctgacaggcgtgtggggagttcactgtgacctagtccccccatcaggccacactgctgccacctctcacacgccccaacccagcttccctctgctgtgccacggctgttgcttcggttatttaaataaaaagaaagtggaactggaactga

SEQ ID NO: 421952 - DNA, 1438 bp, Homo sapiens
atcacgtgggggcactttcgtcttagcttttggacaagacgcaggcgcaacccacggctgctgcggggatccttgtggcccttccggtcgatggaaccaatccgtgcacagagaagcggggcgaactgaggcgagtgaagtggactctgagggctaccgctaccgccactgctgcggcaggggcgtggagggcagagggccgcggaggccgcagttgcaaacatggctcagagcagagacggcggaaacccgttcgccgagcccagcgagcttgacaacccctttcagccaccaccagcctatgagcctccagcccctgccccattgcctccaccctcagctccctccttgcagccctcgagaaagctcagccccacagaacctaagaactatggctcatacagcactcaggcctcagctgcagcagccacagctgagctgctgaagaaacaggaggagctcaaccggaaggcagaggagttggaccgaagggagcgagagctgcagcatgctgccctggggggcacagctattcagccctgctttttccaggacatctccatggagatcccccaagaatttcagaagactgtatccaccatgtactacctctggatgtgcagcacgctggctcttctcctgaacttcctcgcctgcctggccagcttctgtgtggaaaccaacaatggcgcaggctttgggctttctatcctctgggtcctccttttcactccctgctcctttgtctgctggtaccgccccatgtataaggctttccggagtgacagttcattcaatttcttcgttttcttcttcattttcttcgtccaggatgtgctctttgtcctccaggccattggtatcccaggttggggattcagtggctggatctctgctctggtggtgccgaagggcaacacagcagtatccgtgctcatgctgctggtcgccctgctcttcactggcattgctgtgctaggaattgtcatgctgaaacggatccactccttataccgccgcacaggtgccagctttcagaaggcccagcaagaatttgctgctggtgtcttctccaaccctgcggtgcgaaccgcagctgccaatgcagccgctggggctgctgaaaatgccttccgggccccgtgacccctgactgggatgccctggccctgctacttgagggagctgacttagctcccgtccctaaggtctctgggacttggagagacatcactaactgatggctcctccgtagtgctcccaatcctatggccatgactgctgaacctgacaggcgtgtggggagttcactgtgacctagtccccccatcaggccacactgctgccacctctcacacgccccaacccagcttccctctgctgtgccacggctgttgcttcggttatttaaataaaaagaaagtggaactggaactga

SEQ ID NO: 421953 - DNA, 1882 bp, Homo sapiens
atcacgtgggggcactttcgtcttagcttttggacaagacgcaggcgcaacccacggctgctgcggggatccttgtggcccttccggtcgatggaaccaatccgtgcacagagaagcggggcgaactgaggcgagtgaagtggactctgagggctaccgctaccgccactgctgcggcaggggcgtggagggcagagggccgcggaggccgcagttgcaaacatggctcagagcagagacggcggaaacccgttcgccgagcccagcgagcttgacaacccctttcaggtgacttgcgccagtcggcctcttttgggcggtcaggttgattcttcccggttctgtagggtcgggctaacttgtatccccatttgtgacatttgatcctgggaagagccgccacgtggggtgacagtgactccagaccagtgagcactctggggggcgggccctgccccttaatgggctggtgctggcagtgttggatgatggatttgaggtaaatgttgtcccagtcctgggacaacggcgtggccccgaaggtgcagtacttggagccacaggcagtttgggaatggtccctgggaattcccctaggtggcactgggtgccagctgagacccgggtctctgccctcaggacccagctgtgatccagcaccgacccagccggcagtatgccacgcttgacgtctacaacccttttgagacccgggagccaccaccagcctatgagcctccagcccctgccccattgcctccaccctcagctccctccttgcagccctcgagaaagctcagccccacagaacctaagaactatggctcatacagcactcaggcctcagctgcagcagccacagctgagctgctgaagaaacaggaggagctcaaccggaaggcagaggagttggaccgaagggagcgagagctgcagcatgctgccctggggggcacagctagacatctccatggagatcccccaagaatttcagaagactgtatccaccatgtactacctctggatgtgtgagtagtgagaagccttttggaggaagttacaggcagcacgctggctcttctcctgaacttcctcgcctgcctggccagcttctgtgtggaaaccaacaatggcgcaggctttgggctttctatcctctgggtcctccttttcactccctgctcctttgtctgctggtaccgccccatgtataaggctttccggagtgacagttcattcaatttcttcgttttcttcttcattttcttcgtccaggatgtgctctttgtcctccaggccattggtatcccaggttggggattcagtggctggatctctgctctggtggtgccgaagggcaacacagcagtatccgtgctcatgctgctggtcgccctgctcttcactggcattgctgtgctaggaattgtcatgctgaaacggatccactccttataccgccgcacaggtgccagctttcagaaggcccagcaagaatttgctgctggtgtcttctccaaccctgcggtgcgaaccgcagctgccaatgcagccgctggggctgctgaaaatgccttccgggccccgtgacccctgactgggatgccctggccctgctacttgagggagctgacttagctcccgtccctaaggtctctgggacttggagagacatcactaactgatggctcctccgtagtgctcccaatcctatggccatgactgctgaacctgacaggcgtgtggggagttcactgtgacctagtccccccatcaggccacactgctgccacctctcacacgccccaacccagcttccctctgctgtgccacggctgttgcttcggttatttaaataaaaagaaagtggaactggaactga

SEQ ID NO: 421954 - DNA, 863 bp, Homo sapiens
cggacgcgtgggtccggacgcgtgggtcgacccacgcggtccgggcagcacgctggctcttctcctgaacttcctcgcctgcctggccagcttctgtgtggaaaccaacaatggcgcaggctttgggctttctatcctctgggtcctccttttcactccctgctcctttgtctgctggtaccgccccatgtataaggctttccggagtgacagttcattcaatttcttcgttttcttcttcattttcttcgtccaggatgtgctctttgtcctccaggccattggtatcccaggttggggattcagtggctggatctctgctctggtggtgccgaagggcaacacagcagtatccgtgctcatgctgctggtcgccctgctcttcactggcattgctgtgctaggaattgtcatgctgaaacggatccactccttataccgccgcacaggtgccagctttcagaaggcccagcaagaatttgctgctggtgtcttctccaaccctgcggtgcgaaccgcagctgccaatgcagccgctggggctgctgaaaatgccttccgggccccgtgacccctgactgggatgccctggccctgctacttgagggagctgacttagctcccgtccctaaggtctctgggacttggagagacatcactaactgatggctcctccgtagtgctcccaatcctatggccatgactgctgaacctgacaggcgtgtggggagttcactgtgacctagtccccccatcaggccacactgctgccacctctcacacgccccaacccagcttccctctgctgtgccacggctgttgcttcggttatttaaataaaaagaaagtggaactggaactga

SEQ ID NO: 421955 - DNA, 1296 bp, Homo sapiens
atcacgtgggggcactttcgtcttagcttttggacaagacgcaggcgcaacccacggctgctgcggggatccttgtggcccttccggtcgatggaaccaatccgtgcacagagaagcggggcgaactgaggcgagtgaagtggactctgagggctaccgctaccgccactgctgcggcaggggcgtggagggcagagggccgcggaggccgcagttgcaaacatggctcagagcagagacggcggaaacccgttcgccgagcccagcgagcttgacaacccctttcaggacccagctgtgatccagcaccgacccagccggcagtatgccacgcttgacgtctacaacccttttgagacccgggagccaccaccagcctatgagcctccagcccctgccccattgcctccaccctcagctccctccttgcagccctcgagaaagctcagccccacagaacctaagaactatggctcatacagcactcaggcctcagctgcagcagccacagctgagctgctgaagaaacaggaggagctcaaccggaaggcagaggagttggaccgaagggagcgagagctgcagcatgctgccctggggggcacagctactcgacagaacaattggccccctctaccttctttttgtccagttcagccctgctttttccaggacatctccatggagatcccccaagaatttcagaagactgtatccaccatgtactacctctggatgttggctggatctctgctctggtggtgccgaagggcaacacagcagtatccgtgctcatgctgctggtcgccctgctcttcactggcattgctgtgctaggaattgtcatgctgaaacggatccactccttataccgccgcacaggtgccagctttcagaaggcccagcaagaatttgctgctggtgtcttctccaaccctgcggtgcgaaccgcagctgccaatgcagccgctggggctgctgaaaatgccttccgggccccgtgacccctgactgggatgccctggccctgctacttgagggagctgacttagctcccgtccctaaggtctctgggacttggagagacatcactaactgatggctcctccgtagtgctcccaatcctatggccatgactgctgaacctgacaggcgtgtggggagttcactgtgacctagtccccccatcaggccacactgctgccacctctcacacgccccaacccagcttccctctgctgtgccacggctgttgcttcggttatttaaataaaaagaaagtggaactggaactga

SEQ ID NO: 421956 - DNA, 632 bp, Homo sapiens
atcacgtgggggcactttcgtcttagcttttggacaagacgcaggcgcaacccacggctgctgcggggatccttgtggcccttccggtcgatggaaccaatccgtgcacagagaagcggggcgaactgaggcgagtgaagtggactctgagggctaccgctaccgccactgctgcggcaggggcgtggagggcagagggccgcggaggccgcagttgcaaacatggctcagagcagagacggcggaaacccgttcgccgagcccagcgagcttgacaacccctttcaggacccagctgtgatccagcaccgacccagccggcagtatgccacgcttgacgtctacaacccttttgagacccgggagccaccaccagcctatgagcctccagcccctgccccattgcctccaccctcagctccctccttgcagccctcgagaaagctcagccccacagaacctaagaacatgactgctgaacctgacaggcgtgtggggagttcactgtgacctagtccccccatcaggccacactgctgccacctctcacacgccccaacccagcttccctctgctgtgccacggctgttgcttcggttatttaaataaaaagaaagtggaactggaactga

SEQ ID NO: 421957 - DNA, 1423 bp, Homo sapiens
cattgtgtgtttgcagctggtgtcttctccaaccctgcggtgcgaaccgcagctgccaatgcggccgcggaggccgcagttgcaaacatggctcagagcagagacggcggaaacccgttcgccgagcccagcgagcttgacaacccctttcaggacccagctgtgatccagcaccgacccagccggcagtatgccacgcttgacgtctacaacccttttgagacccgggagccaccaccagcctatgagcctccagcccctgccccattgcctccaccctcagctccctccttgcagccctcgagaaagctcagccccacagaacctaagaactatggctcatacagcactcaggcctcagctgcagcagccacagctgagctgctgaagaaacaggaggagctcaaccggaaggcagaggagttggaccgaagggagcgagagctgcagcatgctgccctggggggcacagctactcgacagaacaattggccccctctaccttctttttgtccagttcagccctgctttttccaggacatctccatggagatcccccaagaatttcagaagactgtatccaccatgtactacctctggatgtgcagcacgctggctcttctcctgaacttcctcgcctgcctggccagcttctgtgtggaaaccaacaatggcgcaggctttgggctttctatcctctgggtcctccttttcactccctgctcctttgtctgctggtaccgccccatgtataaggctttccggagtgacagttcattcaatttcttcgttttcttcttcattttcttcgtccaggatgtgctctttgtcctccaggccattggtatcccaggttggggattcagtggctggatctctgctctggtggtgccgaagggcaacacagcagtatccgtgctcatgctgctggtcgccctgctcttcactggcattgctgtgctaggaattgtcatgctgaaacggatccactccttataccgccgcacaggtgccagctttcagaaggcccagcaagaatttgctgctggtgtcttctccaaccctgcggtgcgaaccgcagctgccaatgcagccgctggggctgctgaaaatgccttccgggccccgtgacccctgactgggatgccctggccctgctacttgagggagctgacttagctcccgtccctaaggtctctgggacttggagagacatcactaactgatggctcctccgtagtgctcccaatcctatggccatgactgctgaacctgacaggcgtgtggggagttcactgtgacctagtccccccatcaggccacactgctgccacctctcacacgccccaacccagcttccctctgctgtgccacggctgttgcttcggttatttaaataaaaagaaagtggaactggaactga

SEQ ID NO: 421958 - DNA, 1506 bp, Homo sapiens
atcacgtgggggcactttcgtcttagcttttggacaagacgcaggcgcaacccacggctgctgcggggatccttgtggcccttccggtcgatggaaccaatccgtgcacagagaagcggggcgaactgaggcgagtgaagtggactctgagggctaccgctaccgccactgctgcggcaggggcgtggagggcagagggccgcggaggccgcagttgcaaacatggctcagagcagagacggcggaaacccgttcgccgagcccagcgagcttgacaacccctttcaggacccagctgtgatccagcaccgacccagccggcagtatgccacgcttgacgtctacaacccttttgagacccgggagccaccaccagcctatgagcctccagcccctgccccattgcctccaccctcagctccctccttgcagccctcgagaaagctcagccccacagaacctaagaactatggctcatacagcactcaggcctcagctgcagcagccacagctgagctgctgaagaaacaggaggagctcaaccggaaggcagaggagttggaccgaagggagcgagagctgcagcatgctgccctggggggcacagctactcgacagaacaattggccccctctaccttctttttgtccagttcagccctgctttttccaggacatctccatggagatcccccaagaatttcagaagactgtatccaccatgtactacctctggatgtgcagcacgctggctcttctcctgaacttcctcgcctgcctggccagcttctgtgtggaaaccaacaatggcgcaggctttgggctttctatcctctgggtcctccttttcactccctgctcctttgtctgctggtaccgccccatgtataaggctttccggatgtgctctttgtcctccaggccattggtatcccaggttggggattcagtggctggatctctgctctggtggtgccgaagggcaacacagcagtatccgtgctcatgctgctggtcgccctgctcttcactggcattgctgtgctaggaattgtcatgctgaaacggatccactccttataccgccgcacaggtgccagctttcagaaggcccagcaagaatttgctgctggtgtcttctccaaccctgcggtgcgaaccgcagctgccaatgcagccgctggggctgctgaaaatgccttccgggccccgtgacccctgactgggatgccctggccctgctacttgagggagctgacttagctcccgtccctaaggtctctgggacttggagagacatcactaactgatggctcctccgtagtgctcccaatcctatggccatgactgctgaacctgacaggcgtgtggggagttcactgtgacctagtccccccatcaggccacactgctgccacctctcacacgccccaacccagcttccctctgctgtgccacggctgttgcttcggttatttaaataaaaagaaagtggaactggaactga

SEQ ID NO: 421959 - DNA, 1387 bp, Homo sapiens
atcacgtgggggcactttcgtcttagcttttggacaagacgcaggcgcaacccacggctgctgcggggatccttgtggcccttccggtcgatggaaccaatccgtgcacagagaagcggggcgaactgaggcgagtgaagtggactctgagggctaccgctaccgccactgctgcggcaggggcgtggagggcagagggccgcggaggccgcagttgcaaacatggctcagagcagagacggcggaaacccgttcgccgagcccagcgagcttgacaacccctttcagccaccaccagcctatgagcctccagcccctgccccattgcctccaccctcagctccctccttgcagccctcgagaaagctcagccccacagaacctaagaactatggctcatacagcactcaggcctcagctgcagcagccacagctgagctgctgaagaaacaggaggagctcctaccttctttttgtccagttcagccctgctttttccaggacatctccatggagatcccccaagaatttcagaagactgtatccaccatgtactacctctggatgtgcagcacgctggctcttctcctgaacttcctcgcctgcctggccagcttctgtgtggaaaccaacaatggcgcaggctttgggctttctatcctctgggtcctccttttcactccctgctcctttgtctgctggtaccgccccatgtataaggctttccggagtgacagttcattcaatttcttcgttttcttcttcattttcttcgtccaggatgtgctctttgtcctccaggccattggtatcccaggttggggattcagtggctggatctctgctctggtggtgccgaagggcaacacagcagtatccgtgctcatgctgctggtcgccctgctcttcactggcattgctgtgctaggaattgtcatgctgaaacggatccactccttataccgccgcacaggtgccagctttcagaaggcccagcaagaatttgctgctggtgtcttctccaaccctgcggtgcgaaccgcagctgccaatgcagccgctggggctgctgaaaatgccttccgggccccgtgacccctgactgggatgccctggccctgctacttgagggagctgacttagctcccgtccctaaggtctctgggacttggagagacatcactaactgatggctcctccgtagtgctcccaatcctatggccatgactgctgaacctgacaggcgtgtggggagttcactgtgacctagtccccccatcaggccacactgctgccacctctcacacgccccaacccagcttccctctgctgtgccacggctgttgcttcggttatttaaataaaaagaaagtggaactggaactga

SEQ ID NO: 421960 - DNA, 1418 bp, Homo sapiens
atcacgtgggggcactttcgtcttagcttttggacaagacgcaggcgcaacccacggctgctgcggggatccttgtggcccttccggtcgatggaaccaatccgtgcacagagaagcggggcgaactgaggcgagtgaagtggactctgagggctaccgctaccgccactgctgcggcaggggcgtggagggcagagggccgcggaggccgcagttgcaaacatggctcagagcagagacggcggaaacccgttcgccgagcccagcgagcttgacaacccctttcagccaccaccagcctatgagcctccagcccctgccccattgcctccaccctcagctccctccttgcagccctcgagaaagctcagccccacagaacctaagaactatggctcatacagcactcaggcctcagctgcagcagccacagctgagctgctgaagaaacaggaggagctcaaccggaaggcagaggagttggaccgaagggagcgagagctgcagcatgctgccctggggggcacagctagacatctccatggagatcccccaagaatttcagaagactgtatccaccatgtactacctctggatgtgcagcacgctggctcttctcctgaacttcctcgcctgcctggccagcttctgtgtggaaaccaacaatggcgcaggctttgggctttctatcctctgggtcctccttttcactccctgctcctttgtctgctggtaccgccccatgtataaggctttccggagtgacagttcattcaatttcttcgttttcttcttcattttcttcgtccaggatgtgctctttgtcctccaggccattggtatcccaggttggggattcagtggctggatctctgctctggtggtgccgaagggcaacacagcagtatccgtgctcatgctgctggtcgccctgctcttcactggcattgctgtgctaggaattgtcatgctgaaacggatccactccttataccgccgcacaggtgccagctttcagaaggcccagcaagaatttgctgctggtgtcttctccaaccctgcggtgcgaaccgcagctgccaatgcagccgctggggctgctgaaaatgccttccgggccccgtgacccctgactgggatgccctggccctgctacttgagggagctgacttagctcccgtccctaaggtctctgggacttggagagacatcactaactgatggctcctccgtagtgctcccaatcctatggccatgactgctgaacctgacaggcgtgtggggagttcactgtgacctagtccccccatcaggccacactgctgccacctctcacacgccccaacccagcttccctctgctgtgccacggctgttgcttcggttatttaaataaaaagaaagtggaactggaactga

SEQ ID NO: 421961 - DNA, 1416 bp, Homo sapiens
ccaggctggtactgcccgggggttatggatccgaactgaggcgagtgaagtggactctgagggctaccgctaccgccactgctgcggcaggggcgtggagggcagagggccgcggaggccgcagttgcaaacatggctcagagcagagacggcggaaacccgttcgccgagcccagcgagcttgacaacccctttcaggacccagctgtgatccagcaccgacccagccggcagtatgccacgcttgacgtctacaacccttttgagacccgggagccaccaccagcctatgagcctccagcccctgccccattgcctccaccctcagctccctccttgcagccctcgagaaagctcagccccacagaacctaagaactatggctcatacagcactcaggcctcagctgcagcagccacagctgagctgctgaagaaacaggaggagctcaaccggaaggcagaggagttggaccgaagggagcgagagctgcagcatgctgccctggggggcacagctactcgacagaacaattggccccctctaccttctttttgtccagttcagccctgctttttccaggacatctccatggagatcccccaagaatttcagaagactgtatccaccatgtactacctctggatgtgcagcacgctggctcttctcctgaacttcctcgcctgcctggccagcttctgtgtggaaaccaacaatggcgcaggctttgggctttctatcctctgggtcctccttttcactccctgctcctttgtctgctggtaccgccccatgtataaggctttccggatgtgctctttgtcctccaggccattggtatcccaggttggggattcagtggctggatctctgctctggtggtgccgaagggcaacacagcagtatccgtgctcatgctgctggtcgccctgctcttcactggcattgctgtgctaggaattgtcatgctgaaacggatccactccttataccgccgcacaggtgccagctttcagaaggcccagcaagaatttgctgctggtgtcttctccaaccctgcggtgcgaaccgcagctgccaatgcagccgctggggctgctgaaaatgccttccgggccccgtgacccctgactgggatgccctggccctgctacttgagggagctgacttagctcccgtccctaaggtctctgggacttggagagacatcactaactgatggctcctccgtagtgctcccaatcctatggccatgactgctgaacctgacaggcgtgtggggagttcactgtgacctagtccccccatcaggccacactgctgccacctctcacacgccccaacccagcttccctctgctgtgccacggctgttgcttcggttatttaaataaaaagaaagtggaactggaactga

SEQ ID NO: 421962 - DNA, 894 bp, Homo sapiens
atcacgtgggggcactttcgtcttagcttttggacaagacgcaggcgcaacccacggctgctgcggggatccttgtggcccttccggtcgatggaaccaatccgtgcacagagaagcggggcgaactgaggcgagtgaagtggactctgagggctaccgctaccgccactgctgcggcaggggcgtggagggcagagggccgcggaggccgcagttgcaaacatggctcagagcagagacggcggaaacccgttcgccgagcccagcgagcttgacaacccctttcaggacccagctgtgatccagcaccgacccagccggcagtatgccacgcttgacgtctacaacccttttgagacccgggagccaccaccagcctatgagcctccagcccctgccccattgcctccaccctcagctccctccttgcagccctcgagaaagctcagccccacagaacctaagaactatggctcatacagcactcaggcctcagctgcagcagccacagctgagctgctgaagaaacaggaggagctcaaccggaaggcagaggagttggaccgaagggagcgagagctgcagcatgctgccctggggggcacagctactcgacagaacaattggccccctctaccttctttttgtccagttcagccctgctttttccaggacatctccatggagatcccccaagaatttcagaagactgtatccaccatgtactacctctggatgtgcagcacgctggctcttctcctgaacttcctcgcctgcctggccagcttctgtgtggaaaccaacaatggcgcaggctttgggctttctatcctctgctgtgccacggctgttgcttcggttatttaaataaaaagaaagtggaactggaactga

SEQ ID NO: 421963 - DNA, 1442 bp, Homo sapiens
atcacgtgggggcactttcgtcttagcttttggacaagacgcaggcgcaacccacggctgctgcggggatccttgtggcccttccggtcgatggaaccaatccgtgcacagagaagcggggcgaactgaggcgagtgaagtggactctgagggctaccgctaccgccactgctgcggcaggggcgtggagggcagagggccgcggaggccgcagttgcaaacatggctcagagcagagacggcggaaacccgttcgccgagcccagcgagcttgacaacccctttcaggtgacttgcgccagtcggcctcttttgggcggtcaggttgattcttcccggttctgtagggtcgggctaacttgtatccccatttgtgacatttgatcctgggaagagccgccacgtggggtgacagtgactccagaccagtgagcactctggggggcgggccctgccccttaatgggctggtgctggcagtgttggatgatggatttgaggtaaatgttgtcccagtcctgggacaacggcgtggccccgaaggtgcagtacttggagccacaggcagtttgggaatggtccctgggaattcccctaggtggcactgggtgccagctgagacccgggtctctgccctcaggacccagctgtgatccagcaccgacccagccggcagtatgccacgcttgacgtctacaacccttttgagacccgggaggtgagctactggagagcataggagttcaaggaagggaagggtttgccagtgagacaagttagcttgggtacaggggacttttctgcatgcacaggaaggaagaggcactgtgatcttagttccctgagagaggctagtcagccatgggatgcctcatccttctagggccaccagggccaccaacccaaatggtttgagctctaaaagtcagtcctgggaagatctggaggctggcaaggccttaaccaatgttctgtatgggaaggctttcttgaagaaaataaaggttggggctggttggagtttaggttaggtgtgcagtttgaaagcaaggaatgaggaggactacacctgtttgtcccactggattagaagatggtgagttgtaagaatttaaggggttttcatggtacttaaaacttaaaaaaaaaagccaagcatggtgtgcatgcctgtaatcccacttgggaggctgaggtgggaggattgcttgagcccaggaatttgatggagaccatcctgggcaacagcgagacccccatctcttgaaacgttttaaaaattggctaggtgtagtggcacatgcctgtagtccttgctacttgggaggctgggatggaaagactgcttgggcccaggagtttgaggcttcgatgagtgatgattgcaccactgcactccagcctgggtggcagagagacaaccccacactccatccccagaag

SEQ ID NO: 421964 - DNA, 1562 bp, Homo sapiens
cgcaacggacctcgccctggtggtgcacgcccgggctgggcgctcagaggtcgggtgggcgcccactccgttcgctgcgcgcacagcgcccggcgagaggctcggagtttgatcacacacagcgtccggcttcctgtccccagcgccccctcccgccccgtttcccttgcccctccctctccccggcccgatccgcccgccggctccccctcccccgatccctcgggtcccgggatgggggggcggtgaggcaggcacagccccccgcccccatggccgcccgtcggagccagaggcggagggggcgccggggggagccgggcaccgccctgctggtcccgctcgcgctgggcctgggcctggcgctggcctgcctcggcctcctgctggccgtggtcagtttggggagccgggcatcgctgtccgcccaggagcctgcccaggaggagctggtggcagaggaggaccaggacccgtcggaactgaatccccagacagaagaaagccaggatcctgcgcctttcctgaaccgactagttcggcctcgcagaagtgcacctaaaggccggaaaacacgggctcgaagagcgatcgcagcccattatgaagttcatccacgacctggacaggacggagcgcaggcaggtgtggacgggacagtgagtggctgggaggaagccagaatcaacagctccagccctctgcgctacaaccgccagatcggggagtttatagtcacccgggctgggctctactacctgtactgtcaggtgcactttgatgaggggaaggctgtctacctgaagctggacttgctggtggatggtgtgctggccctgcgctgcctggaggaattctcagccactgcggccagttccctcgggccccagctccgcctctgccaggtgtctgggctgttggccctgcggccagggtcctccctgcggatccgcaccctcccctgggcccatctcaaggctgcccccttcctcacctacttcggactcttccaggttcactgaggggccctggtctccccgcagtcgtcccaggctgccggctcccctcgacagctctctgggcacccggtcccctctgccccaccctcagccgctctttgctccagacctgcccctccctctagaggctgcctgggcctgttcacgtgttttccatcccacataaatacagtattcccactcttatcttacaactcccccaccgcccactctccacctcactagctccccaatccctgaccctttgaggcccccagtgatctcgactcccccctggccacagacccccagggcattgtgttcactgtactctgtgggcaaggatgggtccagaagaccccacttcaggcactaagaggggctggacctggcggcaggaagccaaagagactgggcctaggccaggagttcccaaatgtgaggggcgagaaacaagacaagctcctcccttgagaattccctgtggatttttaaaacagatattatttttattattattgtgacaaaatgttgataaatggatattaaatagaataagtcata

SEQ ID NO: 421965 - DNA, 881 bp, Homo sapiens
cgcaacggacctcgccctggtggtgcacgcccgggctgggcgctcagaggtcgggtgggcgcccactccgttcgctgcgcgcacagcgcccggcgagaggctcggagtttgatcacacacagcgtccggcttcctgtccccagcgccccctcccgccccgtttcccttgcccctccctctccccggcccgatccgcccgccggctccccctcccccgatccctcgggtcccgggatgggggggcggtgaggcaggcacagccccccgcccccatggccgcccgtcggagccagaggcggagggggcgccggggggagccgggcaccgccctgctggtcccgctcgcgctgggcctgggcctggcgctggcctgcctcggcctcctgctggccgtggtcagtttggggagccgggcatcgctgtccgcccaggagcctgcccaggaggagctggtggcagaggaggaccaggacccgtcggaactgaatccccagacagaagaaagccaggatcctgcgcctttcctgaaccgactagttcggcctcgcagaagtgcacctaaaggccggaaaacacgggctcgaagagcgatcgcagcccattatgaagttcatccacgacctggacaggacggagcgcaggcagatggaggttacacaacttgtctgaggccatgagatactaagtggtggagccaagatttgaacccagctagaatgtgcctgtgtactggacatggtctgcatgaaaggcgaggtggctggtgcaggggtgaggggtccatgcaggggccacatccaaaaaggggagagggaagtttccagaaagaagagaggacacatctcccaccattaccagagggtcaaaggagaacaagagac

SEQ ID NO: 421966 - DNA, 1120 bp, Homo sapiens
ggcacgaggccaggcagaggaggaccaggacccgtcggaactgaatccccagacagaagaaagccaggatcctgcgcctttcctgaaccgactagttcggcctcgcagaagtgcacctaaaggccggaaaacacgggctcgaagagcgatcgcagcccattatgaagttcatccacgacctggacaggacggagcgcaggcaggtgtggacgggacagtgagtggctgggaggaagccagaatcaacagctccagccctctgcgctacaaccgccagatcggggagtttatagtcacccgggctgggctctactacctgtactgtcaggtgcactttgatgaggggaaggctgtctacctgaagctggacttgctggtggatggtgtgctggccctgcgctgcctggaggaattctcagccactgcggccagttccctcgggccccagctccgcctctgccaggtgtctgggctgttggccctgcggccagggtcctccctgcggatccgcaccctcccctgggcccatctcaaggctgcccccttcctcacctacttcggactcttccaggttcactgaggggccctggtctccccgcagtcgtcccaggctgccggctcccctcgacagctctctgggcacccggtcccctctgccccaccctcagccgctctttgctccagacctgcccctccctctagaggctgcctgggcctgttcacgtgttttccatcccacataaatacagtattcccactcttatcttacaactcccccaccgcccactctccacctcactagctccccaatccctgaccctttgaggcccccagtgatctcgactcccccctggccacagacccccagggcattgtgttcactgtactctgtgggcaaggatgggtccagaagaccccacttcaggcactaagaggggctggacctggcggcaggaagccaaagagactgggcctaggccaggagttcccaaatgtgaggggcgagaaacaagacaagctcctcccttgagaattccctgtggatttttaaaacagatattatttttattattattgtgacaaaatgttgataaatggatattaaatagaataagtcata

SEQ ID NO: 421967 - DNA, 1421 bp, Homo sapiens
cgcaacggacctcgccctggtggtgcacgcccgggctgggcgctcagaggtcgggtgggcgcccactccgttcgctgcgcgcacagcgcccggcgagaggctcggagtttgatcacacacagcgtccggcttcctgtccccagcgccccctcccgccccgtttcccttgcccctccctctccccggcccgatccgcccgccggctccccctcccccgatccctcgggtcccgggatgggggggcggtgaggcaggcacagccccccgcccccatggccgcccgtcggagccagaggcggagggggcgccggggggagccgggcaccgccctgctggtcccgctcgcgctgggcctgggcctggcgctggcctgcctcggcctcctgctggccgtggtcagtttggggagccgggcatcgctgtccgcccaggagcctgcccaggaggagctggtggcagaggaggaccaggacccgtcggaactgaatccccagacagaagaaagccaggatcctgcgcctttcctgaaccgactagttcggcctcgcagaagtgcacctaaaggccggaaaacacgggctcgaagagcgatcgcagcccattatgaagttcatccacgacctggacaggacggagcgcaggcaggtgtggacgggacagtgagtggctgggaggaagccagaatcaacagctccagccctctgcgctacaaccgccagatcggggagtttatagtcacccgggctgggctctactacctgtactgtcaggtgcactttgatgaggggaaggctgtctacctgaagctggacttgctggtggatggtgtgctggccctgcgctgcctggaggaattctcagccactgcggccagttccctcgggccccagctccgcctctgccaggtgtctgggctgttggccctgcggccagggtcctccctgcggatccgcaccctcccctgggcccatctcaaggctgcccccttcctcacctacttcggactcttccaggttcactgaggggccctggtctccccgcagtcgtcccaggctgccggctcccctcgacagctctctgggcacccggtcccctctgccccaccctcagccgctctttgctccagacctgcccctccctctagaggctgcctgggcctgttcacgtgttttccatcccacataaatacagtattcccactcttatcttacaactcccccaccgcccacttaagaggggctggacctggcggcaggaagccaaagagactgggcctaggccaggagttcccaaatgtgaggggcgagaaacaagacaagctcctcccttgagaattccctgtggatttttaaaacagatattatttttattattattgtgacaaaatgttgataaatggatattaaatagaataagtcata

SEQ ID NO: 421968 - DNA, 1127 bp, Homo sapiens
agatatgtgagtctgcgtggaagaggggtgcggttgtgtacagggaactgaatccccagacagaagaaagccaggatcctgcgcctttcctgaaccgactagttcggcctcgcagaagtgcacctaaaggccggaaaacacgggctcgaagagcgatcgcagcccattatgaagttcatccacgacctggacaggacggagcgcaggcaggtgtggacgggacagtgagtggctgggaggaagccagaatcaacagctccagccctctgcgctacaaccgccagatcggggagtttatagtcacccgggctgggctctactacctgtactgtcaggtgcactttgatgaggggaaggctgtctacctgaagctggacttgctggtggatggtgtgctggccctgcgctgcctggaggaattctcagccactgcggccagttccctcgggccccagctccgcctctgccaggtgtctgggctgttggccctgcggccagggtcctccctgcggatccgcaccctcccctgggcccatctcaaggctgcccccttcctcacctacttcggactcttccaggttcactgaggggccctggtctccccgcagtcgtcccaggctgccggctcccctcgacagctctctgggcacccggtcccctctgccccaccctcagccgctctttgctccagacctgcccctccctctagaggctgcctgggcctgttcacgtgttttccatcccacataaatacagtattcccactcttatcttacaactcccccaccgcccactctccacctcactagctccccaatccctgaccctttgaggcccccagtgatctcgactcccccctggccacagacccccagggcattgtgttcactgtactctgtgggcaaggatgggtccagaagaccccacttcaggcactaagaggggctggacctggcggcaggaagccaaagagactgggcctaggccaggagttcccaaatgtgaggggcgagaaacaagacaagctcctcccttgagaattccctgtggatttttaaaacagatattatttttattattattgtgacaaaatgttgataaatggatattaaatagaataagtcata

SEQ ID NO: 421969 - DNA, 1917 bp, Homo sapiens
cgcaacggacctcgccctggtggtgcacgcccgggctgggcgctcagaggtcgggtgggcgcccactccgttcgctgcgcgcacagcgcccggcgagaggctcggagtttgatcacacacagcgtccggcttcctgtccccagcgccccctcccgccccgtttcccttgcccctccctctccccggcccgatccgcccgccggctccccctcccccgatccctcgggtcccgggatgggggggcggtgaggcaggcacagccccccgcccccatggccgcccgtcggagccagaggcggagggggcgccggggggagccgggcaccgccctgctggtcccgctcgcgctgggcctgggcctggcgctggcctgcctcggcctcctgctggccgtggtcagtttggggagccgggcatcgctgtccgcccaggagcctgcccaggaggagctggtggcagaggaggaccaggacccgtcggaactgaatccccagacagaagaaagccaggatcctgcgcctttcctgaaccgactagttcggcctcgcagaagtgcacctaaaggccggaaaacacgggctcgaagagcgatcgcagcccattatgaagttcatccacgacctggacaggacggagcgcaggcaggtgtggacgggacagtgagtggctgggaggaagccagaatcaacagctccagccctctgcgctacaaccgccagatcggggagtttatagtcacccgggctgggctctactacctgtactgtcaggtgcactttgatgaggggaaggctgtctacctgaagctggacttgctggtggatggtgtgctggccctgcgctgcctggaggaattctcagccactgcggccagttccctcgggccccagctccgcctctgccaggtgtctgggctgttggccctgcggccagggtcctccctgcggatccgcaccctcccctgggcccatctcaaggctgcccccttcctcacctacttcggactcttccaggttcactgaggggccctggtctccccgcagtcgtcccaggctgccggctcccctcgacagctctctgggcacccggtcccctctgccccaccctcagccgctctttgctccagacctgcccctccctctagaggctgcctgggcctgttcacgtgttttccatcccacataaatacagtattcccactcttatcttacaactcccccaccgcccactctccacctcactagctccccaatccctgaccctttgaggcccccagtgatctcgactcccccctggccacagacccccagggcattgtgttcactgtactctgtgggcaaggatgggtccagaagaccccacttcaggcactaagaggggctggacctggcggcaggaagccaaagagactgggcctaggccaggagttcccaaatgtgaggggcgagaaacaagacaagctcctcccttgagaattccctgtggatttttaaaacagatattatttttattattattgtgacaaaatgttgataaatggatattaaatagaataagtcatagtctctctctttattggggctcaggggacactctcagggtagctgggggccacgtgaaggggggcgttgcggagcggcacagctggaactccgggatgatgttcaggcttgggggcggggacctccatgcctccagcccccaggtgggagcagaggtaggaaggcacactgcccaggaaaaaaatcaatcctccgcccaaggtacagcagaagcggcctccttggcctaggaggcagacttcctcctgcggggaaatcccttcctggctgggaggagcaggggcccttcctcttggtggcctcggacattcagcaggtgctggcacaggccctggctgggaggtggggcgggcag

SEQ ID NO: 421970 - DNA, 2017 bp, Homo sapiens
catacacacacacacacacacacaaattagccgggcatggtggcacacgcctgtagtcccagcttcttgggaagctgaggcatgagaattgcctgaacctggaaggcggaggctacagtgagctgagattgcgccactgcactccagcctgggtgacagagcgagactctgtttcaggaaaaaaagaacagaaatacctgagactgggtaatttataaataaaagaggtttaagtggctcacagttctgcaggctgtgtaagcatggcaccagtgtctgctcggcttctggggagccctcagggagctttactcatggtgaaaggctaagtgggagcagagatgtcacatggcgaagcaggagcaagagagcagggaggtgccacacaccttcaaacaaccagattttgtgaaaactcactcattactgcaaggacagcaccaagccatgagggatccacccgcaggacccaaacaccttctattagggccaaccttcaacattggggattacatttcaatgtgagattggagggacaagtatcccaactatatcaggcagaatatatgcattgatatatattgaaattataacattctctataatcaagtgactgtaaattatgtcgaatctgaccctggggaatgtgttatctaaagaatttgactaagaatcaggaactctgtgtccatgtcctggatgtatttctgtatgttcctataactctggacaaatcattaaacctctctgggcagcattttcctcatccatgaaatgaatgtgttcaatttgatctcaaagatctttccaaaatattaaatgccattaatcatggaatagaccaaattattatatcacaggaacttgaatccagccagagaaaaattccctggacaattggataaacaaatgtgattgctaccttatggatacaacggacttttacatttctttttagcctttttagtcagttgagggtaactcaagcagagtatgtccaatcattagcttcctttgatatttacattacaggtaaaaacggccaaaaatatattttaaggtctctccccaaatgtttttatttttaaactatcaatgttgtttaaaataatcatgtacttgttgagttcctgaggtttggaacaaattacacataaaatttagaatactttatttctgaaaagcatatacatatatgttatgtttatttttccttgttgattagaaaggtgatggaatatgtgacaatgcaaaatgaattgataatttttctgtattttgagtgaaagttgtctgtaatatgtcaagcaagaatgttataattctacagtaatgtgtgacttcatgacagagctacattctgagaaatttgtcattaggtgatttcatcattgtgtgaacatcatgaagtgtacttacacaaacctaggtggtagagcctactgcacacctgggctagatggcaaagtctgtcgcttctgggctacagacctgtacagcatggtactgtattgaatactgtaggcaactgtaacacaatggtatctgtgtaatctaaacatagaacagataatacattgtgctacaatgtaacaatggctgtggcatcactaggtgataggaatttttcagttccattataatcttataggatctctgtcatatgtggtcaattgttgatcgaaacatgactgtatgtcgtattttcagaaaatggaataggtaatcatcacttgtgtgaattttaatcaaatgacttaggaaagaaactggatgtttcaaaagctgttgcatttattacaaatgtcacaaatacagctcttgccttttgagaatgttggagagatgtctttaaaaaatatgtttgtgtgtaaaaatgtgtctgtatgcaatagctagaaaaatgcctgtgtcttaagtcattactcatgttctaatttttgttctttgtactatttatctgtatgcttgttcttcagtatttcagactcaaaataaatttatttttttatgttaa

SEQ ID NO: 421971 - DNA, 2216 bp, Homo sapiens
gcgacggaaggttgcagaggcagtggggcgccgaccaagtggaagctgagccaccacctcccactccccgcgccgccccccagaaggacgcactgctctgattggcccggaagggttcaggagctgcccagcctttgggctcggggccaaaggccgcaccttcccccagcggccccgggcgaccagcgcgctccggccttgccgccgccacctcgcggagaagccagccatgggcgccgccggctcctccgcgctggcgcgctttgtcctcctcgcgcaatcccggcccgggtggctcggggttgccgcgctgggcctgaccgcggtggcgctgggggctgtcgcctggcgccgcgcatggcccacgcggcgccggcggctgctgcagcaggtgggcacagtggcgcagctctggatctaccctgtgaaatcctgcaagggggtgccggtgagcgaggcggagtgcacggccatggggctgcgcagcggcaacctgcgggacaggttttggcttgtgatcaaccaggagggaaacatggttactgctcgccaggaacctcgcctggtcctgatttccctgacctgcgatggtgacaccctgactctcagtgcagcctacacaaaggacctactactgcctatcaaaacgcccaccacaaatgcagtgcacaagtgcagagtgcacggcctggagatagagggcagggactgtggcgaggccgccgcccagtggataaccagcttcctgaagtcacagccctaccgcctggtgcacttcgagcctcacatgcgaccgagacgtcctcatcaaatagcagacttgttccgacccaaggaccagattgcttactcagacaccagcccattcttgatcctttctgaggcgtcgctggcggatctcaactccaggctagagaagaaagttaaagcaaccaacttcaggcccaatattgtaatttcaggatgcgatgtctatgcagaggattcttgggatgagcttcttattggtgacgtggaactgaaaagggtgatggcttgttccagatgcattttaaccacagtggacccagacaccggtgtcatgagcaggaaggaaccgctggaaacactgaagagttatcgccagtgtgacccttcagaacgaaagttatatggaaaatcaccactctttgggcagtattttgtgctggaaaacccagggaccatcaaagtgggagaccctgtgtacctgctgggccagtaatgggaaccgtatgtcctggaatattagatgccttttaaaaatgttctcaaaaatgacaacacttgaagcatggtgtttcagaactgagacctctacattttctttaaatttgtgattttcacatttttcgtcttttggacttctggtgtctcaatgcttcaatgtcccagtgcaaaaagtaaagaaatatagtctcaataacttagtaggacttcagtaagtcacttaaatgacaagacaggattctgaaaactccccgtttaactgattatggaatagttctttctcctgcttctccgtttatctaccaagagcgcagacttgcatcctgtcactaccactcgttagagaaagagaagaagagaaagaggaagagtgggtgggctggaagaatgtcctagaatgtgttattgcccctgttcatgaggtacgcaatgaaaattaaattgcaccccaaatatggctggaatgccacttcccttttcttctcaagccccgggctagcttttgaaatggcataaagactgaggtgaccttcaggaagcactgcagatattaattttccatagatctggatctggccctgctgcttctcagacagcattggatttcctaaaggtgctcaggaggatggttgtgtagtcatggaggacccctggatccttgccattcccctcagctaatgacggagtgctccttctccagttccgggtgaaaaagttctgaattctgtggaggagaagaaaagtgattcagtgatttcagatagactactgaaaacctttaaagggggaaaaggaaagcatatgtcagttgtttaaaacccaatatctattttttaactgattgtataactctaagatctgatgaagtatattttttattgccattttgtcctttgattatattgggaagttgactaaacttgaaaaatgtttttaaaactgtgaataaatggaagctactttgacta

SEQ ID NO: 421972 - DNA, 697 bp, Homo sapiens
gcgacggaaggttgcagaggcagtggggcgccgaccaagtggaagctgagccaccacctcccactccccgcgccgccccccagaaggacgcactgctctgattggcccggaagggttcaggagctgcccagcctttgggctcggggccaaaggccgcaccttcccccagcggccccgggcgaccagcgcgctccggccttgccgccgccacctcgcggagaagccagccatgggcgccgccggctcctccgcgctggcgcgctttgtcctcctcgcgcaatcccggcccgggtggctcggggttgccgcgctgggcctgaccgcggtggcgctgggggctgtcgcctggcgccgcgcatggcccacgcggcgccggcggctgctgcagcaggtgggcacagtggcgcagctctggatctaccctgtgaaatcctgcaagggggtgccggtgagcgaggcggagtgcacggccatggggctgcgcagcggcaacctgcgggacaggtacggccaagcgccggcgcggggcagcgctgatccggctcggggcaagggggtgaaaacgcaataccccctttttctcttcctgattatgtacaaattcttttcttctgagattaaaaaactcggaatttttagagcacattttattttacttaagggggcccctagtatcgggatatattggtacgccttg

SEQ ID NO: 421973 - DNA, 1893 bp, Homo sapiens
ataaaatttttaaaaggtggggggctggaactggcagagtataagtggcactgtgtgttgctcagctgaactccatgccctgtgaacaatataagcaacagtcctgctatttccactgacaagagcccgttgcctaccagatgccaggccctgtgcttcctcctgcctttgaggtcttcatgttttggcttgtgatcaaccaggagggaaacatggttactgctcgccaggaacctcgcctggtcctgatttccctgacctgcgatggtgacaccctgactctcagtgcagcctacacaaaggacctactactgcctatcaaaacgcccaccacaaatgcagtgcacaagtgcagagtgcacggcctggagatagagggcagggactgtggcgaggccgccgcccagtggataaccagcttcctgaagtcacagccctaccgcctggtgcacttcgagcctcacatgcgaccgagacgtcctcatcaaatagcagacttgttccgacccaaggaccagattgcttactcagacaccagcccattcttgatcctttctgaggcgtcgctggcggatctcaactccaggctagagaagaaagttaaagcaaccaacttcaggcccaatattgtaatttcaggatgcgatgtctatgcagaggattcttgggatgagcttcttattggtgacgtggaactgaaaagggtgatggcttgttccagatgcattttaaccacagtggacccagacaccggtgtcatgagcaggaaggaaccgctggaaacactgaagagttatcgccagtgtgacccttcagaacgaaagttatatggaaaatcaccactctttgggcagtattttgtgctggaaaacccagggaccatcaaagtgggagaccctgtgtacctgctgggccagtaatgggaaccgtatgtcctggaatattagatgccttttaaaaatgttctcaaaaatgacaacacttgaagcatggtgtttcagaactgagacctctacattttctttaaatttgtgattttcacatttttcgtcttttggacttctggtgtctcaatgcttcaatgtcccagtgcaaaaagtaaagaaatatagtctcaataacttagtaggacttcagtaagtcacttaaatgacaagacaggattctgaaaactccccgtttaactgattatggaatagttctttctcctgcttctccgtttatctaccaagagcgcagacttgcatcctgtcactaccactcgttagagaaagagaagaagagaaagaggaagagtgggtgggctggaagaatgtcctagaatgtgttattgcccctgttcatgaggtacgcaatgaaaattaaattgcaccccaaatatggctggaatgccacttcccttttcttctcaagccccgggctagcttttgaaatggcataaagactgaggtgaccttcaggaagcactgcagatattaattttccatagatctggatctggccctgctgcttctcagacagcattggatttcctaaaggtgctcaggaggatggttgtgtagtcatggaggacccctggatccttgccattcccctcagctaatgacggagtgctccttctccagttccgggtgaaaaagttctgaattctgtggaggagaagaaaagtgattcagtgatttcagatagactactgaaaacctttaaagggggaaaaggaaagcatatgtcagttgtttaaaacccaatatctattttttaactgattgtataactctaagatctgatgaagtatattttttattgccattttgtcctttgattatattgggaagttgactaaacttgaaaaatgtttttaaaactgtgaataaatggaagctactttgacta

SEQ ID NO: 421974 - DNA, 1539 bp, Homo sapiens
agattgtgtgtggggtggggtggagcatggaggctatgtctaggaactaggcacacctaaccactgaaaagttggtgtgccatgtgttataacaatgtctatttccttatcagattgcttactcagacaccagcccattcttgatcctttctgaggcgtcgctggcggatctcaactccaggctagagaagaaagttaaagcaaccaacttcaggcccaatattgtaatttcaggatgcgatgtctatgcagaggtaacactatgcccctttggatctttccttggatttgacttcttttttaaggattcttgggatgagcttcttattggtgacgtggaactgaaaagggtgatggcttgttccagatgcattttaaccacagtggacccagacaccggtgtcatgagcaggaaggaaccgctggaaacactgaagagttatcgccagtgtgacccttcagaacgaaagttatatggaaaatcaccactctttgggcagtattttgtgctggaaaacccagggaccatcaaagtgggagaccctgtgtacctgctgggccagtaatgggaaccgtatgtcctggaatattagatgccttttaaaaatgttctcaaaaatgacaacacttgaagcatggtgtttcagaactgagacctctacattttctttaaatttgtgattttcacatttttcgtcttttggacttctggtgtctcaatgcttcaatgtcccagtgcaaaaagtaaagaaatatagtctcaataacttagtaggacttcagtaagtcacttaaatgacaagacaggattctgaaaactccccgtttaactgattatggaatagttctttctcctgcttctccgtttatctaccaagagcgcagacttgcatcctgtcactaccactcgttagagaaagagaagaagagaaagaggaagagtgggtgggctggaagaatgtcctagaatgtgttattgcccctgttcatgaggtacgcaatgaaaattaaattgcaccccaaatatggctggaatgccacttcccttttcttctcaagccccgggctagcttttgaaatggcataaagactgaggtgaccttcaggaagcactgcagatattaattttccatagatctggatctggccctgctgcttctcagacagcattggatttcctaaaggtgctcaggaggatggttgtgtagtcatggaggacccctggatccttgccattcccctcagctaatgacggagtgctccttctccagttccgggtgaaaaagttctgaattctgtggaggagaagaaaagtgattcagtgatttcagatagactactgaaaacctttaaagggggaaaaggaaagcatatgtcagttgtttaaaacccaatatctattttttaactgattgtataactctaagatctgatgaagtatattttttattgccattttgtcctttgattatattgggaagttgactaaacttgaaaaatgtttttaaaactgtgaataaatggaagctactttgacta

SEQ ID NO: 421975 - DNA, 1235 bp, Homo sapiens
gcgacggaaggttgcagaggcagtggggcgccgaccaagtggaagctgagccaccacctcccactccccgcgccgccccccagaaggacgcactgctctgattggcccggaagggttcaggagctgcccagcctttgggctcggggccaaaggccgcaccttcccccagcggccccgggcgaccagcgcgctccggccttgccgccgccacctcgcggagaagccagccatgggcgccgccggctcctccgcgctggcgcgctttgtcctcctcgcgcaatcccggcccgggtggctcggggttgccgcgctgggcctgaccgcggtggcgctgggggctgtcgcctggcgccgcgcatggcccacgcggcgccggcggctgctgcagcaggtgggcacagtggcgcagctctggatctaccctgtgaaatcctgcaagggggtgccggtgagcgaggcggagtgcacggccatggggctgcgcagcggcaacctgcgggacaggttttggcttgtgatcaaccaggagggaaacatggttactgctcgccaggaacctcgcctggtcctgatttccctgacctgcgatggtgacaccctgactctcagtgcagcctacacaaaggacctactactgcctatcaaaacgcccaccacaaatgcagtgcacaagtgcagagtgcacggcctggagatagagggcagggactgtggcgaggccgccgcccagtggataaccagcttcctgaagtcacagccctaccgcctggtgcacttcgagcctcacatgcgaccgagacgtcctcatcaaatagcagacttgttccgacccaaggaccagattgcttactcagacaccagcccattcttgatcctttctgaggcgtcgctggcggatctcaactccaggctagagaagaaagttaaagcaaccaacttcaggcccaatattgtaatttcaggatgcgatgtctatgcagaggattcttgggatgagcttcttattggtgacgtggaactgaaaagggtgatggcttgttccagatgcattttaaccacagtggacccagacaccggtgtcatgagcaggaaggaaccgctggaaacactgaagagggaaagtgacgtacacactgatccccatggttgaaggaatggctggagtctgccgttgttgcttccatgacattttgcccctaatggaaagaatatagcacagttactgcatgggtact

SEQ ID NO: 421976 - DNA, 1526 bp, Homo sapiens
gcgacggaaggttgcagaggcagtggggcgccgaccaagtggaagctgagccaccacctcccactccccgcgccgccccccagaaggacgcactgctctgattggcccggaagggttcaggagctgcccagcctttgggctcggggccaaaggccgcaccttcccccagcggccccgggcgaccagcgcgctccggccttgccgccgccacctcgcggagaagccagccatgggcgccgccggctcctccgcgctggcgcgctttgtcctcctcgcgcaatcccggcccgggtggctcggggttgccgcgctgggcctgaccgcggtggcgctgggggctgtcgcctggcgccgcgcatggcccacgcggcgccggcggctgctgcagcaggtgggcacagtggcgcagctctggatctaccctgtgaaatcctgcaagggggtgccggtgagcgaggcggagtgcacggccatggggctgcgcagcggcaacctgcgggacaggttttggcttgtgatcaaccaggagggaaacatggttactgctcgccaggaacctcgcctggtcctgatttccctgacctgcgatggtgacaccctgactctcagtgcagcctacacaaaggacctactactgcctatcaaaacgcccaccacaaatgcagtgcacaagtgcagagtgcacggcctggagatagagggcagggactgtggcgaggccgccgcccagtggataaccagcttcctgaagtcacagccctaccgcctggtgcacttcgagcctcacatgcgaccgagacgtcctcatcaaatagcagacttgttccgacccaaggaccagattgcttactcagacaccagcccattcttgatcctttctgaggcgtcgctggcggatctcaactccaggctagagaagaaagttaaagcaaccaacttcaggcccaatattgtaatttcaggatgcgatgtctatgcagaggtaacactatgcccctttggatctttccttggatttgacttcttttttaagatttattcagcacttaataagtgcagacttctgtgtggaggatacaaatgttgatgggtcagagactgtcatcaaggaggcagttcagtatctaaggcttctaaggagaattctgagttgacagggaaaaatggaatcaaagcaattgagttttaaccttttatcctcagaggagccaattatattcttcacttttgctgtacggaggcaaaactatgctgaaagagaaataatctaagaatttgattcccacattcaaaccagaagatgtgacggctcgtttcagcttctgcgctggcttctgcatgactttgagcagccccgctaagtcccatttaccttgcctgaacaatgagatgatcatatttctgcctagggttaccttaagggtctgttgaagggtcagtttggataatgtaatttatgagatgtataaaagcaatatcaatcgatggaggataataaaagtacgcccaaatccaaaaaaaaaaaa

SEQ ID NO: 421977 - DNA, 470 bp, Homo sapiens
gtaaaatagattcttgtcatctgcttggggcatgtttaatgaaagtgatcaggctttctagagattgagatgaaaatataattaacatctttgatttctgtgccatcaaagagctcaaactgttctccagatatatgttggatgcttgagtggttatgaaatcctttgaaattaagtgacagactcagtcctgtgtgctgatgtttaggacagacagacacacacactcaaactcacacacaccaggcttatggggaagaaatcaaagatgacaacagtgtctaattgaagctcctccagggtctggcttcctgccataatggttcacacatatcctgtgttttgaaaacggcaggttttggcttgtgatcaaccaggagggaaacatggttactgctcgccaggaacctcgcctggtcctgatttccctgacctgcgatggtgacaccctgactctcagtgcagcctac

SEQ ID NO: 421978 - DNA, 1161 bp, Homo sapiens
cagagacagaggggccggaagttctcttcacggagccgcgcggctgcgggggcgcaaatagggtcactgggccgcttggcggtgtcgttgcggtaccaggtccgcgtgaggggttcgggggttctgggcaggcacaatggcgtctcgagcaggcccgcgagcggccggcaccgacggcagcgactttcagcaccgggagcgcgtcgccatgcactaccagatgagtgtgaccctcaagtatgaaatcaagaagctgatctacgtacatctggtcatatggctgctgctggttgctaagatgagcgtgggacacctgaggctcttgtcacatgatcaggtggccatgccctatcagtgggaatacccgtatttgctgagcattttgccctctctcttgggccttctctcctttccccgcaacaacattagctacctggtgctctccatgatcagcatgggactcttttccatcgctccactcatttatggcagcatggagatgttccctgctgcacagcagctctaccgccatggcaaggcctaccgtttcctctttggtttttctgccgtttccatcatgtacctggtgttggtgttggcagtgcaagtgcatgcctggcagttgtactacagcaagaagctcctagactcttggttcaccagcacacaggagaagaagcataaatgaagcctctttggggtgaagcctggacatcccatcgaatgaaaggacactagtacagcggttccaaaatcccttctggtgattttagcagctgtgatgttggtacctggtgcagaccaggccaaagttctggaaagctccttttgccatctgctgaggtggcaaaactataatttattcctggttggctagaactgggtgaccaacagctatgaaacaaatttcagctgtttgaagttgaactttgaggtttttctttaagaatgagcttcgtccttgcctctactcggtcattctccccatttccatccattaccccttagccattgagactaaaggaaatagggaataaatcaaattacttcatctctaggtcacgggtcaggaaacatttgggcagctgctcccttggcaggctgtggtctcctctgcaaagcattttaattaaaaacctcaataaagatggccctgcccac

SEQ ID NO: 421979 - DNA, 1642 bp, Homo sapiens
cagagacagaggggccggaagttctcttcacggagccgcgcggctgcgggggcgcaaatagggtcactgggccgcttggcggtgtcgttgcggtaccaggtccgcgtgaggggttcgggggttctgggcaggcacaatggcgtctcgagcaggcccgcgagcggccggcaccgacggcagcgactttcagcaccgggagcgcgtcgccatgcactaccagatgagtgtgaccctcaagtatgaaatcaagaagctgatctacgtacatctggtcatatggctgctgctggttgctaagatgagcgtgggacacctgaggctcttgtcacatgatcaggtggccatgccctatcagtgggaatacccgtatttgctgagcattttgccctctctcttgggccttctctcctttccccgcaacaacattagctacctggtgctctccatgatcagcatgggactcttttccatcgctccactcatttatggcagcatggagatgttccctgctgcacagcagctctaccgccatggcaaggcctaccgtttcctctttggtttttctgccgtttccatcatgtacctggtgttggtgttggcagtgcaagtgcatgcctggcagttgtactacagcaagaagctcctagactcttggttcaccagcacacaggagaagaagcataaatgaagcctctttggggtgaagcctggacatcccatcgaatgaaaggacactagtacagcggttccaaaatcccttctggtgattttagcagctgtgatgttggtacctggtgcagaccaggccaaagttctggaaagctccttttgccatctgctgaggtggcaaaactataatttattcctggttggctagaactgggtgaccaacagctatgaaacaaatttcagctgtttgaagttgaactttgaggtttttctttaagaatgagcttcgtccttgcctctactcggtcattctccccatttccatccattaccccttagccattgagactaaaggaaatagggaataaatcaaattacttcatctctaggtcacgggtcaggaaacatttgggcagctgctcccttggcaggctgtggtctcctctgcaaagcattttaattaaaaacctcaataaagatggccctgcccacactgtgccttgtgtttggggcttgatagagtgtgaaaggtgtgttgcttgaaaggtgtggccttagacactaggagatgatgggtagaagctccttgagaaacctagcagtggccatagagaagtagactgggtatggggaacctaagtcatagttgtaacctacagctgattggtaagaactatgggccagacatttaatctctccatctatgaaatagtccattctcatttatctagcttaggttatgggctcttcttttagttggatattcacatttatctttcagtgttaactgggtatcagttatgagtctactactgtataatggcatccaaaagaattttaaagtacctcggtttatagggatttacaattcagtagaaacttgttattcatgtgaaacagtgaacataatatctaatgatgtggagcaagtacattaaaaacaggaaggaagagatctgtgattaaactaaag

SEQ ID NO: 421980 - DNA, 1282 bp, Homo sapiens
cagagacagaggggccggaagttctcttcacggagccgcgcggctgcgggggcgcaaatagggtcactgggccgcttggcggtgtcgttgcggtaccaggtccgcgtgaggggttcgggggttctgggcaggcacaatggcgtctcgagcaggcccgcgagcggccggcaccgacggcagcgactttcagcaccgggagcgcgtcgccatgcactaccagatgagtgtgaccctcaagtatgaaatcaagaagctgatctacgtacatctggtcatatggctgctgctggttgctaagatgagcgtgggacacctgaggctcttgtcacatgatcaggtggccatgccctatcagtgggaatacccgtatttgctgagcattttgccctctctcttgggccttctctcctttccccgcaacaacattagctacctggtgctctccatgatcagcatgggactcttttccatcgctccactcatttatggcagcatggagatgttccctgctgcacagcagctctaccgccatggcaaggcctaccgtttcctctttggtttttctgccgtttccatcatgtacctggtgttggtgttggcagtgcaagtgcatgcctggcagttgtactacagcaagaagctcctagactcttggttcaccagcacacaggagaagaagcataaatgaagcctctttggggtgaagcctggacatcccatcgaatgaaaggacactagtacagcggttccaaaatcccttctggtgattttagcagctgtgatgttggtacctggtgcagaccaggccaaagttctggaaagctccttttgccatctgctgaggtggcaaaactataatttattcctggttggctagaactgggtgaccaacagctatgaaacaaatttcagctgtttgaagttgaactttgaggtttttctttaagaatgagcttcgtccttgcctctactcggtcattctccccatttccatccattaccccttagccattgagactaaaggaaatagggaataaatcaaattacttcatctctaggtcacgggtcaggaaacatttgggcagctgctcccttggcaggctgtggtctcctctgaagatttattaaaactataagatggctggcaaaaaaaaaaaaggggcgggtaaagttcccagggcagtaggccgttttggaagggccaagggataaaagagggggggtacggggaacgctggttggagacttgggggggcgaagggaaatgttgagttgtgtggtg

SEQ ID NO: 421981 - DNA, 1253 bp, Homo sapiens
ctttcctggaacacaaatacttgggcctttttgtctgcatgctcctgcatgggatgcccatcttcactcattcctgagcctagttcagatatcacctgcctctagatagccatctctgacattccatgccaggcagagttgattcctccttcctgtgatcccatatatctgggaacatatatttaccagaactttttcacttcattttctaattactttttcctcctctgttctttgtgtccggcttctaggctgttttattcaaatttgtatcccagtgtccagtacagttgtctggcatatagttggtggtaagatgtgaccctcaagtatgaaatcaagaagctgatctacgtacatctggtcatatggctgctgctggttgctaagatgagcgtgggacacctgaggctcttgtcacatgatcaggtggccatgccctatcagtgggaatacccgtatttgctgagcattttgccctctctcttgggccttctctcctttccccgcaacaacattagctacctggtgctctccatgatcagcatgggactcttttccatcgctccactcatttatggcagcatggagatgttccctgctgcacagcagctctaccgccatggcaaggcctaccgtttcctctttggtttttctgccgtttccatcatgtacctggtgttggtgttggcagtgcaagtgcatgcctggcagttgtactacagcaagaagctcctagactcttggttcaccagcacacaggagaagaagcataaatgaagcctctttggggtgaagcctggacatcccatcgaatgaaaggacactagtacagcggttccaaaatcccttctggtgattttagcagctgtgatgttggtacctggtgcagaccaggccaaagttctggaaagctccttttgccatctgctgaggtggcaaaactataatttattcctggttggctagaactgggtgaccaacagctatgaaacaaatttcagctgtttgaagttgaactttgaggtttttctttaagaatgagcttcgtccttgcctctactcggtcattctccccatttccatccattaccccttagccattgagactaaaggaaatagggaataaatcaaattacttcatctctaggtcacgggtcaggaaacatttgggcagctgctcccttggcaggctgtggtctcctctgcaaagcattttaattaaaaacctcaataaagatggccctgcccac

SEQ ID NO: 421982 - DNA, 1248 bp, Homo sapiens
gacagagggggcgggaaaattctcgttcactgtacgcgagggagctgctgcagtaccagagtccggttcatgtgcggcagtattgaggggctagtcatgtgcggctcatcatggatgcgtggctgcaagagttctcgagctgttcgtgagctcgtccatcacgtgcgttgtctcgaaactatagcgcccgctgattcggattcgctagcgcatggtggagccgacgtgttccaggaccaggtgagcgtggctccgacgatgacgattactcaagtatgagatgtgataccatcaagttttgattatcgaagatgtgaccctcaagtatgaaatcaagaagctgatctacgtacatctggtcatatggctgctgctggttgctaagatgagcgtgggacacctgaggctcttgtcacatgatcaggtggccatgccctatcagtgggaatacccgtatttgctgagcattttgccctctctcttgggccttctctcctttccccgcaacaacattagctacctggtgctctccatgatcagcatgggactcttttccatcgctccactcatttatggcagcatggagatgttccctgctgcacagcagctctaccgccatggcaaggcctaccgtttcctctttggtttttctgccgtttccatcatgtacctggtgttggtgttggcagtgcaagtgcatgcctggcagttgtactacagcaagaagctcctagactcttggttcaccagcacacaggagaagaagcataaatgaagcctctttggggtgaagcctggacatcccatcgaatgaaaggacactagtacagcggttccaaaatcccttctggtgattttagcagctgtgatgttggtacctggtgcagaccaggccaaagttctggaaagctccttttgccatctgctgaggtggcaaaactataatttattcctggttggctagaactgggtgaccaacagctatgaaacaaatttcagctgtttgaagttgaactttgaggtttttctttaagaatgagcttcgtccttgcctctactcggtcattctccccatttccatccattaccccttagccattgagactaaaggaaatagggaataaatcaaattacttcatctctaggtcacgggtcaggaaacatttgggcagctgctcccttggcaggctgtggtctcctctgcaaagcattttaattaaaaacctcaataaagatggccctgcccac

SEQ ID NO: 421983 - DNA, 992 bp, Homo sapiens
  misc_feature (51)..(51): n is a, c, g, or t
gtctggacttctgtaatggttttctcgtacatggttttctcgtacatggtnttctctgtgaccctcaagtatgaaatcaagaagctgatctacgtacatctggtcatatggctgctgctggttgctaagatgagcgtgggacacctgaggctcttgtcacatgatcaggtggccatgccctatcagtgggaatacccgtatttgctgagcattttgccctctctcttgggccttctctcctttccccgcaacaacattagctacctggtgctctccatgatcagcatgggactcttttccatcgctccactcatttatggcagcatggagatgttccctgctgcacagcagctctaccgccatggcaaggcctaccgtttcctctttggtttttctgccgtttccatcatgtacctggtgttggtgttggcagtgcaagtgcatgcctggcagttgtactacagcaagaagctcctagactcttggttcaccagcacacaggagaagaagcataaatgaagcctctttggggtgaagcctggacatcccatcgaatgaaaggacactagtacagcggttccaaaatcccttctggtgattttagcagctgtgatgttggtacctggtgcagaccaggccaaagttctggaaagctccttttgccatctgctgaggtggcaaaactataatttattcctggttggctagaactgggtgaccaacagctatgaaacaaatttcagctgtttgaagttgaactttgaggtttttctttaagaatgagcttcgtccttgcctctactcggtcattctccccatttccatccattaccccttagccattgagactaaaggaaatagggaataaatcaaattacttcatctctaggtcacgggtcaggaaacatttgggcagctgctcccttggcaggctgtggtctcctctgcaaagcattttaattaaaaacctcaataaagatggccctgcccac

SEQ ID NO: 421984 - DNA, 1277 bp, Homo sapiens
cagagacagaggggccggaagttctcttcacggagccgcgcggctgcgggggcgcaaatagggtcactgggccgcttggcggtgtcgttgcggtaccaggtccgcgtgaggggttcgggggttctgggcaggcacaatggcgtctcgagcaggcccgcgagcggccggcaccgacggcagcgactttcagcaccgggagcgcgtcgccatgcactaccagatgaggctgttttattcaaatttgtatcccagtgtccagtacagttgtctggcatatagttggtggtaagaaaaatttgaaagatacttctccctctgctctgccccacagtgtgaccctctgtgaccctcaagtatgaaatcaagaagctgatctacgtacatctggtcatatggctgctgctggttgctaagatgagcgtgggacacctgaggctcttgtcacatgatcaggtggccatgccctatcagtgggaatacccgtatttgctgagcattttgccctctctcttgggccttctctcctttccccgcaacaacattagctacctggtgctctccatgatcagcatgggactcttttccatcgctccactcatttatggcagcatggagatgttccctgctgcacagcagctctaccgccatggcaaggcctaccgtttcctctttggtttttctgccgtttccatcatgtacctggtgttggtgttggcagtgcaagtgcatgcctggcagttgtactacagcaagaagctcctagactcttggttcaccagcacacaggagaagaagcataaatgaagcctctttggggtgaagcctggacatcccatcgaatgaaaggacactagtacagcggttccaaaatcccttctggtgattttagcagctgtgatgttggtacctggtgcagaccaggccaaagttctggaaagctccttttgccatctgctgaggtggcaaaactataatttattcctggttggctagaactgggtgaccaacagctatgaaacaaatttcagctgtttgaagttgaactttgaggtttttctttaagaatgagcttcgtccttgcctctactcggtcattctccccatttccatccattaccccttagccattgagactaaaggaaatagggaataaatcaaattacttcatctctaggtcacgggtcaggaaacatttgggcagctgctcccttggcaggctgtggtctcctctgcaaagcattttaattaaaaacctcaataaagatggccctgcccac

SEQ ID NO: 421985 - DNA, 1303 bp, Homo sapiens
ctttcctggaacacaaatacttgggcctttttgtctgcatgctcctgcatgggatgcccatcttcactcattcctgagcctagttcagatatcacctgcctctagatagccatctctgacattccatgccaggcagagttgattcctccttcctgtgatcccatatatctgggaacatatatttaccagaactttttcacttcattttctaattactttttcctcctctgttctttgtgtccggcttctaggctgttttattcaaatttgtatcccagtgtccagtacagttgtctggcatatagttggtggtaagaaaaatttgaaagatacttctccctctgctctgccccacagtgtgaccctctgtgaccctcaagtatgaaatcaagaagctgatctacgtacatctggtcatatggctgctgctggttgctaagatgagcgtgggacacctgaggctcttgtcacatgatcaggtggccatgccctatcagtgggaatacccgtatttgctgagcattttgccctctctcttgggccttctctcctttccccgcaacaacattagctacctggtgctctccatgatcagcatgggactcttttccatcgctccactcatttatggcagcatggagatgttccctgctgcacagcagctctaccgccatggcaaggcctaccgtttcctctttggtttttctgccgtttccatcatgtacctggtgttggtgttggcagtgcaagtgcatgcctggcagttgtactacagcaagaagctcctagactcttggttcaccagcacacaggagaagaagcataaatgaagcctctttggggtgaagcctggacatcccatcgaatgaaaggacactagtacagcggttccaaaatcccttctggtgattttagcagctgtgatgttggtacctggtgcagaccaggccaaagttctggaaagctccttttgccatctgctgaggtggcaaaactataatttattcctggttggctagaactgggtgaccaacagctatgaaacaaatttcagctgtttgaagttgaactttgaggtttttctttaagaatgagcttcgtccttgcctctactcggtcattctccccatttccatccattaccccttagccattgagactaaaggaaatagggaataaatcaaattacttcatctctaggtcacgggtcaggaaacatttgggcagctgctcccttggcaggctgtggtctcctctgcaaagcattttaattaaaaacctcaataaagatggccctgcccac

SEQ ID NO: 421986 - DNA, 2116 bp, Homo sapiens
  misc_feature (204)..(204): n is a, c, g, or t
cggcgccgcgggcctgcgtgctggggcagcgggcacttcttcgacctcgtcctcctcgtcctgtgcggccggccgggtgaggccgggcccgcgtagggggcagtcggcggctgcctccggcggaggtgcctcgcggcgcccgggccggcccgcgcctcggcggcgtgctccatgcatccggagcccgccccgcccccgagccgnagcagtcccgagcttcccccaagcggcggcagcaccaccagcggcagccgccggagccgccgccgcagcggggacggggagcccccgggggccccgccaccgccgccgtccgccgtcacctacccggactggatcggccagagttactccgaggtgatgagcctcaacgagcactccatgcaggcgctgtcctggcgcaagctctacttgagccgcgccaagcttaaagcctccagccggacctcggctctgctctccggcttcgccatggtggcaatggtggaggtgcagctggacgctgaccacgactacccaccggggctgctcatcgccttcagtgcctgcaccacagtgctggtggctgtgcacctgtttgcgctcatgatcagcacctgcatcctgcccaacatcgaggcggtgagcaacgtgcacaatctcaactcggtcaaggagtccccccatgagcgcatgcaccgccacatcgagctggcctgggccttctccaccgtcatcggcacgctgctcttcctagctgaggtggtgctgctctgctgggtcaagttcttgcccctcaagaagcagccaggccagccaaggcccaccagcaagccccccgccagtggcgcagcagccaacgtcagcaccagcggcatcaccccgggccaggcagctgccatcgcctcgaccaccatcatggtgcccttcggcctgatctttatcgtcttcgccgtccacttctaccgctcactggttagccataagaccgaccgacagttccaggagctcaacgagctggcggagtttgcccgcttacaggaccagctggaccacagaggggaccaccccctgacgcccggcagccactatgcctaggcccatgtggtctgggcccttccagtgctttggccttacgcccttccccttgaccttgtcctgccccagcctcacggacagcctgcgcagggggctgggcttcagcaaggggcagagcatggagggaagaggatttttataagagaaatttctgcactttgaaactgtcctctaagagaataagcatttcctgttcttccagctccaggtccacctcctgttgggaggcggtggggggccaaagtggggccacacactcgctgtgtcccctctcctcccctgtgccagtgccacctgggtgcctcctcctgtcctgtccgtctcaacctccctcccgtccagcattgagtgtgtacatgtgtgtgtgacacataaatatactcataaggacacctccttcccgtgtcttgtatttgttgggcctgggctactgctcaccctggttaggtgagcctctaggaaaacttaaaacaaattttaagccaggtatggtggcacatacctgtggtctcagctattcaggaggccaaggcaggaggatctcttgagcccaggagtttgagaccccatctcaaacaaaaaatacaaaaattagccagccacggggcctgcacttccagctcctttgagagactgaggcaggaagattgcctaagcccaggaggccaagtctgcagtgagctatggtaacaccactgcactccaacctgggcaacagagggagactctgtctctaaaaaaatagaaaaatttgccctgcatggtggctcacgcctgtaatcctagccctttggaaggccaaggcgggcagatcacttgaggtcgggagttcgagaccagcctgaccaacatggagaaaccccatctgtactaaaaatacaaaattagctgggtttggtggcgcatgcttgtaatcccagctactcgggaggctgaggcaggagaatcgcttgaacccaggaggcggaggttgcagtgagctgagatcgcgccattgcactccagcctgggcaacaacagtgaaactccgtctcaaaaa

SEQ ID NO: 421987 - DNA, 1605 bp, Homo sapiens
  misc_feature (204)..(204): n is a, c, g, or t
cggcgccgcgggcctgcgtgctggggcagcgggcacttcttcgacctcgtcctcctcgtcctgtgcggccggccgggtgaggccgggcccgcgtagggggcagtcggcggctgcctccggcggaggtgcctcgcggcgcccgggccggcccgcgcctcggcggcgtgctccatgcatccggagcccgccccgcccccgagccgnagcagtcccgagcttcccccaagcggcggcagcaccaccagcggcagccgccggagccgccgccgcagcggggacggggagcccccgggggccccgccaccgccgccgtccgccgtcacctacccggactggatcggccagagttactccgaggtgatgagcctcaacgagcactccatgcaggcgctgtcctggcgcaagctctacttgagccgcgccaagcttaaagcctccagccggacctcggctctgctctccggcttcgccatggtgagctccggccgccctgccctgccccctctactgtcccggctgctcccgcccgcagccccgacggggctctctgggcgggccgggcgggccagagtgaggggaagagctgggagaaaccgtggtggcaatggtggaggtgcagctggacgctgaccacgactacccaccggggctgctcatcgccttcagtgcctgcaccacagtgctggtggctgtgcacctgtttgcgctcatgatcagcacctgcatcctgcccaacatcgaggcggtgagcaacgtgcacaatctcaactcggtcaaggagtccccccatgagcgcatgcaccgccacatcgagctggcctgggccttctccaccgtcatcggcacgctgctcttcctagctgaggtggtgctgctctgctgggtcaagttcttgcccctcaagaagcagccaggccagccaaggcccaccagcaagccccccgccagtggcgcagcagccaacgtcagcaccagcggcatcaccccgggccaggcagctgccatcgcctcgaccaccatcatggtgcccttcggcctgatctttatcgtcttcgccgtccacttctaccgctcactggttagccataagaccgaccgacagttccaggagctcaacgagctggcggagtttgcccgcttacaggaccagctggaccacagaggggaccaccccctgacgcccggcagccactatgcctaggcccatgtggtctgggcccttccagtgctttggccttacgcccttccccttgaccttgtcctgccccagcctcacggacagcctgcgcagggggctgggcttcagcaaggggcagagcatggagggaagaggatttttataagagaaatttctgcactttgaaactgtcctctaagagaataagcatttcctgttcttccagctccaggtccacctcctgttgggaggcggtggggggccaaagtggggccacacactcgctgtgtcccctctcctcccctgtgccagtgccacctgggtgcctcctcctgtcctgtccgtctcaacctccctcccgtccagcattgagtgtgtacatgtgtgtgtgacacataaatatactcataaggacacctccttcccgt

SEQ ID NO: 421988 - DNA, 890 bp, Homo sapiens
ttgggaggcggtggacctggagctggaagaacaggaaatgcttattctcttagaggacagtccacctcctgttgggaggcggtggggggccaaagtggggccacacactcgctgtgtcccctctcctcccctgtgccagtgccacctgggtgcctcctcctgtcctgtccgtctcaacctccctcccgtccagcattgagtgtgtacatgtgtgtgtgacacataaatatactcataaggacacctccttcccgtgtcttgtatttgttgggcctgggctactgctcaccctggttaggtgagcctctaggaaaacttaaaacaaattttaagccaggtatggtggcacatacctgtggtctcagctattcaggaggccaaggcaggaggatctcttgagcccaggagtttgagaccccatctcaaacaaaaaatacaaaaattagccagccacggggcctgcacttccagctcctttgagagactgaggcaggaagattgcctaagcccaggaggccaagtctgcagtgagctatggtaacaccactgcactccaacctgggcaacagagggagactctgtctctaaaaaaatagaaaaatttgccctgcatggtggctcacgcctgtaatcctagccctttggaaggccaaggcgggcagatcacttgaggtcgggagttcgagaccagcctgaccaacatggagaaaccccatctgtactaaaaatacaaaattagctgggtttggtggcgcatgcttgtaatcccagctactcgggaggctgaggcaggagaatcgcttgaacccaggaggcggaggttgcagtgagctgagatcgcgccattgcactccagcctgggcaacaacagtgaaactccgtctcaaaaa

SEQ ID NO: 421989 - DNA, 1481 bp, Homo sapiens
  misc_feature (204)..(204): n is a, c, g, or t
cggcgccgcgggcctgcgtgctggggcagcgggcacttcttcgacctcgtcctcctcgtcctgtgcggccggccgggtgaggccgggcccgcgtagggggcagtcggcggctgcctccggcggaggtgcctcgcggcgcccgggccggcccgcgcctcggcggcgtgctccatgcatccggagcccgccccgcccccgagccgnagcagtcccgagcttcccccaagcggcggcagcaccaccagcggcagccgccggagccgccgccgcagcggggacggggagcccccgggggccccgccaccgccgccgtccgccgtcacctacccggactggatcggccagagttactccgaggtgatgagcctcaacgagcactccatgcaggcgctgtcctggcgcaagctctacttgagccgcgccaagcttaaagcctccagccggacctcggctctgctctccggcttcgccatggtggcaatggtggaggtgcagctggacgctgaccacgactacccaccggggctgctcatcgccttcagtgcctgcaccacagtgctggtggctgtgcacctgtttgcgctcatgatcagcacctgcatcctgcccaacatcgaggcggtgagcaacgtgcacaatctcaactcggtcaaggagtccccccatgagcgcatgcaccgccacatcgagctggcctgggccttctccaccgtcatcggcacgctgctcttcctagctgaggtggtgctgctctgctgggtcaagttcttgcccctcaagaagcagccaggccagccaaggcccaccagcaagccccccgccagtggcgcagcagccaacgtcagcaccagcggcatcaccccgggccaggcagctgccatcgcctcgaccaccatcatggtgcccttcggcctgatctttatcgtcttcgccgtccacttctaccgctcactggttagccataagaccgaccgacagttccaggagctcaacgagctggcggagtttgcccgcttacaggaccagctggaccacagaggggaccaccccctgacgcccggcagccactatgcctaggcccatgtggtctgggcccttccagtgctttggccttacgcccttccccttgaccttgtcctgccccagcctcacggacagcctgcgcagggggctgggcttcagcaaggggcagagcatggagggaagaggatttttataagagaaatttctgcactttgaaactgtcctctaagagaataagcatttcctgttcttccagctccaggtccacctcctgttgggaggcggtggggggccaaagtggggccacacactcgctgtgtcccctctcctcccctgtgccagtgccacctgggtgcctcctcctgtcctgtccgtctcaacctccctcccgtccagcattgagtgtgtacatgtgtgtgtgacacataaatatactcataaggacacctccttcccgt

SEQ ID NO: 421990 - DNA, 1509 bp, Homo sapiens
  misc_feature (204)..(204): n is a, c, g, or t
cggcgccgcgggcctgcgtgctggggcagcgggcacttcttcgacctcgtcctcctcgtcctgtgcggccggccgggtgaggccgggcccgcgtagggggcagtcggcggctgcctccggcggaggtgcctcgcggcgcccgggccggcccgcgcctcggcggcgtgctccatgcatccggagcccgccccgcccccgagccgnagcagtcccgagcttcccccaagcggcggcagcaccaccagcggcagccgccggagccgccgccgcagcggggacggggagcccccgggggccccgccaccgccgccgtccgccgtcacctacccggactggatcggccagagttactccgaggtgatgagcctcaacgagcactccatgcaggcgctgtcctggcgcaagctctacttgagccgcgccaagcttaaagcctccagccggacctcggctctgctctccggcttcgccatggtggcaatggtggaggtgcagctggacgctgaccacgactacccaccggggctgctcatcgccttcagtgcctgcaccacagtgctggtggctgtgcacctgtttgcgctcatgatcagcacctgcatcctgcccaacatcgaggcggtgagcaacgtgcacaatctcaactcggtcaaggagtccccccatgagcgcatgcaccgccacatcgagctggcctgggccttctccaccgtcatcggcacgctgctcttcctagctgaggtggtgctgctctgctgggtcaagttcttgcccctcaagaagcagccaggccagccaaggcccaccagcaagccccccgccagtggcgcagcagccaacgtcagcaccagcggcatcaccccgggccaggcagctgccatcgcctcgaccaccatcatggtgcccttcggcctgatctttatcgtcttcgccgtccacttctaccgctcactggttagccataagaccgaccgacagttccaggagctcaacgagctggcggagtttgcccgcttacaggaccagctggaccacagaggggaccaccccctgacgcccggcagccactatgcctaggcccatgtggtctgggcccttccagtgctttggccttacgcccttccccttgaccttgtcctgccccagcctcacggacagcctgcgcagggggctgggcttcagcaaggggcagagcatggagggaagaggatttttataagagaaatttctgcactttgaaactgtcctctaagagaataagcatttcctgttcttccagctccaggtccacctcctgttgggaggcggtggggggccaaagtggggccacacactcgctgtgtcccctctcctcccctgtgccagtgccacctgggtgcctcctcctgtcctgtccgtctcaacctccctcccgtccagcattgagtgtgtacatgtgtgtgtgacacataaatatactcataaggacacctccttcccgtatgcccccccgacattccgcgcggtatg

SEQ ID NO: 421991 - DNA, 698 bp, Homo sapiens
ccgtggtactgagataagcccagggtccggtccgcccctgggaagaggtgctaagaggatatatacattgggggaatttagggaatggtcacagggtgtaataggaggtatctctacaccagagggtgtcccccctcagtcagccatatgcatgaaagagtgccataaaaagaagtcaaagtaaacaagtatggagatacttgggatgagtgaaaaattacatcattggacatgaaggagtttcaacatccagcttcatctaggtggtcatgattacctgcatgctttgagctcagcagcagtcttcataaacacatttaaaacaagatcctgggtttttgtggtttgacttctatggtgttttaaaaaaacacagatttttagtgttaatattgtgtaaatgtactcaccttagggattcatttgaatgatggtattataccatgattgtatacagtttgtgaaattgttgcaagggcaaagataactcttaaaaaaccgtcgagattacaatgctctagaatcagcatataagaaaataaatgatatctgcatgttgaattggggtggatggggggagcaagcataatttttaagtgtgaagctttgcatcaagaaattattaaaaagctttttttctccagtattttctgtattatcttaatgtttatggcaaataaaatgtaaaggaacatgaa

SEQ ID NO: 421992 - DNA, 1697 bp, Homo sapiens
  misc_feature (1154)..(1154): n is a, c, g, or t
  misc_feature (1175)..(1175): n is a, c, g, or t
  misc_feature (1209)..(1209): n is a, c, g, or t
  misc_feature (1225)..(1225): n is a, c, g, or t
  misc_feature (1228)..(1228): n is a, c, g, or t
  misc_feature (1295)..(1295): n is a, c, g, or t
  misc_feature (1311)..(1311): n is a, c, g, or t
  misc_feature (1406)..(1406): n is a, c, g, or t
  misc_feature (1450)..(1450): n is a, c, g, or t
  misc_feature (1453)..(1453): n is a, c, g, or t
  misc_feature (1519)..(1519): n is a, c, g, or t
  misc_feature (1522)..(1522): n is a, c, g, or t
  misc_feature (1564)..(1564): n is a, c, g, or t
attaatcccaatataaggttataatatttttctttacattctttttttagtaagaaaaatgtagttttgaaccatcatataatactagaactaattaggagaaatttaaatcctctttgctttatataagtatagtatatatttatttagcagaataaatgtttatggttgaaaatggctgggattatagttgtgagccattgtgcctggcctattttcagtatttttgtttaaattttgtaaaaaggtaaaataaatgatttttgaaaatagctggagttgttttcatagagtctgtggttataggactatttaactatatattgagtaaaatctatgctatgtcaagttttattcagttgtccctagtagaatatatttctcttttaattctgtatacagtatgagtaactccagtttaaaacactggtattttaatgagtttaaattgtactgttatatattatgatacatatttttcttctggctgtggtttagtttttaaaatttttgatgtccattttaatttttagaaataaaagcttaaaaatatgggtggaagtagatttcagtttgatgattatcttggtgaaagtatagtacctgtgaaatggtggtaataatttgattctttattctattttgattgtagctccttttgtaaggagcatttgtaaaatttagttgctttagagttatacaaatccttttattaccatttattaactgtttgttgttttaggacctgatcccaaccttgaagaaagtcctaaaagaaaaaatattacatatgaggaattaaggaataagaacagagagtcatatgaagtatctttaacacaaaagactgacccctcagtcaggcctatgcatgaaagagtgccaaaaaaagaaggtatgatagtttagtctgaatcactttactgttgaggattggaaactaaaacattactttaaaacaatactataaaaaattaattaatatgtgatttaactcttcaagcaattaaccaaagtaaaatatttttaaaatagtactttacagttatcagttctttttttttttttgagacggagtcttgctccgtcgccaggctggagtgcagtggcacgatcttggctcactgcagcctctgcctcctggattcaagcantcctcctgcctcagcctcccnaatagctaggactacaggcccccacgcccagctnattttttgtatttttngtngagatggggtttcatcatgttggccaggatggtctcgatcttttgaccttgtgatccgcctgcctcngtctctgagagtgctnggattacaggcttgagccaccgtgtccggccagttttccatttttaaggtgttccaaaggccattttgtgttagaaaataatgaagtcaaggccnggtgtggtgtctcatgcctgaaatcccagcactttgggagaccnagntgggtgtatcacttgaggccaggaattggagaccagcatggccaacatggcgataccttgtctctnctnaaaatacaaaaatcagctgggcatggtggtgcatgcctgtantcctagctactcgggaggctgaggcaggagaactgcatgaacccaggaggcagaggttgcagtgaaccgacatcacgccactgcactgcagcctggatgacggagcgaggctctgttcccccctccccccgcc

SEQ ID NO: 421993 - DNA, 361 bp, Homo sapiens
agctcggtacccccaagatctttgagcatcacacatagggcctgattacattccaacagaggaagaaaggagagtcttcgcagaatgcaatgatgaaagcttctggttcagatgtgagttcaattttctaattaatataatttgatcccaaatttgtacctgaaattttgacttgaatttgaacctgaaataataaacccccaacacctaaaattgtgaatacagataatgaaagtgctacagaagcatcatacagtgtaagttaccatatagcgctgagtggagaggctcatactattggagaattgcttatcaaaccttgtgcgaaagatgtggtgatgctcaagatcttaggggatct

SEQ ID NO: 421994 - DNA, 456 bp, Homo sapiens
attaatcccaatataaggttataatatttttctttacattctttttttagtaagaaaaatgtagttttgaaccatcatataatactagaactaattaggagaaatttaaatcctctttgctttatataagtatagtatatatttatttagcagaataaatgtttatggttgaaaatggctgggtgcagtggctcatgcctgtaatcccagcactttgggaggccgaggcgggtggatcacctgaggtcagagttcaagaccagcctgaccaatatggcgaaaccctgtctctactaaaaatgcaaaattagctgggcatagtggcacatgcctataatcccagctacttgggaggctcaggcaggacaatcactggaacctggcagggggaggtttcagtgagtcgagattgtgcccctgtgctccagcctgggtaacagagtgagactctgtctc

SEQ ID NO: 421995 - DNA, 1474 bp, Homo sapiens
gatcatgaggacactcaaccagcactaaggagatgaactgaggcctctgctagcaatcatgtcagtaagctgccttggaagtggatactgcagccccaagagagccttcagatgactgtaaccccagcctacctcttaatcacagcctggtgagaaaaaccgtagcctcagagagatcacggtaccctgccagaggttgtagaacttgttggaaacttggatcaagagggtgtgacaaataaccaggaaagatgaatgggagggctgattttcgagagccgaatgcagaggttccaagaccaattccccacatagggcctgattacattccaacagaggaagaaaggagagtcttcgcagaatgcaatgatgaaagcttctggttcagatctgtgcctttggctgcaacaagtatgttgattactcaaggattaattagtaaaggaatactttcaagtcatcccaaatatggttccatccctaaacttatacttgcttgtatcatgggatactttgctggaaaactttcttatgtgaaaacttgccaagagaaattcaagaaacttgaaaattccccccttggagaagctttacgatcaggacaagcacgacgatcttcaccacctgggcactattatcaaaagtcaaaatatgactcaagtgtgagtggtcaatcatcttttgtgacatccccagcagcagacaacatagaaatgcttcctcattatgagccaattccattcagttcttctatgaatgaatctgctcccactggtattactgatcatattgtccaaggacctgatcccaaccttgaagaaagtcctaaaagaaaaaatattacatatgaggaattaaggaataagaacagagagtcatatgaagtatctttaacacaaaagactgacccctcagtcaggcctatgcatgaaagagtgccaaaaaaagaagtcaaagtaaacaagtatggagatacttgggatgagtgaaaaattacatcattggacatgaaggagtttcaacatccagcttcatctaggtggtcatgattacctgcatgctttgagctcagcagcagtcttcataaacacatttaaaacaagatcctgggtttttgtggtttgacttctatggtgttttaaaaaaacacagatttttagtgttaatattgtgtaaatgtactcaccttagggattcatttgaatgatggtattataccatgattgtatacagtttgtgaaattgttgcaagggcaaagataactcttaaaaaaccgtcgagattacaatgctctagaatcagcatataagaaaataaatgatatctgcatgttgaattggggtggatggggggagcaagcataatttttaagtgtgaagctttgcatcaagaaattattaaaaagctttttttctccagtattttctgtattatcttaatgtttatggcaaataaaatgtaaaggaacatgaa

SEQ ID NO: 421996 - DNA, 1477 bp, Homo sapiens
tgcctccgggtcgcggtcattttgagcccctgtctggatgacttcttgcggctgttctacccctccccctccccgcgtcgcctgctgctgtcgtcgggaggtgggtgaggtgacgcaaacagccccgttgttgccctccgcgtatcccctcaccacctttgcggccatccacgactttcgcaccttccgccattttcctgcctgtgagggtggacagatcgcgctcgggtctcggcctcctgagtgccggaaagatgaatgggagggctgattttcgagagccgaatgcagaggttccaagaccaattccccacatagggcctgattacattccaacagaggaagaaaggagagtcttcgcagaatgcaatgatgaaagcttctggttcagatctgtgcctttggctgcaacaagtatgttgattactcaaggattaattagtaaaggaatactttcaagtcatcccaaatatggttccatccctaaacttatacttgcttgtatcatgggatactttgctggaaaactttcttatgtgaaaacttgccaagagaaattcaagaaacttgaaaattccccccttggagaagctttacgatcaggacaagcacgacgatcttcaccacctgggcactattatcaaaagtcaaaatatgactcaagtgtgagtggtcaatcatcttttgtgacatccccagcagcagacaacatagaaatgcttcctcattatgagccaattccattcagttcttctatgaatgaatctgctcccactggtattactgatcatattgtccaaggacctgatcccaaccttgaagaaagtcctaaaagaaaaaatattacatatgaggaattaaggaataagaacagagagtcatatgaagtatctttaacacaaaagactgacccctcagtcaggcctatgcatgaaagagtgccaaaaaaagaagtcaaagtaaacaagtatggagatacttgggatgagtgaaaaattacatcattggacatgaaggagtttcaacatccagcttcatctaggtggtcatgattacctgcatgctttgagctcagcagcagtcttcataaacacatttaaaacaagatcctgggtttttgtggtttgacttctatggtgttttaaaaaaacacagatttttagtgttaatattgtgtaaatgtactcaccttagggattcatttgaatgatggtattataccatgattgtatacagtttgtgaaattgttgcaagggcaaagataactcttaaaaaaccgtcgagattacaatgctctagaatcagcatataagaaaataaatgatatctgcatgttgaattggggtggatggggggagcaagcataatttttaagtgtgaagctttgcatcaagaaattattaaaaagctttttttctccagtattttctgtattatcttaatgtttatggcaaataaaatgtaaaggaacatgaa

SEQ ID NO: 421997 - DNA, 1221 bp, Homo sapiens
  misc_feature (50)..(50): n is a, c, g, or t
ctttctaagatcccagttcgacggagactctcctttcttccaagaccaanttccccacatagggcctgattacattccaacagaggaagaaaggagagtcttcgcagaatgcaatgatgaaagcttctggttcagatctgtgcctttggctgcaacaagtatgttgattactcaaggattaattagtaaaggaatactttcaagtcatcccaaatatggttccatccctaaacttatacttgcttgtatcatgggatactttgctggaaaactttcttatgtgaaaacttgccaagagaaattcaagaaacttgaaaattccccccttggagaagctttacgatcaggacaagcacgacgatcttcaccacctgggcactattatcaaaagtcaaaatatgactcaagtgtgagtggtcaatcatcttttgtgacatccccagcagcagacaacatagaaatgcttcctcattatgagccaattccattcagttcttctatgaatgaatctgctcccactggtattactgatcatattgtccaaggacctgatcccaaccttgaagaaagtcctaaaagaaaaaatattacatatgaggaattaaggaataagaacagagagtcatatgaagtatctttaacacaaaagactgacccctcagtcaggcctatgcatgaaagagtgccaaaaaaagaagtcaaagtaaacaagtatggagatacttgggatgagtgaaaaattacatcattggacatgaaggagtttcaacatccagcttcatctaggtggtcatgattacctgcatgctttgagctcagcagcagtcttcataaacacatttaaaacaagatcctgggtttttgtggtttgacttctatggtgttttaaaaaaacacagatttttagtgttaatattgtgtaaatgtactcaccttagggattcatttgaatgatggtattataccatgattgtatacagtttgtgaaattgttgcaagggcaaagataactcttaaaaaaccgtcgagattacaatgctctagaatcagcatataagaaaataaatgatatctgcatgttgaattggggtggatggggggagcaagcataatttttaagtgtgaagctttgcatcaagaaattattaaaaagctttttttctccagtattttctgtattatcttaatgtttatggcaaataaaatgtaaaggaacatgaa

SEQ ID NO: 421998 - DNA, 1350 bp, Homo sapiens
tgcctccgggtcgcggtcattttgagcccctgtctggatgacttcttgcggctgttctacccctccccctccccgcggtaccttgcacttttctccctccctgccccctctcgagtccaccctccgggccttctgcccctgatcgcttggttttccttgcagtcgcctgctgctgtcgtcgggagacatagggcctgattacattccaacagaggaagaaaggagagtcttcgcagaatgcaatgatgaaagcttctggttcagatctgtgcctttggctgcaacaagtatgttgattactcaaggattaattagtaaaggaatactttcaagtcatcccaaatatggttccatccctaaacttatacttgcttgtatcatgggatactttgctggaaaactttcttatgtgaaaacttgccaagagaaattcaagaaacttgaaaattccccccttggagaagctttacgatcaggacaagcacgacgatcttcaccacctgggcactattatcaaaagtcaaaatatgactcaagtgtgagtggtcaatcatcttttgtgacatccccagcagcagacaacatagaaatgcttcctcattatgagccaattccattcagttcttctatgaatgaatctgctcccactggtattactgatcatattgtccaaggacctgatcccaaccttgaagaaagtcctaaaagaaaaaatattacatatgaggaattaaggaataagaacagagagtcatatgaagtatctttaacacaaaagactgacccctcagtcaggcctatgcatgaaagagtgccaaaaaaagaagtcaaagtaaacaagtatggagatacttgggatgagtgaaaaattacatcattggacatgaaggagtttcaacatccagcttcatctaggtggtcatgattacctgcatgctttgagctcagcagcagtcttcataaacacatttaaaacaagatcctgggtttttgtggtttgacttctatggtgttttaaaaaaacacagatttttagtgttaatattgtgtaaatgtactcaccttagggattcatttgaatgatggtattataccatgattgtatacagtttgtgaaattgttgcaagggcaaagataactcttaaaaaaccgtcgagattacaatgctctagaatcagcatataagaaaataaatgatatctgcatgttgaattggggtggatggggggagcaagcataatttttaagtgtgaagctttgcatcaagaaattattaaaaagctttttttctccagtattttctgtattatcttaatgtttatggcaaataaaatgtaaaggaacatgaa

SEQ ID NO: 421999 - DNA, 1191 bp, Homo sapiens
gctggctctcagacccgcagtgaggtctgacgtcatttcctgccgaaagatgaatgggagggctgattttcgagagccgaatgcagaggttccaagaccaattccccctgtgcctttggctgcaacaagtatgttgattactcaaggattaattagtaaaggaatactttcaagtcatcccaaatatggttccatccctaaacttatacttgcttgtatcatgggatactttgctggaaaactttcttatgtgaaaacttgccaagagaaattcaagaaacttgaaaattccccccttggagaagctttacgatcaggacaagcacgacgatcttcaccacctgggcactattatcaaaagtcaaaatatgactcaagtgtgagtggtcaatcatcttttgtgacatccccagcagcagacaacatagaaatgcttcctcattatgagccaattccattcagttcttctatgaatgaatctgctcccactggtattactgatcatattgtccaaggacctgatcccaaccttgaagaaagtcctaaaagaaaaaatattacatatgaggaattaaggaataagaacagagagtcatatgaagtatctttaacacaaaagactgacccctcagtcaggcctatgcatgaaagagtgccaaaaaaagaagtcaaagtaaacaagtatggagatacttgggatgagtgaaaaattacatcattggacatgaaggagtttcaacatccagcttcatctaggtggtcatgattacctgcatgctttgagctcagcagcagtcttcataaacacatttaaaacaagatcctgggtttttgtggtttgacttctatggtgttttaaaaaaacacagatttttagtgttaatattgtgtaaatgtactcaccttagggattcatttgaatgatggtattataccatgattgtatacagtttgtgaaattgttgcaagggcaaagataactcttaaaaaaccgtcgagattacaatgctctagaatcagcatataagaaaataaatgatatctgcatgttgaattggggtggatggggggagcaagcataatttttaagtgtgaagctttgcatcaagaaattattaaaaagctttttttctccagtattttctgtattatcttaatgtttatggcaaataaaatgtaaaggaacatgaa

SEQ ID NO: 422000 - DNA, 1418 bp, Homo sapiens
attaatcccaatataaggttataatatttttctttacattctttttttagtaagaaaaatgtagttttgaaccatcatataatactagaactaattaggagaaatttaaatcctctttgctttatataagtatagtatatatttatttagcagaataaatgtttatggttgaaaatggctgggattatagttgtgagccattgtgcctggcctattttcagtatttttgtttaaattttgtaaaaaggtaaaataaatgatttttgaaaatagctggagttgttttcatagagtctgtggttataggactatttaactatatattgagtaaaatctatgctatgtcaagttttattcagttgtccctagtagaatatatttctcttttaattctgtatacagtatgagtaactccagtttaaaacactggtattttaatgagtttaaattgtactgttatatattatgatacatatttttcttctggctgtggtttagtttttaaaatttttgatgtccattttaatttttagaaataaaagcttaaaaatatgggtggaagtagatttcagtttgatgattatcttggtgaaagtatagtacctgtgaaatggtggtaataatttgattctttattctattttgattgtagctccttttgtaaggagcatttgtaaaatttagttgctttagagttatacaaatccttttattaccatttattaactgtttgttgttttaggacctgatcccaaccttgaagaaagtcctaaaagaaaaaatattacatatgaggaattaaggaataagaacagagagtcatatgaagtatctttaacacaaaagactgacccctcagtcaggcctatgcatgaaagagtgccaaaaaaagaagtcaaagtaaacaagtatggagatacttgggatgagtgaaaaattacatcattggacatgaaggagtttcaacatccagcttcatctaggtggtcatgattacctgcatgctttgagctcagcagcagtcttcataaacacatttaaaacaagatcctgggtttttgtggtttgacttctatggtgttttaaaaaaacacagatttttagtgttaatattgtgtaaatgtactcaccttagggattcatttgaatgatggtattataccatgattgtatacagtttgtgaaattgttgcaagggcaaagataactcttaaaaaaccgtcgagattacaatgctctagaatcagcatataagaaaataaatgatatctgcatgttgaattggggtggatggggggagcaagcataatttttaagtgtgaagctttgcatcaagaaattattaaaaagctttttttctccagtattttctgtattatcttaatgtttatggcaaataaaatgtaaaggaacatgaa

SEQ ID NO: 422001 - DNA, 1340 bp, Homo sapiens
ctaattttgtgtttttagtagagatgaggtttcttgttggccaggctggtcttgaactcctgacctcaggtgatccgcccgcctcggccttccaaagtgcctgggattatagttgtgagccattgtgcctggcctattttcagtatttttgtttaaattttgtaaaaaggtaaaataaatgatttttgaaaatagctggagttgttttcatagagtctgtggttataggactatttaactatatattgagtaaaatctatgctatgtcaagttttattcagttgtccctagtagaatatatttctcttttaattctgtatacagtatgagtaactccagtttaaaacactggtattttaatgagtttaaattgtactgttatatattatgatacatatttttcttctggctgtggtttagtttttaaaatttttgatgtccattttaatttttagaaataaaagcttaaaaatatgggtggaagtagatttcagtttgatgattatcttggtgaaagtatagtacctgtgaaatggtggtaataatttgattctttattctattttgattgtagctccttttgtaaggagcatttgtaaaatttagttgctttagagttatacaaatccttttattaccatttattaactgtttgttgttttaggacctgatcccaaccttgaagaaagtcctaaaagaaaaaatattacatatgaggaattaaggaataagaacagagagtcatatgaagtatctttaacacaaaagactgacccctcagtcaggcctatgcatgaaagagtgccaaaaaaagaagtcaaagtaaacaagtatggagatacttgggatgagtgaaaaattacatcattggacatgaaggagtttcaacatccagcttcatctaggtggtcatgattacctgcatgctttgagctcagcagcagtcttcataaacacatttaaaacaagatcctgggtttttgtggtttgacttctatggtgttttaaaaaaacacagatttttagtgttaatattgtgtaaatgtactcaccttagggattcatttgaatgatggtattataccatgattgtatacagtttgtgaaattgttgcaagggcaaagataactcttaaaaaaccgtcgagattacaatgctctagaatcagcatataagaaaataaatgatatctgcatgttgaattggggtggatggggggagcaagcataatttttaagtgtgaagctttgcatcaagaaattattaaaaagctttttttctccagtattttctgtattatcttaatgtttatggcaaataaaatgtaaaggaacatgaa

SEQ ID NO: 422002 - DNA, 3215 bp, Homo sapiens
gatcatgaggacactcaaccagcactaaggagatgaactgaggcctctgctagcaatcatgtcagtaagctgccttggaagtggatactgcagccccaagagagccttcagatgactgtaaccccagcctacctcttaatcacagcctggtgagaaaaaccgtagcctcagagagatcacggtaccctgccagaggttgtagaacttgttggaaacttggatcaagagggtgtgacaaataaccaggaaagatgaatgggagggctgattttcgagagccgaatgcagaggttccaagaccaattccccacatagggcctgattacattccaacagaggaagaaaggagagtcttcgcagaatgcaatgatgaaagcttctggttcagatctgtgcctttggctgcaacaagtatgttgattactcaaggattaattagtaaaggaatactttcaagtcatcccaaatatggttccatccctaaacttatacttgcttgtatcatgggatactttgctggaaaactttcttatgtgaaaacttgccaagagaaattcaagaaacttgaaaattccccccttggagaagctttacgatcaggacaagcacgacgatcttcaccacctgggcactattatcaaaagtcaaaatatgactcaagtgtgagtggtcaatcatcttttgtgacatccccagcagcagacaacatagaaatgcttcctcattatgagccaattccattcagttcttctatgaatgaatctgctcccactggtattactgatcatattgtccaaggacctgatcccaaccttgaagaaagtcctaaaagaaaaaatattacatatgaggaattaaggaataagaacagagagtcatatgaagtatctttaacacaaaagactgacccctcagtcaggcctatgcatgaaagagtgccaaaaaaagaagtcaaagtaaacaagtatggagatacttgggatgagtgaaaaattacatcattggacatgaaggagtttcaacatccagcttcatctaggtggtcatgattacctgcatgctttgagctcagcagcagtcttcataaacacatttaaaacaagatcctgggtttttgtggtttgacttctatggtgttttaaaaaaacacagatttttagtgttaatattgtgtaaatgtactcaccttagggattcatttgaatgatggtattataccatgattgtatacagtttgtgaaattgttgcaagggcaaagataactcttaaaaaaccgtcgagattacaatgctctagaatcagcatataagaaaataaatgatatctgcatgttgaattggggtggatggggggagcaagcataatttttaagtgtgaagctttgcatcaagaaattattaaaaagctttttttctccagtattttctgtattatcttaatgtttatggcaaataaaatgtaaaggaacatgaaacatgcaacagccctcatcttccttgattttatggttttattgtttgtaatttattgatttatttttaagctagttataatcatgtaggtataggaaataaagtcatctataatatttctataatatggctataatatggctataaatctataatatggctggaggcagtgggcagtggttcatgcctgtaatcccagcactttgggaggccgaagtgggaggattgcatgagtccaggagtttgagaccagcctgggcaacaaagcgagaccctgtctttacaaaaaaataaaaattagctggcgatggtgtcgtgtgcctgtagtcctagttacttaagaggctgagttgggaggatcagttgaacccagtggttctgggttgcagtgagctgtggtcacaccactgaactccagcctgtgcgactgagtgagaccctgtgtctaaaaaaataaaaatataatgaatgtgatttatgtagataaattgataatatagtaaataggtaaatgccttaaaaagcatttttaaagaatttgtaaattctaaaacaataaaaatttggtatacatcacaaaactgatattatgttaaaaagaaaaattggtgtacagtgacccttcgtatctgtgggttccgtatctgcagattcaatcaactgcagattgaaaatatttgagggagagaaatggatggttgtctgtactgaactcttgttattcccaaacaatacattgtaataactatttacatagcatttacattaggcattacaagtaatctataaatgacttaaagtatataggaggatgtgcattggttatatgtaaatactacaccattttatagtggacgttaggaacctggaccaatagacccccacctagtcacattttagaaagaacacatgggatgggagataccgcagccatctttcagtctatcatttggcagctgtaattcacatccctttcctgaggacctctgtttcctatgccattacaaaagctcaaagtctaggagctgatcatctaatcaggataaggtatggatgaggctccttgggtaaagcttcatgaataaaagcgtcatgaataccatttctctgtctgaaggcctgaacttaagaacttatctgctttgttcacctgttaggcataacatcactactctggagattcccattcaaaaagagaaaaggaaaggcttggcttgcaattctgaagtctagccagcctaatgtggctgttctttggggcctaggtatattccctgggggttgttctctggtgcttttgaccctgccctctgatttttccttttctattgaggcacttgtgtttgcagctgagtagttttttttgtttgttttttaaagcctactccctcacagaatttgggggtccaaaggcctatttttactactacccctgtccaagctgacatattttttcatatttttttcctgtgtatttctcatgtatcaatttataatccattctattacacaagagccactcataaagtctattggaaatagtcctttttctatgttgggctccctgtgaggctgatgaacaacatacttcagattctaagccttggacagggtctaaaaggcatgctggtaagacacgtaggcaatttacatgtctgaaatgtcttaagatgcactcatcttcctgaggtcttgagcaaagtatcttttgccccactttggatttggtctttgagagccat

SEQ ID NO: 422003 - DNA, 1753 bp, Homo sapiens
  misc_feature (1480)..(1480): n is a, c, g, or t
  misc_feature (1483)..(1483): n is a, c, g, or t
  misc_feature (1489)..(1489): n is a, c, g, or t
  misc_feature (1491)..(1491): n is a, c, g, or t
gatcatgaggacactcaaccagcactaaggagatgaactgaggcctctgctagcaatcatgtcagtaagctgccttggaagtggatactgcagccccaagagagccttcagatgactgtaaccccagcctacctcttaatcacagcctggtgagaaaaaccgtagcctcagagagatcacggtaccctgccagaggttgtagaacttgttggaaacttggatcaagagggtgtgacaaataaccaggaaagatgaatgggagggctgattttcgagagccgaatgcagaggttccaagaccaattccccacatagggcctgattacattccaacagaggaagaaaggagagtcttcgcagaatgcaatgatgaaagcttctggttcagatctgtgcctttggctgcaacaagtatgttgattactcaaggattaattagtaaaggaatactttcaagtcatcccaaatatggttccatccctaaacttatacttgcttgtatcatgggatactttgctggaaaactttcttatgtgaaaacttgccaagagaaattcaagaaacttgaaaattccccccttggagaagctttacgatcaggacaagcacgacgatcttcaccacctgggcactattatcaaaagtcaaaatatgactcaagtgtgagtggtcaatcatcttttgtgacatccccagcagcagacaacatagaaatgcttcctcattatgagccaattccattcagttcttctatgaatgaatctgctcccactggtattactgatcatattgtccaaggacctgatcccaaccttgaagaaagtcctaaaagaaaaaatattacatatgaggaattaaggaataagaacagagagtcatatgaagtatctttaacacaaaagactgacccctcagtcaggcctatgcatgaaagagtgccaaaaaaagaagtcaaagtaaacaagtatggagatacttgggatgagtgaaaaattacatcattggacatgaaggagtttcaacatccagcttcatctaggtggtcatgattacctgcatgctttgagctcagcagcagtcttcataaacacatttaaaacaagatcctgggtttttgtggtttgacttctatggtgttttaaaaaaacacagatttttagtgttaatattgtgtaaatgtactcaccttagggattcatttgaatgatggtattataccatgattgtatacagtttgtgaaattgttgcaagggcaaagataactcttaaaaaaccgtcgagattacaatgctctagaatcagcatataagaaaataaatgatatctgcatgttgaattggggtggatggggggagcaagcataatttttaagtgtgaagctttgcatcaagaaattattaaaaagctttttttctccagtattttctgtattatcttaatgtttatggcaaataaaatgtaaaggaacatgaaggtaancanatcacnangttcagaacttgatgtgggtcccggcacccaacttcgccctatagtgaggcggtttacaattcactgggcgtcggtttacaacatcttgacttgtaagaaccttgttttaacccaagtgaggggctttccttggggggggtttcgacacccgagggatattgaggaggccttacaatccatctcccatttttccccagcctgatggaaaaacccggtccacccccttattcctcgttgaaccccctttttcgacggttgttc

SEQ ID NO: 422004 - DNA, 1528 bp, Homo sapiens
gatcatgaggacactcaaccagcactaaggagatgaactgaggcctctgctagcaatcatgtcagtaagctgccttggaagtggatactgcagccccaagagagccttcagatgactgtaaccccagcctacctcttaatcacagcctggtgagaaaaaccgtagcctcagagagatcacggtaccctgccagaggttgtagaacttgttggaaacttggatcaagagggtgtgacaaataaccaggaaagatgaatgggagggctgattttcgagagccgaatgcagaggttccaagaccaattccccacatagggcctgattacattccaacagaggaagaaaggagagtcttcgcagaatgcaatgatgaaagcttctggttcagatctgtgcctttggctgcaacaagtatgttgattactcaaggattaattagtaaaggaatactttcaagtcatcccaaatatggttccatccctaaacttatacttgcttgtatcatgggatactttgctggaaaactttcttatgtgaaaacttgccaagagaaattcaagaaacttgaaaattccccccttggagaagctttacgatcaggacaagcacgacgatcttcaccacctgggcactattatcaaaagtcaaaatatgactcaagtgtgagtggtcaatcatcttttgtgacatccccagcagcagacaacatagaaatgcttcctcattatgagccaattccattcagttcttctatgaatgaatctgctcccactggtattactgatcatattgtccaaggacctgatcccaaccttgaagaaagtcctaaaagaaaaaatattacatatgaggaattaaggaataagaacagagagtcatatgaagtatctttaacacaaaagactgacccctcagtcaggcctatgcatgaaagagtgccaaaaaaagaagtcaaagtaaacaagtatggagatacttgggatgagtgaaaaattacatcattggacatgaaggagtttcaacatccagcttcatctaggtggtcatgattacctgcatgctttgagctcagcagcagtcttcataaacacatttaaaacaagatcctgggtttttgtggtttgacttctatggtgttttaaaaaaacacagatttttagtgttaatattgtgtaaatgtactcaccttagggattcatttgaatgatggtattataccatgattgtatacagtttgtgaaattgttgcaagggcaaagataactcttaaaaaaccgtcgagattacaatgctctagaatcagcatataagaaaataaatgatatctgcatgttgaattggggtggatggggggagcaagcataatttttaagtgtgaagctttgcatcaagaaattattaaaaagctttttttctccagtattttctgtattatcttaatgtttatggcaaataaaatgtaaaggaacatgaaaaaaaaaaagtcgacgcggccgcgaatttagtagtagtagtagtaggcggccgc

SEQ ID NO: 422005 - DNA, 1534 bp, Homo sapiens
  misc_feature (1496)..(1496): n is a, c, g, or t
gatcatgaggacactcaaccagcactaaggagatgaactgaggcctctgctagcaatcatgtcagtaagctgccttggaagtggatactgcagccccaagagagccttcagatgactgtaaccccagcctacctcttaatcacagcctggtgagaaaaaccgtagcctcagagagatcacggtaccctgccagaggttgtagaacttgttggaaacttggatcaagagggtgtgacaaataaccaggaaagatgaatgggagggctgattttcgagagccgaatgcagaggttccaagaccaattccccacatagggcctgattacattccaacagaggaagaaaggagagtcttcgcagaatgcaatgatgaaagcttctggttcagatctgtgcctttggctgcaacaagtatgttgattactcaaggattaattagtaaaggaatactttcaagtcatcccaaatatggttccatccctaaacttatacttgcttgtatcatgggatactttgctggaaaactttcttatgtgaaaacttgccaagagaaattcaagaaacttgaaaattccccccttggagaagctttacgatcaggacaagcacgacgatcttcaccacctgggcactattatcaaaagtcaaaatatgactcaagtgtgagtggtcaatcatcttttgtgacatccccagcagcagacaacatagaaatgcttcctcattatgagccaattccattcagttcttctatgaatgaatctgctcccactggtattactgatcatattgtccaaggacctgatcccaaccttgaagaaagtcctaaaagaaaaaatattacatatgaggaattaaggaataagaacagagagtcatatgaagtatctttaacacaaaagactgacccctcagtcaggcctatgcatgaaagagtgccaaaaaaagaagtcaaagtaaacaagtatggagatacttgggatgagtgaaaaattacatcattggacatgaaggagtttcaacatccagcttcatctaggtggtcatgattacctgcatgctttgagctcagcagcagtcttcataaacacatttaaaacaagatcctgggtttttgtggtttgacttctatggtgttttaaaaaaacacagatttttagtgttaatattgtgtaaatgtactcaccttagggattcatttgaatgatggtattataccatgattgtatacagtttgtgaaattgttgcaagggcaaagataactcttaaaaaaccgtcgagattacaatgctctagaatcagcatataagaaaataaatgatatctgcatgttgaattggggtggatggggggagcaagcataatttttaagtgtgaagctttgcatcaagaaattattaaaaagctttttttctccagtattttctgtattatcttaatgtttatggcaaataaaatgtaaaggaacatgaaaaagatgcggccagaccttccnctctaacatccacctacccctacctgagcgccgcttct

SEQ ID NO: 422006 - DNA, 1321 bp, Homo sapiens
gatcatgaggacactcaaccagcactaaggagatgaactgaggcctctgctagcaatcatgtcagtaagctgccttggaagtggatactgcagccccaagagagccttcagatgactgtaaccccagcctacctcttaatcacagcctggtgagaaaaaccgtagcctcagagagatcacggtaccctgccagaggttgtagaacttgttggaaacttggatcaagagggtgtgacaaataaccaggaaagatgaatgggagggctgattttcgagagccgaatgcagaggttccaagaccaattccccacatagggcctgattacattccaacagaggaagaaaggagagtcttcgcagaatgcaatgatgaaagcttctggttcagatctgtgcctttggctgcaacaagtatgttgattactcaaggattaattagtaaaggaatactttcaagtcatcccaaatatggttccatccctaaacttatacttgcttgtatcatgggatactttgctggaaaactttcttatgtgaaaacttgccaagagaaattcaagaaacttgaaaattccccccttggagaagctttacgatcaggacaagcacgacgatcttcaccacctgggcactattatcaaaagtcaaaatatgactcaagtgtgagtggtcaatcatcttttgtgacatccccagcagcagacaacatagaaatgcttcctcattatgagccaattccattcagttcttctatgaatgaatctgctcccactggtattactgatcatattgtccaagtcaaagtaaacaagtatggagatacttgggatgagtgaaaaattacatcattggacatgaaggagtttcaacatccagcttcatctaggtggtcatgattacctgcatgctttgagctcagcagcagtcttcataaacacatttaaaacaagatcctgggtttttgtggtttgacttctatggtgttttaaaaaaacacagatttttagtgttaatattgtgtaaatgtactcaccttagggattcatttgaatgatggtattataccatgattgtatacagtttgtgaaattgttgcaagggcaaagataactcttaaaaaaccgtcgagattacaatgctctagaatcagcatataagaaaataaatgatatctgcatgttgaattggggtggatggggggagcaagcataatttttaagtgtgaagctttgcatcaagaaattattaaaaagctttttttctccagtattttctgtattatcttaatgtttatggcaaataaaatgtaaaggaacatgaa

SEQ ID NO: 422007 - DNA, 619 bp, Homo sapiens
agagaaacataacttttcatcatagcaacaaacttaaaataatgtcttttacttattattgcttggaatcatcaattatttatgcttttttcctagtcaaagtaaacaagtatggagatacttgggatgagtgaaaaattacatcattggacatgaaggagtttcaacatccagcttcatctaggtggtcatgattacctgcatgctttgagctcagcagcagtcttcataaacacatttaaaacaagatcctgggtttttgtggtttgacttctatggtgttttaaaaaaacacagatttttagtgttaatattgtgtaaatgtactcaccttagggattcatttgaatgatggtattataccatgattgtatacagtttgtgaaattgttgcaagggcaaagataactcttaaaaaaccgtcgagattacaatgctctagaatcagcatataagaaaataaatgatatctgcatgttgaattggggtggatggggggagcaagcataatttttaagtgtgaagctttgcatcaagaaattattaaaaagctttttttctccagtattttctgtattatcttaatgtttatggcaaataaaatgtaaaggaacatgaa

SEQ ID NO: 422008 - DNA, 1312 bp, Homo sapiens
gatcatgaggacactcaaccagcactaaggagatgaactgaggcctctgctagcaatcatgtcagtaagctgccttggaagtggatactgcagccccaagagagccttcagatgactgtaaccccagcctacctcttaatcacagcctggtgagaaaaaccgtagcctcagagagatcacggtaccctgccagaggttgtagaacttgttggaaacttggatcaagagggtgtgacaaataaccaggaaagatgaatgggagggctgattttcgagagccgaatgcagaggttccaagaccaattccccacatagggcctgattacattccaacagaggaagaaaggagagtcttcgcagaatgcaatgatgaaagcttctggttcagatctgtgcctttggctgcaacaagtatgttgattactcaaggattaattagtaaaggaatactttcaagtcatcccaaatatggttccatccctaaacttatacttgcttgtatcatgggatactttgctggaaaactttcttatgtgaaaacttgccaagagaaattcaagaaacttgaaaattccccccttggagaagctttacgatcaggacaagcacgacgatcttcaccacctgggcactattatcaaaagtcaaaatatgactcaagtgtgagtggtcaatcatcttttgtgacatccccagcagcagacaacatagaaatgcttcctcattatgagccaattccattcagttcttctatgaatgaatctgctcccactggtattactgatcatattgtccaaggacctgatcccaaccttgaagaaagtcctaaaagaaaaaatattacatatgaggaattaaggaataagaacagagagtcatatgaagtatctttaacacaaaagactgacccctcagtcaggcctatgcatgaaagagtgccaaaaaaagaaggtatgatagtttagtctgaatcactttactgttgaggattggaaactaaaacattactttaaaacaatactataaaaaattaattaatatgtgatttaactcttcaagcaattaaccaaagtaaaatatttttaaaatagtactttacagttatcagttctttttttttttttgagacggagtcttgctccgtcgccaggctggagtgcagtggcacgatcttggctcactgcagcctctgcctcgctgaggcaggagaactgcatgaacccaggaggcagaggttgcagtgaaccgacatcacgccactgcactgcagcctggatgacggagcgaggctctgttcccccctccccccgcc

SEQ ID NO: 422009 - DNA, 1269 bp, Homo sapiens
gatcatgaggacactcaaccagcactaaggagatgaactgaggcctctgctagcaatcatgtcagtaagctgccttggaagtggatactgcagccccaagagagccttcagatgactgtaaccccagcctacctcttaatcacagcctggtgagaaaaaccgtagcctcagagagatcacggtaccctgccagaggttgtagaacttgttggaaacttggatcaagagggtgtgacaaataaccaggaaagatgaatgggagggctgattttcgagagccgaatgcagaggttccaagaccaattccccacatagggcctgattacattccaacagaggaagaaaggagagtcttcgcagaatgcaatgatgaaagcttctggttcagatctgtgcctttggctgcaacaagtatgttgattactcaaggattaattagtaaaggaatactttcaagtcatcccaaatatggttccatccctaaacttatacttgcttgtatcatgggatactttgctggaaaactttcttatgtgaaaacttgccaagagaaattcaagaaacttgaaaattccccccttggagaagctttacgatcaggacaagcacgacgatcttcaccacctgggcactattatcaaaagtcaaaatatgactcaagtgtgagtggtcaatcatcttttgtgacatccccagcagcagacaacatagaaatgcttcctcattatgagccaattccattcagttcttctatgaatgaatctgctcccactggtattactgatcatattgtccaagtcaaagtaaacaagtatggagatacttgggatgagtgaaaaattacatcattggacatgaaggagtttcaacatccagcttcatctaggtggtcatgattacctgcatgctttgagctcagcagcagtcttcataaacacatttaaaacaagatcctgggtttttgtggtttgacttctatggtgttttaaaaaaacacagatttttagtgttaatattgtgtaaatgtactcaccttagggattcatttgaatgatggtattataccatgattgtatacagtttgtgaaattgttgcaagggcaaagataactcttaaaaaaccgtcgagattacaatgctctagaatcagcatataagaaaataaatgatatctgcatgttgaattggggtggatggggggagcaagcataatttttaagtgtgaagctttgcatcaagaaattattaaaaagctttttttctccagta

SEQ ID NO: 422010 - DNA, 1769 bp, Homo sapiens
gatcatgaggacactcaaccagcactaaggagatgaactgaggcctctgctagcaatcatgtcagtaagctgccttggaagtggatactgcagccccaagagagccttcagatgactgtaaccccagcctacctcttaatcacagcctggtgagaaaaaccgtagcctcagagagatcacggtaccctgccagaggttgtagaacttgttggaaacttggatcaagagggtgtgacaaataaccaggaaagatgaatgggagggctgattttcgagagccgaatgcagaggttccaagaccaattccccacatagggcctgattacattccaacagaggaagaaaggagagtcttcgcagaatgcaatgatgaaagcttctggttcagatctgtgcctttggctgcaacaagtatgttgattactcaaggattaattagtaaaggaatactttcaagtcatcccaaatatggttccatccctaaacttatacttgcttgtatcatgggatactttgctggaaaactttcttatgtgaaaacttgccaagagaaattcaagaaacttgaaaattccccccttggagaagctttacgatcaggacaagcacgacgatcttcaccacctgggcactattatcaaaagtcaaaatatgactcaagtgtgagtggtcaatcatcttttgtgacatccccagcagcagacaacatagaaatgcttcctcattatgagccaattccattcagttcttctatgaatgaatctgctcccactggtattactgatcatattgtccaaggtagaaacttctcttgaaatgaatttcaacattttatggtccaacgtatgtataaactttatttgatgaccttttctgctggatatcacctgtgtgttctaccatcaatcatcaacctaaactcagcatgtttgttcatttgtttcttcattcattcaacttttcttgaggaccagtaggtgtcaaggactctgctagacgtggaagaagatgaataacacttggttcttgtccctgaaaaactttcagtctgttagaagatatagaaatacaaggatgaattactagtatgtcccagtaattgaaaatactaaggcaagcttagtggaatagtgaagaagaaatgataaatcgtgtctcaggaagtagagctccaggaaaggtataaaaaggttacatttgataggctgggttttaaaggctttcagcttccctgtctgtaatacaagaaagaactgttgtcaagtgagaaaatccatgtgaaaatgctttgtgaagtttgtaaatactagctttgaagatcacacatgtaagtgcaacaacatcaattttgtattaaggcttggatttgaatcatgattgacatttgctagctatgtgaccttgtaatactactactacattataataatgtagtaatattattataactactttatgatcctttcagtttcttgatcagttgaatggagatgatactacctctcttaatgaactgttggaattagaggaaataatcagaggcaatgtctggcaaataatagactcaaaaaacattagtttctttccttcagtctagtcggcagtaaaagatgaggaattagaaacgggaaatacaggtctgtaattctttatctaaaatcctgaaattcaaaaaggtttaagccaagtttttttttgttttttgtttttttttttttttttgagatggagtcttgctctgtcgcccagtctggactgtagtggtgcga

SEQ ID NO: 422011 - DNA, 1289 bp, Homo sapiens
tgcctccgggtcgcggtcattttgagcccctgtctggatgacttcttgcggctgttctacccctccccctccccgcggtaccttgcacttttctccctccctgccccctctcgagtccaccctccgggccttctgcccctgatcgcttggttttccttgcagtcgcctgctgctgtcgtcgggaggtgggtgaggtgacgcaaacagccccgttgttgccctccgcgtatcccctcaccacctttgcggccatccacgactttcgcaccttccgccattttcctgcctgtgagggtggacagatcgcgctcgggtctcggcctcctgagtgccggtgactgcgggaggcgacggagtgcttctgggggtgtgagctggggaagttcgtggtcacggatgcgtgtggggttgctgctcagtctgtaacggcaggtgggagacggacactgggtggaggatggagtgcggtaatcagcggttgtaggccgcttaggctttaatccagcgttgttttgtgtaaagaacttaaaatggtattgtcttaagcgccgtgtcagccctgacagtcttcctggtgtttctaggaaggatgccgttatgggaaataagagggtttcattttttctcatacggttgtagggtaaaggtagtttattcagcaggctccatccatccatgaattcagctgaccttttttatttcttttctctaattaaggggttggcatgtagtaggccttcatggcttattgactgaatgaattatggaagggctcagttgctgtcctcattgtgtatgccatttcctgtttccatgcaaattgtttttaaaatgagaataatcatgatcccacgtaaacgttctgtaaaatacggttacttgatctgttggtctgagtcccaatatatgagtttttaaaaaaagaaccaaataaaaaatgtatattcttggaattttatgcatttttttcttatattcttggggtggaaggaaatttggagatacagaatttgctgttagttttacctcacagggagaaggatatgtcgtctttgttattccataattttggagtgctcctttgtgggagaggttgaatgtttctgatgattatttcattttttaatatggaagctcagaaatgacttgaaattttttttctcttctattttggggaattatcctaatcattgggcatagattcgagaaacgaccaaaacataggatgtgaaagaacccacttccaggaggaaaaaatatgtctgttattttattgatatcttgatagt

SEQ ID NO: 422012 - DNA, 555 bp, Homo sapiens
gatcatgaggacactcaaccagcactaaggagatgaactgaggcctctgctagcaatcatgtcagtaagctgccttggaagtggatactgcagccccaagagagccttcagatgactgtaaccccagcctacctcttaatcacagcctggtgagaaaaaccgtagcctcagagagatcacggtaccctgccagaggttgtagaacttgttggaaacttggatcaagagggtgtgacaaataaccaggaaagatgaatgggagggctgattttcgagagccgaatgcagaggttccaagaccaattccccacatagggcctgattacattccaacagaggaagaaaggagagtcttcgcagaatgcaatgatgaaagcttctggttcagatctgtgcctttggctgcaacaagtatgttgattactcaaggattaattagtaaaggaatactttcaagtcatcccaaatatggttccatccctaaacttatacgtaagtatgaacaacattgtagttttcatagctttttaaaacttaaataaaattatttttatc

SEQ ID NO: 422013 - DNA, 1413 bp, Homo sapiens
tgcctccgggtcgcggtcattttgagcccctgtctggatgacttcttgcggctgttctacccctccccctccccgcggtaccttgcacttttctccctccctgccccctctcgagtccaccctccgggccttctgcccctgatcgcttggttttccttgcagtcgcctgctgctgtcgtcgggaggaaagatgaatgggagggctgattttcgagagccgaatgcagaggttccaagaccaattccccacatagggcctgattacattccaacagaggaagaaaggagagtcttcgcagaatgcaatgatgaaagcttctggttcagatctgtgcctttggctgcaacaagtatgttgattactcaaggattaattagtaaaggaatactttcaagtcatcccaaatatggttccatccctaaacttatacttgcttgtatcatgggatactttgctggaaaactttcttatgtgaaaacttgccaagagaaattcaagaaacttgaaaattccccccttggagaagctttacgatcaggacaagcacgacgatcttcaccacctgggcactattatcaaaagtcaaaatatgactcaagtgtgagtggtcaatcatcttttgtgacatccccagcagcagacaacatagaaatgcttcctcattatgagccaattccattcagttcttctatgaatgaatctgctcccactggtattactgatcatattgtccaaggacctgatcccaaccttgaagaaagtcctaaaagaaaaaatattacatatgaggaattaaggaataagaacagagagtcatatgaagtatctttaacacaaaagactgacccctcagtcaggcctatgcatgaaagagtgccaaaaaaagaagtcaaagtaaacaagtatggagatacttgggatgagtgaaaaattacatcattggacatgaaggagtttcaacatccagcttcatctaggtggtcatgattacctgcatgctttgagctcagcagcagtcttcataaacacatttaaaacaagatcctgggtttttgtggtttgacttctatggtgttttaaaaaaacacagatttttagtgttaatattgtgtaaatgtactcaccttagggattcatttgaatgatggtattataccatgattgtatacagtttgtgaaattgttgcaagggcaaagataactcttaaaaaaccgtcgagattacaatgctctagaatcagcatataagaaaataaatgatatctgcatgttgaattggggtggatggggggagcaagcataatttttaagtgtgaagctttgcatcaagaaattattaaaaagctttttttctccagtattttctgtattatcttaatgtttatggcaaataaaatgtaaaggaacatgaa

SEQ ID NO: 422014 - DNA, 1660 bp, Homo sapiens
tgcctccgggtcgcggtcattttgagcccctgtctggatgacttcttgcggctgttctacccctccccctccccgcggtaccttgcacttttctccctccctgccccctctcgagtccaccctccgggccttctgcccctgatcgcttggttttccttgcagtcgcctgctgctgtcgtcgggaggtgggtgaggtgacgcaaacagccccgttgttgccctccgcgtatcccctcaccacctttgcggccatccacgactttcgcaccttccgccattttcctgcctgtgagggtggacagatcgcgctcgggtctcggcctcctgagtgccggtgactgcgggaggcgacggagtgcttctgggggtgtgagctggggaagttcgtggtcacggatgcgtgtggggttgctgctcagtctgtaacggcaggaaagatgaatgggagggctgattttcgagagccgaatgcagaggttccaagaccaattccccacatagggcctgattacattccaacagaggaagaaaggagagtcttcgcagaatgcaatgatgaaagcttctggttcagatctgtgcctttggctgcaacaagtatgttgattactcaaggattaattagtaaaggaatactttcaagtcatcccaaatatggttccatccctaaacttatacttgcttgtatcatgggatactttgctggaaaactttcttatgtgaaaacttgccaagagaaattcaagaaacttgaaaattccccccttggagaagctttacgatcaggacaagcacgacgatcttcaccacctgggcactattatcaaaagtcaaaatatgactcaagtgtgagtggtcaatcatcttttgtgacatccccagcagcagacaacatagaaatgcttcctcattatgagccaattccattcagttcttctatgaatgaatctgctcccactggtattactgatcatattgtccaaggacctgatcccaaccttgaagaaagtcctaaaagaaaaaatattacatatgaggaattaaggaataagaacagagagtcatatgaagtatctttaacacaaaagactgacccctcagtcaggcctatgcatgaaagagtgccaaaaaaagaagtcaaagtaaacaagtatggagatacttgggatgagtgaaaaattacatcattggacatgaaggagtttcaacatccagcttcatctaggtggtcatgattacctgcatgctttgagctcagcagcagtcttcataaacacatttaaaacaagatcctgggtttttgtggtttgacttctatggtgttttaaaaaaacacagatttttagtgttaatattgtgtaaatgtactcaccttagggattcatttgaatgatggtattataccatgattgtatacagtttgtgaaattgttgcaagggcaaagataactcttaaaaaaccgtcgagattacaatgctctagaatcagcatataagaaaataaatgatatctgcatgttgaattggggtggatggggggagcaagcataatttttaagtgtgaagctttgcatcaagaaattattaaaaagctttttttctccagtattttctgtattatcttaatgtttatggcaaataaaatgtaaaggaacatgaa

SEQ ID NO: 422015 - DNA, 1660 bp, Homo sapiens; identical to SEQ ID NO: 422014

SEQ ID NO: 422016 - DNA, 2014 bp, Homo sapiens
gatcatgaggacactcaaccagcactaaggagatgaactgaggcctctgctagcaatcatgtcagtaagctgccttggaagtggatactgcagccccaagagagccttcagatgactgtaaccccagcctacctcttaatcacagcctggtgagaaaaaccgtagcctcagagagatcacggtaccctgccagaggttgtagaacttgttggaaacttggatcaagagggtgtgacaaataaccaggaaagatgaatgggagggctgattttcgagagccgaatgcagaggttccaagaccaattccccacatagggcctgattacattccaacagaggaagaaaggagagtcttcgcagaatgcaatgatgaaagcttctggttcagatctgtgcctttggctgcaacaagtatgttgattactcaaggattaattagtaaaggaatactttcaagtcatcccaaatatggttccatccctaaacttatacttgcttgtatcatgggatactttgctggaaaactttcttatgtgaaaacttgccaagagaaattcaagaaacttgaaaattccccccttggagaagctttacgatcaggacaagcacgacgatcttcaccacctgggcactattatcaaaagtcaaaatatgactcaagtgtgagtggtcaatcatcttttgtgacatccccagcagcagacaacatagaaatgcttcctcattatgagccaattccattcagttcttctatgaatgaatctgctcccactggtattactgatcatattgtccaaggacctgatcccaaccttgaagaaagtcctaaaagaaaaaatattacatatgaggaattaaggaataagaacagagagtcatatgaagtatctttaacacaaaagactgacccctcagtcaggcctatgcatgaaagagtgccaaaaaaagaagtcaaagtaaacaagtatggagatacttgggatgagtgaaaaattacatcattggacatgaaggagtttcaacatccagcttcatctaggtggtcatgattacctgcatgctttgagctcagcagcagtcttcataaacacatttaaaacaagatcctgggtttttgtggtttgacttctatggtgttttaaaaaaacacagatttttagtgttaatattgtgtaaatgtactcaccttagggattcatttgaatgatggtattataccatgattgtatacagtttgtgaaattgttgcaagggcaaagataactcttaaaaaaccgtcgagattacaatgctctagaatcagcatataagaaaataaatgatatctgcatgttgaattggggtggatggggggagcaagcataatttttaagtgtgaagctttgcatcaagaaattattaaaaagctttttttctccagtattttctgtattatcttaatgtttatggcaaataaaatgtaaaggaacatgaaaaaaaaaaaaaaaaaaaaaaaaaaaaaaaaaaaaaaaaaggggggggccccctaaaaaaatatctccccgcggggggcccaaatttaccgggaaccccttttcctgggtacacacagggagcgccccacaagaagagagcgcgctataatacagcacaggaccgggccaggacgttcacacaagcgcgtgcgaagactgggaaacactggcacacggagacacccccgggcacgaggacacccaccacacagcgagggggggggcgcgacaacaacttagggggggggcaccaacacccctccccgacacacgaggagaaattatctaaaaacacgccccctaagggaagcaaaccacataaccacaaacactcataacacagcgcgaataaataaaaggggggcgtcacaaacaacacactagccgccgcgataatacaccgcgaccgccgcggctcgcagaaaaacacaaaatggccggcacaacaacgaagcaaaaccaaagatcaagcgagcaccaacacttttttaccagccccg

SEQ ID NO: 422017 - DNA, 1422 bp, Homo sapiens
gatcatgaggacactcaaccagcactaaggagatgaactgaggcctctgctagcaatcatgtcagtaagctgccttggaagtggatactgcagccccaagagagccttcagatgactgtaaccccagcctacctcttaatcacagcctggtgagaaaaaccgtagcctcagagagatcacggtaccctgccagaggttgtagaacttgttggaaacttggatcaagagggtgtgacaaataaccaggaaagatgaatgggagggctgattttcgagagccgaatgcagaggttccaagaccaattccccacatagggcctgattacattccaacagaggaagaaaggagagtcttcgcagaatgcaatgatgaaagcttctggttcagatctgtgcctttggctgcaacaagtatgttgattactcaaggattaattagtaaaggaatactttcaagtcatcccaaatatggttccatccctaaacttatacttgcttgtatcatgggatactttgctggaaaactttcttatgtgaaaacttgccaagagaaattcaagaaacttgaaaattccccccttggagaagctttacgatcaggacaagcacgacgatcttcaccacctgggcactattatcaaaagtcaaaatatgactcaagtgtgagtggtcaatcatcttttgtgacatccccagcagcagacaacatagaaatgcttcctcattatgagccaattccattcagttcttctatgaatgaatctgctcccactggtattactgatcatattgtccaaggacctgatcccaaccttgaagaaagtcctaaaagaaaaaatattacatatgaggaattaaggaataagaacagagagtcatatgaagtatctttaacacaaaagactgacccctcagtcaggcctatgcatgaaagagtgccaaaaaaagaagtcaaagtaaacaagtatggagatacttgggatgagtgaaaaattacatcattggacatgaaggagtttcaacatccagcttcatctaggtggtcatgattacctgcatgctttgagctcagcagcagtcttcataaacacatttaaaacaagatcctgggtttttgtggtttgacttctatggtgttttaaaaaaacacagatttttagtgttaatattgtgtaaatgtactcaccttagggattcatttgaatgatggtattataccatgattgtatacagtttgtgaaattgttgcaagggcaaagataactcttaaaaaaccgtcgagattacaatgctctagaatcagcatataagaaaataaatgatatctgcatgttgaattggggtggatggggggagcaagcataatttttaagtgtgaagctttgcatcaagaaattattaaaaagctttttttctccagta

SEQ ID NO: 422018 - DNA, 1525 bp, Homo sapiens
gatcatgaggacactcaaccagcactaaggagatgaactgaggcctctgctagcaatcatgtcagtaagctgccttggaagtggatactgcagccccaagagagccttcagatgactgtaaccccagcctacctcttaatcacagcctggtgagaaaaaccgtagcctcagagagatcacggtaccctgccagaggttgtagaacttgttggaaacttggatcaagagggtgtgacaaataaccaggaaagatgaatgggagggctgattttcgagagccgaatgcagaggttccaagaccaattccccacatagggcctgattacattccaacagaggaagaaaggagagtcttcgcagaatgcaatgatgaaagcttctggttcagatctgtgcctttggctgcaacaagtatgttgattactcaaggattaattagtaaaggaatactttcaagtcatcccaaatatggttccatccctaaacttatacttgcttgtatcatgggatactttgctggaaaactttcttatgtgaaaacttgccaagagaaattcaagaaacttgaaaattccccccttggagaagctttacgatcaggacaagcacgacgatcttcaccacctgggcactattatcaaaagtcaaaatatgactcaagtgtgagtggtcaatcatcttttgtgacatccccagcagcagacaacatagaaatgcttcctcattatgagccaattccattcagttcttctatgaatgaatctgctcccactggtattactgatcatattgtccaaggacctgatcccaaccttgaagaaagtcctaaaagaaaaaatattacatatgaggaattaaggaataagaacagagagtcatatgaagtatctttaacacaaaagactgacccctcagtcaggcctatgcatgaaagagtgccaaaaaaagaagtcaaagtaaacaagtatggagatacttgggatgagtgaaaaattacatcattggacatgaaggagtttcaacatccagcttcatctaggtggtcatgattacctgcatgctttgagctcagcagcagtcttcataaacacatttaaaacaagatcctgggtttttgtggtttgacttctatggtgttttaaaaaaacacagatttttagtgttaatattgtgtaaatgtactcaccttagggattcatttgaatgatggtattataccatgattgtatacagtttgtgaaattgttgcaagggcaaagataactcttaaaaaaccgtcgagattacaatgctctagaatcagcatataagaaaataaatgatatctgcatgttgaattggggtggatggggggagcaagcataatttttaagtgtgaagctttgcatcaagaaattattaaaaagctttttttctccagtattttctgtattatcttaatgtttatggcaaataaaatgtaaaggaacatgaatgcgatgcgcccaagcccctctttcccctcacccacaatcctcgaccctaa

SEQ ID NO: 422019 - DNA, 1366 bp, Homo sapiens
gatcatgaggacactcaaccagcactaaggagatgaactgaggcctctgctagcaatcatgtcagtaagctgccttggaagtggatactgcagccccaagagagccttcagatgactgtaaccccagcctacctcttaatcacagcctggtgagaaaaaccgtagcctcagagagatcacggtaccctgccagaggttgtagaacttgttggaaacttggatcaagagggtgtgacaaataaccaggaaagatgaatgggagggctgattttcgagagccgaatgcagaggttccaagaccaattccccacatagggcctgattacattccaacagaggaagaaaggagagtcttcgcagaatgcaatgatgaaagcttctggttcagatctgtgcctttggctgcaacaagtatgttgattactcaaggattaattagtaaaggaatactttcaagtcatcccaaatatggttccatccctaaacttatacttgcttgtatcatgggatactttgctggaaaactttcttatgtgaaaacttgccaagagaaattcaagaaacttgaaaattccccccttggagaagctttacgatcaggacaagcacgacgatcttcaccacctgggcactattatcaaaagtcaaaatatgactcaagtgtgagtggtcaatcatcttttgtgacatccccagcagcagacaacatagaaatgcttcctcattatgagccaattccattcagttcttctatgaatgaatctgctcccactggtattactgatcatattgtccaaggtagaaacttctcttgaaatgaatttcaacattttatggtccaactcaaagtaaacaagtatggagatacttgggatgagtgaaaaattacatcattggacatgaaggagtttcaacatccagcttcatctaggtggtcatgattacctgcatgctttgagctcagcagcagtcttcataaacacatttaaaacaagatcctgggtttttgtggtttgacttctatggtgttttaaaaaaacacagatttttagtgttaatattgtgtaaatgtactcaccttagggattcatttgaatgatggtattataccatgattgtatacagtttgtgaaattgttgcaagggcaaagataactcttaaaaaaccgtcgagattacaatgctctagaatcagcatataagaaaataaatgatatctgcatgttgaattggggtggatggggggagcaagcataatttttaagtgtgaagctttgcatcaagaaattattaaaaagctttttttctccagtattttctgtattatcttaatgtttatggcaaataaaatgtaaaggaacatgaa

SEQ ID NO: 422020 - DNA, 1267 bp, Homo sapiens
gatcatgaggacactcaaccagcactaaggagatgaactgaggcctctgctagcaatcatgtcagtaagctgccttggaagtggatactgcagccccaagagagccttcagatgactgtaaccccagcctacctcttaatcacagcctggtgagaaaaaccgtagcctcagagagatcacggtaccctgccagaggttgtagaacttgttggaaacttggatcaagagggtgtgacaaataaccaggaaagatgaatgggagggctgattttcgagagccgaatgcagaggttccaagaccaattccccacatagggcctgattacattccaacagaggaagaaaggagagtcttcgcagaatgcaatgatgaaagcttctggttcagatctgtgcctttggctgcaacaagtatgttgattactcaaggattaattagtaaaggaatactttcaagtcatcccaaatatggttccatccctaaacttatacttgcttgtatcatgggatactttgctggaaaactttcttatgtgaaaacttgccaagagaaattcaagaaacttgaaaattccccccttggagaagctttacgatcaggacaagcacgacgatcttcaccacctgggcactattatcaaaagtcaaaatatgactcaagtgtgagtggtcaatcatcttttgtgacatccccagcagcagacaacatagaaatgcttcctcattatgagccaattccattcagttcttctatgaatgaatctgctcccactggtattactgatcatattgtccaagtcaaagtaaacaagtatggagatacttgggatgagtggtcatgattacctgcatgctttgagctcagcagcagtcttcataaacacatttaaaacaagatcctgggtttttgtggtttgacttctatggtgttttaaaaaaacacagatttttagtgttaatattgtgtaaatgtactcaccttagggattcatttgaatgatggtattataccatgattgtatacagtttgtgaaattgttgcaagggcaaagataactcttaaaaaaccgtcgagattacaatgctctagaatcagcatataagaaaataaatgatatctgcatgttgaattggggtggatggggggagcaagcataatttttaagtgtgaagctttgcatcaagaaattattaaaaagctttttttctccagtattttctgtattatcttaatgtttatggcaaataaaatgtaaaggaacatgaa

SEQ ID NO: 422021 - DNA, 1231 bp, Homo sapiens
tgcctccgggtcgcggtcattttgagcccctgtctggatgacttcttgcggctgttctacccctccccctccccgcggtaccttgcacttttctccctccctgccccctctcgagtccaccctccgggccttctgcccctgatcgcttggttttccttgcagtcgcctgctgctgtcgtcgggaggtgggtgaggtgacgcaaacagccccgttgttgccctccgcgtatcccctcaccacctttgcggccatccacgactttcgcaccttccgccattttcctgcctgtgagggtggacagatcgcgctcgggtctcggcctcctgagtgccggtgactgcgggaggcgacggagtgcttctgggggtgtgagctggggaagttcgtggtcacggatgcgtgtggggttgctgctcagtctgtaacggcaggaaagatgaatgggagggctgattttcgagagccgaatgcagaggttccaagaccaattccccacatagggcctgattacattccaacagaggaagaaaggagagtcttcgcagaatgcaatgatgaaagcttctggttcagatctgtgcctttggctgcaacaagtatgttgattactcaaggattaattagtaaaggaatactttcaagtcatcccaaatatggttccatccctaaacttatacttgcttgtatcatgggatactttgctggaaaactttcttatgtgaaaacttgccaagagaaattcaagaaacttgaaaattccccccttggagaagctttacgatcaggacaagcacgacgatcttcaccacctgggcactattatcaaaagtcaaaatatgactcaagtgtgagtggtcaatcatcttttgtgacatccccagcagcagacaacatagaaatgcttcctcattatgagccaattccattcagttcttctatgaatgaatctgctcccactggtattactgatcatattgtccaaggacctgatcccaaccttgaagaaagtcctaaaagaaaaaatattacatatgaggaattaaggaataagaacagagagtcatatgaagtatctttaacacaaaagactgacccctcagcaagccaggtggaaagaggcccaaaaagcaggcaacgtggggaaacgggggacggaaacacacgggcgaaagagtaaacgacgccagaggcgaaaagaagtccacgacgccttatcgcgtgggggacccg

SEQ ID NO: 422022 - DNA, 1158 bp, Homo sapiens
gatcatgaggacactcaaccagcactaaggagatgaactgaggcctctgctagcaatcatgtcagtaagctgccttggaagtggatactgcagccccaagagagccttcagatgactgtaaccccagcctacctcttaatcacagcctggtgagaaaaaccgtagcctcagagagatcacggtaccctgccagaggttgtagaacttgttggaaacttggatcaagagggtgtgacaaataaccaggaaagatgaatgggagggctgattttcgagagccgaatgcagaggttccaagaccaattccccacatagggcctgattacattccaacagaggaagaaaggagagtcttcgcagaatgcaatgatgaaagcttctggttcagatctgtgcctttggctgcaacaagtatgttgattactcaaggattaattagtaaaggaatactttcaagtcatcccaaatatggttccatccctaaacttatacttgcttgtatcatgggatactttgctggaaaactttcttatgtgaaaacttgccaagagaaattcaagaaacttgaaaattccccccttggagaagctttacgatcaggacaagcacgacgatcttcaccacctgggcactattatcaaaagtcaaaatatgactcaagtgtgagtggtcaatcatcttttgtgacatccccagcagcagacaacatagaaatgcttcctcattatgagccaattccattcagttcttctatgaatgaatctgctcccactggtattactgatcatattgtccaaggtagaaacttctcttgaaatgaatttcaacattttatggtccaacgtatgtataaactttatttgatgaccttttctgctggatatcacctgtgtgttctaccatcaatcatcaacctaaactcagcatgtttgttcatttgtttcttcattcattcaacttttcttgaggaccagtaggtgtcaaggactctgctagacgtggaagaagatgaataacacttggttcttgtccctgaaaaactttcagtctgtaaaatgtagtagtattttcttcttatagtagtatttacagcccatagggggtggtcggacccagctcactggccgcgtctgccatgtactgagccagcagctcccc

SEQ ID NO: 422023 - DNA, 895 bp, Homo sapiens
tgggcgggggaggaggggcgcgcggcggccgaggaggggcgcgcggcggccgggcggggcgagcggaggcgagtggaggacgcgtagacgcgccgcggtccccgcctgccgctgctccgccgcagtcgccgctccagtctatccggcactaggaacagccccgagcggcgagacggtccccgccatgtctgcggccatgagggagaggttcgaccggttcctgcacgagaagaactgcatgactgaccttctggccaagctcgaggccaaaaccggcgtgaacaggagcttcatcgctcttggtgtcatcggactggtggccttgtacctggtgttcggttatggagcctctctcctctgcaacctgataggatttggctacccagcctacatctcaattaaagctatagagagtcccaacaaagaagatgatacccagtggctgacctactgggtagtgtatggtgtgttcagcattgctgaattcttctctgatatcttcctgtcatggttccccttctactacatgctgaagtgtggcttcctgttgtggtgcatggccccgagcccttctaatggggctgaactgctctacaagcgcatcatccgtcctttcttcctgaagcacgagtcccagatggacagtgtggtcaaggaccttaaagacaaggccaaagagactgcagatgccatcactaaagaagcgaagaaagctaccgtgaatttactgggtgaagaaaagaagagcacctaaaccagactggatggaaacttcctgccctctctgtaccttcctactggagcttgatgttatattagggactgtggtataattattttaataatgttgccttggaaacatttttgagatattaaagattggaatgtgttgtaa

SEQ ID NO: 422024 - DNA, 417 bp, Homo sapiens
acgatataaactcagcgcgacccgacacacgccacgcggctgtaaagaaaaccaactttaccgaagaaagctaccgtgaatttactgggtgaagaaaagaagagcacctaaaccagactggatggaaacttcctgccctctctgtaccttcctactggagcttgatgttatattagggactgtggtataattattttaataatgttgccttggaaacatttttgagatattaaagattggaatgtgttgtaagtttctttgcttacttttactgtctatatatatagggagcactttaaacttaatgcagtgggcagtgtccacgtttttggaaaatgtattttgcctctgggtaggaaaagatgtatgttgctatcctgcaggaaatataaacttaaaataaaattatatacccca

SEQ ID NO: 422025 - DNA, 3160 bp, Homo sapiens
  misc_feature (1432)..(1432): n is a, c, g, or t
tgggcgggggaggaggggcgcgcggcggccgaggaggggcgcgcggcggccgggcggggcgagcggaggcgagtggaggacgcgtagacgcgccgcggtccccgcctgccgctgctccgccgcagtcgccgctccagtctatccggcactaggaacagccccgagcggcgagacggtccccgccatgtctgcggccatgagggagaggttcgaccggttcctgcacgagaagaactgcatgactgaccttctggccaagctcgaggccaaaaccggcgtgaacaggagcttcatcgctcttggtgtcatcggactggtggccttgtacctggtgttcggttatggagcctctctcctctgcaacctgataggatttggctacccagcctacatctcaattaaagctatagagagtcccaacaaagaagatgatacccagtggctgacctactgggtagtgtatggtgtgttcagcattgctgaattcttctctgatatcttcctgtcatggttccccttctactacatgctgaagtgtggcttcctgttgtggtgcatggccccgagcccttctaatggggctgaactgctctacaagcgcatcatccgtcctttcttcctgaagcacgagtcccagatggacagtgtggtcaaggaccttaaagacaaggccaaagagactgcagatgccatcactaaagaagcgaagaaagctaccgtgaatttactgggtgaagaaaagaagagcacctaaaccagactggatggaaacttcctgccctctctgtaccttcctactggagcttgatgttatattagggactgtggtataattattttaataatgttgccttggaaacatttttgagatattaaagattggaatgtgttgtaagtttctttgcttacttttactgtctatatatatagggagcactttaaacttaatgcagtgggcagtgtccacgtttttggaaaatgtattttgcctctgggtaggaaaagatgtatgttgctatcctgcaggaaatataaacttaaaataaaattatataccccacaggctgtgtactttactgggctctccctgcacgcattttctctgtagttacatttaggataatctttatggttctacttcctgtaatgtacaattttatataattctgaaatgtttttaatgtatttgtgcacatgtacatatggaaatgttactgtctgactacaacatgcatcatgctcatggggagggagcaggggaaggttgtatgtgtcatttataacttctgtacagtaagaccacctgccaaaagctggaggaaccattgtgctggtgtggtctactaaataatactttaggaaatacgtgattaatatgcaagtgaacaaagtgagaaatgaaatcgaatggagattggcctggttgtttccntagtatatggcatatgaataccaggatagctttataaagcagttagttagttagttactcactctagtgataaatcgggaaatttacacacacacacacacacacacacacacacacacacagagtaacctgtaactctcaattccctgaaaaactagtaatactgtcttatctgctataaactttacatatttgtctattgtcaagatgctacaatggaaaccatttctggttttatcttcaaagcggagaaacatgttgatttagtcttctttcccaatcttcttttttaaaccagtttaaggaacttctgaagatttgtccacctctgattacatgtatgttcttgtttgtatcattagcaacaacatgctaatgacgacacctagctctaagagcaattctgggagaatgaaaggaagtataaagtaacccataatctgcttggcaatagttaagtcaatctatcttcagtttttctctggcctttaaggtcaaacacaagaggcttccctagtttacaagtcagagtcacttgtagtccatttaaatgccctcatccgtattctttgtgttgataagctgcacatgactacatagtaagtacagaacagtaaagttaaaacggatgtctccattgatctgccaaatcgttatagagagcaatttgtctggactagaaaatctgagttttacaccatactgttaagagtccttttgaattaaactagactaaaacaagtgtataactaaactaacaagattaaatatccagccagtacagtattttttaaggcaaataaagatgattagctcaccttgagataacaatcaggtaagatcataacaatgtctcatgatgtaaaaaatattaaagatatcaatactaagtgacagtatcactctaatataatatggatcagagcatttattttggggaggaaaacagtggtgattaccggcattttattaaacttaaaactttgtagaaagcaaacaaaattgttcttgggagaaaatcaacttttagattaaaaaaattttaagtatctaggagtatttaaatccttttcccataaataaaagtacagttttcttggtggcagaatgaaaatcagcaacttctagcatatagactatataatcagattgacagcatatagaatatattatcagacaagatgaggaggtataaaagttactattgctcataatgacttacaggctaaaattagttttaaaatactatattaaattctgaatgcaatttttttttgttcccttgagaccaaaatttaagttaactgttgctggcagtctaagtgtaaatgttaacagcaggagaagttaagaattgagcagttctgttgcatgatttcccaaatgaaatactgccttggctagagtttgaaaaactaattgagcctgtgcctggctagaaaacaagcgtttatttgaatgtgaatagtgtttcaaaggtatgtagttacagaattcctaccaaacagcttaaattcttcaagaaagaattcctgcagcagttattcccttacctgaaggcttcaatcatttggatcaacaactgctactctcgggaagactcctctactcacagctgaagaaaatgagcacacccttcacactgttattacctatcctgaagatgtgatacactgaatggaaataaatagatgtaaataaaattgagttctcatttaaaaaaaaaat

SEQ ID NO: 422026 - DNA, 3040 bp, Homo sapiens
  misc_feature (1312)..(1312): n is a, c, g, or t
cggtacccacgttgacacttcaggggcactaggaacagccccgagcggcgagacggtccccgccatgtctgcggccatgagggagaggttcgaccggttcctgcacgagaagaactgcatgactgaccttctggccaagctcgaggccaaaaccggcgtgaacaggagcttcatcgctcttggtgtcatcggactggtggccttgtacctggtgttcggttatggagcctctctcctctgcaacctgataggatttggctacccagcctacatctcaattaaagctatagagagtcccaacaaagaagatgatacccagtggctgacctactgggtagtgtatggtgtgttcagcattgctgaattcttctctgatatcttcctgtcatggttccccttctactacatgctgaagtgtggcttcctgttgtggtgcatggccccgagcccttctaatggggctgaactgctctacaagcgcatcatccgtcctttcttcctgaagcacgagtcccagatggacagtgtggtcaaggaccttaaagacaaggccaaagagactgcagatgccatcactaaagaagcgaagaaagctaccgtgaatttactgggtgaagaaaagaagagcacctaaaccagactggatggaaacttcctgccctctctgtaccttcctactggagcttgatgttatattagggactgtggtataattattttaataatgttgccttggaaacatttttgagatattaaagattggaatgtgttgtaagtttctttgcttacttttactgtctatatatatagggagcactttaaacttaatgcagtgggcagtgtccacgtttttggaaaatgtattttgcctctgggtaggaaaagatgtatgttgctatcctgcaggaaatataaacttaaaataaaattatataccccacaggctgtgtactttactgggctctccctgcacgcattttctctgtagttacatttaggataatctttatggttctacttcctgtaatgtacaattttatataattctgaaatgtttttaatgtatttgtgcacatgtacatatggaaatgttactgtctgactacaacatgcatcatgctcatggggagggagcaggggaaggttgtatgtgtcatttataacttctgtacagtaagaccacctgccaaaagctggaggaaccattgtgctggtgtggtctactaaataatactttaggaaatacgtgattaatatgcaagtgaacaaagtgagaaatgaaatcgaatggagattggcctggttgtttccntagtatatggcatatgaataccaggatagctttataaagcagttagttagttagttactcactctagtgataaatcgggaaatttacacacacacacacacacacacacacacacacacacagagtaacctgtaactctcaattccctgaaaaactagtaatactgtcttatctgctataaactttacatatttgtctattgtcaagatgctacaatggaaaccatttctggttttatcttcaaagcggagaaacatgttgatttagtcttctttcccaatcttcttttttaaaccagtttaaggaacttctgaagatttgtccacctctgattacatgtatgttcttgtttgtatcattagcaacaacatgctaatgacgacacctagctctaagagcaattctgggagaatgaaaggaagtataaagtaacccataatctgcttggcaatagttaagtcaatctatcttcagtttttctctggcctttaaggtcaaacacaagaggcttccctagtttacaagtcagagtcacttgtagtccatttaaatgccctcatccgtattctttgtgttgataagctgcacatgactacatagtaagtacagaacagtaaagttaaaacggatgtctccattgatctgccaaatcgttatagagagcaatttgtctggactagaaaatctgagttttacaccatactgttaagagtccttttgaattaaactagactaaaacaagtgtataactaaactaacaagattaaatatccagccagtacagtattttttaaggcaaataaagatgattagctcaccttgagataacaatcaggtaagatcataacaatgtctcatgatgtaaaaaatattaaagatatcaatactaagtgacagtatcactctaatataatatggatcagagcatttattttggggaggaaaacagtggtgattaccggcattttattaaacttaaaactttgtagaaagcaaacaaaattgttcttgggagaaaatcaacttttagattaaaaaaattttaagtatctaggagtatttaaatccttttcccataaataaaagtacagttttcttggtggcagaatgaaaatcagcaacttctagcatatagactatataatcagattgacagcatatagaatatattatcagacaagatgaggaggtataaaagttactattgctcataatgacttacaggctaaaattagttttaaaatactatattaaattctgaatgcaatttttttttgttcccttgagaccaaaatttaagttaactgttgctggcagtctaagtgtaaatgttaacagcaggagaagttaagaattgagcagttctgttgcatgatttcccaaatgaaatactgccttggctagagtttgaaaaactaattgagcctgtgcctggctagaaaacaagcgtttatttgaatgtgaatagtgtttcaaaggtatgtagttacagaattcctaccaaacagcttaaattcttcaagaaagaattcctgcagcagttattcccttacctgaaggcttcaatcatttggatcaacaactgctactctcgggaagactcctctactcacagctgaagaaaatgagcacacccttcacactgttattacctatcctgaagatgtgatacactgaatggaaataaatagatgtaaataaaattgagttctcatttaaaaaaaaaat

SEQ ID NO: 422027 - DNA, 2847 bp, Homo sapiens
  misc_feature (1432)..(1432): n is a, c, g, or t
tgggcgggggaggaggggcgcgcggcggccgaggaggggcgcgcggcggccgggcggggcgagcggaggcgagtggaggacgcgtagacgcgccgcggtccccgcctgccgctgctccgccgcagtcgccgctccagtctatccggcactaggaacagccccgagcggcgagacggtccccgccatgtctgcggccatgagggagaggttcgaccggttcctgcacgagaagaactgcatgactgaccttctggccaagctcgaggccaaaaccggcgtgaacaggagcttcatcgctcttggtgtcatcggactggtggccttgtacctggtgttcggttatggagcctctctcctctgcaacctgataggatttggctacccagcctacatctcaattaaagctatagagagtcccaacaaagaagatgatacccagtggctgacctactgggtagtgtatggtgtgttcagcattgctgaattcttctctgatatcttcctgtcatggttccccttctactacatgctgaagtgtggcttcctgttgtggtgcatggccccgagcccttctaatggggctgaactgctctacaagcgcatcatccgtcctttcttcctgaagcacgagtcccagatggacagtgtggtcaaggaccttaaagacaaggccaaagagactgcagatgccatcactaaagaagcgaagaaagctaccgtgaatttactgggtgaagaaaagaagagcacctaaaccagactggatggaaacttcctgccctctctgtaccttcctactggagcttgatgttatattagggactgtggtataattattttaataatgttgccttggaaacatttttgagatattaaagattggaatgtgttgtaagtttctttgcttacttttactgtctatatatatagggagcactttaaacttaatgcagtgggcagtgtccacgtttttggaaaatgtattttgcctctgggtaggaaaagatgtatgttgctatcctgcaggaaatataaacttaaaataaaattatataccccacaggctgtgtactttactgggctctccctgcacgcattttctctgtagttacatttaggataatctttatggttctacttcctgtaatgtacaattttatataattctgaaatgtttttaatgtatttgtgcacatgtacatatggaaatgttactgtctgactacaacatgcatcatgctcatggggagggagcaggggaaggttgtatgtgtcatttataacttctgtacagtaagaccacctgccaaaagctggaggaaccattgtgctggtgtggtctactaaataatactttaggaaatacgtgattaatatgcaagtgaacaaagtgagaaatgaaatcgaatggagattggcctggttgtttccntagtatatggcatatgaataccaggatagctttataaagcagttagttagttagttactcactctagtgataaatcgggaaatttacacacacacacacacacacacacacacacacacacagagtaacctgtaactctcaattccctgaaaaactagtaatactgtcttatctgctataaactttacatatttgtctattgtcaagatgctacaatggaaaccatttctggttttatcttcaaagcggagaaacatgttgatttagtcttctttcccaatcttcttttttaaaccagtttaaggaacttctgaagatttgtccacctctgattacatgtatgttcttgtttgtatcattagcaacaacatgctaatgacgacacctagctctaagagcaattctgggagaatgaaaggaagtataaagtaacccataatctgcttggcaatagttaagtcaatctatcttcagtttttctctggcctttaaggtcaaacacaagaggcttccctagtttacaagtcagagtcacttgtagtccatttaaatgccctcatccgtattctttgtgtaagtgacagtatcactctaatataatatggatcagagcatttattttggggaggaaaacagtggtgattaccggcattttattaaacttaaaactttgtagaaagcaaacaaaattgttcttgggagaaaatcaacttttagattaaaaaaattttaagtatctaggagtatttaaatccttttcccataaataaaagtacagttttcttggtggcagaatgaaaatcagcaacttctagcatatagactatataatcagattgacagcatatagaatatattatcagacaagatgaggaggtataaaagttactattgctcataatgacttacaggctaaaattagttttaaaatactatattaaattctgaatgcaatttttttttgttcccttgagaccaaaatttaagttaactgttgctggcagtctaagtgtaaatgttaacagcaggagaagttaagaattgagcagttctgttgcatgatttcccaaatgaaatactgccttggctagagtttgaaaaactaattgagcctgtgcctggctagaaaacaagcgtttatttgaatgtgaatagtgtttcaaaggtatgtagttacagaattcctaccaaacagcttaaattcttcaagaaagaattcctgcagcagttattcccttacctgaaggcttcaatcatttggatcaacaactgctactctcgggaagactcctctactcacagctgaagaaaatgagcacacccttcacactgttattacctatcctgaagatgtgatacactgaatggaaataaatagatgtaaataaaattgagttctcatttaaaaaaaaaat

SEQ ID NO: 422028 - DNA, 3003 bp, Homo sapiens
  misc_feature (1275)..(1275): n is a, c, g, or t
cggtacccacgttgacacttcaggggcactaggaacagccccgagcggcgagacggtccccgccatgtctgcggccatgagggagaggttcgaccggttcctgcacgagaagaactgcatgactgaccttctggccaagctcgaggtgtcatcggactggtggccttgtacctggtgttcggttatggagcctctctcctctgcaacctgataggatttggctacccagcctacatctcaattaaagctatagagagtcccaacaaagaagatgatacccagtggctgacctactgggtagtgtatggtgtgttcagcattgctgaattcttctctgatatcttcctgtcatggttccccttctactacatgctgaagtgtggcttcctgttgtggtgcatggccccgagcccttctaatggggctgaactgctctacaagcgcatcatccgtcctttcttcctgaagcacgagtcccagatggacagtgtggtcaaggaccttaaagacaaggccaaagagactgcagatgccatcactaaagaagcgaagaaagctaccgtgaatttactgggtgaagaaaagaagagcacctaaaccagactggatggaaacttcctgccctctctgtaccttcctactggagcttgatgttatattagggactgtggtataattattttaataatgttgccttggaaacatttttgagatattaaagattggaatgtgttgtaagtttctttgcttacttttactgtctatatatatagggagcactttaaacttaatgcagtgggcagtgtccacgtttttggaaaatgtattttgcctctgggtaggaaaagatgtatgttgctatcctgcaggaaatataaacttaaaataaaattatataccccacaggctgtgtactttactgggctctccctgcacgcattttctctgtagttacatttaggataatctttatggttctacttcctgtaatgtacaattttatataattctgaaatgtttttaatgtatttgtgcacatgtacatatggaaatgttactgtctgactacaacatgcatcatgctcatggggagggagcaggggaaggttgtatgtgtcatttataacttctgtacagtaagaccacctgccaaaagctggaggaaccattgtgctggtgtggtctactaaataatactttaggaaatacgtgattaatatgcaagtgaacaaagtgagaaatgaaatcgaatggagattggcctggttgtttccntagtatatggcatatgaataccaggatagctttataaagcagttagttagttagttactcactctagtgataaatcgggaaatttacacacacacacacacacacacacacacacacacacagagtaacctgtaactctcaattccctgaaaaactagtaatactgtcttatctgctataaactttacatatttgtctattgtcaagatgctacaatggaaaccatttctggttttatcttcaaagcggagaaacatgttgatttagtcttctttcccaatcttcttttttaaaccagtttaaggaacttctgaagatttgtccacctctgattacatgtatgttcttgtttgtatcattagcaacaacatgctaatgacgacacctagctctaagagcaattctgggagaatgaaaggaagtataaagtaacccataatctgcttggcaatagttaagtcaatctatcttcagtttttctctggcctttaaggtcaaacacaagaggcttccctagtttacaagtcagagtcacttgtagtccatttaaatgccctcatccgtattctttgtgttgataagctgcacatgactacatagtaagtacagaacagtaaagttaaaacggatgtctccattgatctgccaaatcgttatagagagcaatttgtctggactagaaaatctgagttttacaccatactgttaagagtccttttgaattaaactagactaaaacaagtgtataactaaactaacaagattaaatatccagccagtacagtattttttaaggcaaataaagatgattagctcaccttgagataacaatcaggtaagatcataacaatgtctcatgatgtaaaaaatattaaagatatcaatactaagtgacagtatcactctaatataatatggatcagagcatttattttggggaggaaaacagtggtgattaccggcattttattaaacttaaaactttgtagaaagcaaacaaaattgttcttgggagaaaatcaacttttagattaaaaaaattttaagtatctaggagtatttaaatccttttcccataaataaaagtacagttttcttggtggcagaatgaaaatcagcaacttctagcatatagactatataatcagattgacagcatatagaatatattatcagacaagatgaggaggtataaaagttactattgctcataatgacttacaggctaaaattagttttaaaatactatattaaattctgaatgcaatttttttttgttcccttgagaccaaaatttaagttaactgttgctggcagtctaagtgtaaatgttaacagcaggagaagttaagaattgagcagttctgttgcatgatttcccaaatgaaatactgccttggctagagtttgaaaaactaattgagcctgtgcctggctagaaaacaagcgtttatttgaatgtgaatagtgtttcaaaggtatgtagttacagaattcctaccaaacagcttaaattcttcaagaaagaattcctgcagcagttattcccttacctgaaggcttcaatcatttggatcaacaactgctactctcgggaagactcctctactcacagctgaagaaaatgagcacacccttcacactgttattacctatcctgaagatgtgatacactgaatggaaataaatagatgtaaataaaattgagttctcatttaaaaaaaaaat

SEQ ID NO: 422029 - DNA, 3136 bp, Homo sapiens
  misc_feature (1408)..(1408): n is a, c, g, or t
gggagaggactcgggaaaggtggagtcggagacagacgggacaagcagcatattcagggatcaggctggcctcccggaaagcgtgggcatcggaggaccccgcgggggctgcccaggctgagggtcgcggggctggagggcagctgcggcgccgggcgctggcagctggaagggccagcgctgacgtatgtctgccccgcggcccggcgccctattcctgctgtcctgcgcggtgggcgcggacggcggggcccctgcgggcgggcgcgttgacggaggtgtcatcggactggtggccttgtacctggtgttcggttatggagcctctctcctctgcaacctgataggatttggctacccagcctacatctcaattaaagctatagagagtcccaacaaagaagatgatacccagtggctgacctactgggtagtgtatggtgtgttcagcattgctgaattcttctctgatatcttcctgtcatggttccccttctactacatgctgaagtgtggcttcctgttgtggtgcatggccccgagcccttctaatggggctgaactgctctacaagcgcatcatccgtcctttcttcctgaagcacgagtcccagatggacagtgtggtcaaggaccttaaagacaaggccaaagagactgcagatgccatcactaaagaagcgaagaaagctaccgtgaatttactgggtgaagaaaagaagagcacctaaaccagactggatggaaacttcctgccctctctgtaccttcctactggagcttgatgttatattagggactgtggtataattattttaataatgttgccttggaaacatttttgagatattaaagattggaatgtgttgtaagtttctttgcttacttttactgtctatatatatagggagcactttaaacttaatgcagtgggcagtgtccacgtttttggaaaatgtattttgcctctgggtaggaaaagatgtatgttgctatcctgcaggaaatataaacttaaaataaaattatataccccacaggctgtgtactttactgggctctccctgcacgcattttctctgtagttacatttaggataatctttatggttctacttcctgtaatgtacaattttatataattctgaaatgtttttaatgtatttgtgcacatgtacatatggaaatgttactgtctgactacaacatgcatcatgctcatggggagggagcaggggaaggttgtatgtgtcatttataacttctgtacagtaagaccacctgccaaaagctggaggaaccattgtgctggtgtggtctactaaataatactttaggaaatacgtgattaatatgcaagtgaacaaagtgagaaatgaaatcgaatggagattggcctggttgtttccntagtatatggcatatgaataccaggatagctttataaagcagttagttagttagttactcactctagtgataaatcgggaaatttacacacacacacacacacacacacacacacacacacagagtaacctgtaactctcaattccctgaaaaactagtaatactgtcttatctgctataaactttacatatttgtctattgtcaagatgctacaatggaaaccatttctggttttatcttcaaagcggagaaacatgttgatttagtcttctttcccaatcttcttttttaaaccagtttaaggaacttctgaagatttgtccacctctgattacatgtatgttcttgtttgtatcattagcaacaacatgctaatgacgacacctagctctaagagcaattctgggagaatgaaaggaagtataaagtaacccataatctgcttggcaatagttaagtcaatctatcttcagtttttctctggcctttaaggtcaaacacaagaggcttccctagtttacaagtcagagtcacttgtagtccatttaaatgccctcatccgtattctttgtgttgataagctgcacatgactacatagtaagtacagaacagtaaagttaaaacggatgtctccattgatctgccaaatcgttatagagagcaatttgtctggactagaaaatctgagttttacaccatactgttaagagtccttttgaattaaactagactaaaacaagtgtataactaaactaacaagattaaatatccagccagtacagtattttttaaggcaaataaagatgattagctcaccttgagataacaatcaggtaagatcataacaatgtctcatgatgtaaaaaatattaaagatatcaatactaagtgacagtatcactctaatataatatggatcagagcatttattttggggaggaaaacagtggtgattaccggcattttattaaacttaaaactttgtagaaagcaaacaaaattgttcttgggagaaaatcaacttttagattaaaaaaattttaagtatctaggagtatttaaatccttttcccataaataaaagtacagttttcttggtggcagaatgaaaatcagcaacttctagcatatagactatataatcagattgacagcatatagaatatattatcagacaagatgaggaggtataaaagttactattgctcataatgacttacaggctaaaattagttttaaaatactatattaaattctgaatgcaatttttttttgttcccttgagaccaaaatttaagttaactgttgctggcagtctaagtgtaaatgttaacagcaggagaagttaagaattgagcagttctgttgcatgatttcccaaatgaaatactgccttggctagagtttgaaaaactaattgagcctgtgcctggctagaaaacaagcgtttatttgaatgtgaatagtgtttcaaaggtatgtagttacagaattcctaccaaacagcttaaattcttcaagaaagaattcctgcagcagttattcccttacctgaaggcttcaatcatttggatcaacaactgctactctcgggaagactcctctactcacagctgaagaaaatgagcacacccttcacactgttattacctatcctgaagatgtgatacactgaatggaaataaatagatgtaaataaaattgagttctcatttaaaaaaaaaat

SEQ ID NO: 422030 - DNA, 2909 bp, Homo sapiens
  misc_feature (1181)..(1181): n is a, c, g, or t
gtttttaatcttttaatcacaacgatcttccgcgcagcgccaacctcttcggtgtcatcggactggtggccttgtacctggtgttcggttatggagcctctctcctctgcaacctgataggatttggctacccagcctacatctcaattaaagctatagagagtcccaacaaagaagatgatacccagtggctgacctactgggtagtgtatggtgtgttcagcattgctgaattcttctctgatatcttcctgtcatggttccccttctactacatgctgaagtgtggcttcctgttgtggtgcatggccccgagcccttctaatggggctgaactgctctacaagcgcatcatccgtcctttcttcctgaagcacgagtcccagatggacagtgtggtcaaggaccttaaagacaaggccaaagagactgcagatgccatcactaaagaagcgaagaaagctaccgtgaatttactgggtgaagaaaagaagagcacctaaaccagactggatggaaacttcctgccctctctgtaccttcctactggagcttgatgttatattagggactgtggtataattattttaataatgttgccttggaaacatttttgagatattaaagattggaatgtgttgtaagtttctttgcttacttttactgtctatatatatagggagcactttaaacttaatgcagtgggcagtgtccacgtttttggaaaatgtattttgcctctgggtaggaaaagatgtatgttgctatcctgcaggaaatataaacttaaaataaaattatataccccacaggctgtgtactttactgggctctccctgcacgcattttctctgtagttacatttaggataatctttatggttctacttcctgtaatgtacaattttatataattctgaaatgtttttaatgtatttgtgcacatgtacatatggaaatgttactgtctgactacaacatgcatcatgctcatggggagggagcaggggaaggttgtatgtgtcatttataacttctgtacagtaagaccacctgccaaaagctggaggaaccattgtgctggtgtggtctactaaataatactttaggaaatacgtgattaatatgcaagtgaacaaagtgagaaatgaaatcgaatggagattggcctggttgtttccntagtatatggcatatgaataccaggatagctttataaagcagttagttagttagttactcactctagtgataaatcgggaaatttacacacacacacacacacacacacacacacacacacagagtaacctgtaactctcaattccctgaaaaactagtaatactgtcttatctgctataaactttacatatttgtctattgtcaagatgctacaatggaaaccatttctggttttatcttcaaagcggagaaacatgttgatttagtcttctttcccaatcttcttttttaaaccagtttaaggaacttctgaagatttgtccacctctgattacatgtatgttcttgtttgtatcattagcaacaacatgctaatgacgacacctagctctaagagcaattctgggagaatgaaaggaagtataaagtaacccataatctgcttggcaatagttaagtcaatctatcttcagtttttctctggcctttaaggtcaaacacaagaggcttccctagtttacaagtcagagtcacttgtagtccatttaaatgccctcatccgtattctttgtgttgataagctgcacatgactacatagtaagtacagaacagtaaagttaaaacggatgtctccattgatctgccaaatcgttatagagagcaatttgtctggactagaaaatctgagttttacaccatactgttaagagtccttttgaattaaactagactaaaacaagtgtataactaaactaacaagattaaatatccagccagtacagtattttttaaggcaaataaagatgattagctcaccttgagataacaatcaggtaagatcataacaatgtctcatgatgtaaaaaatattaaagatatcaatactaagtgacagtatcactctaatataatatggatcagagcatttattttggggaggaaaacagtggtgattaccggcattttattaaacttaaaactttgtagaaagcaaacaaaattgttcttgggagaaaatcaacttttagattaaaaaaattttaagtatctaggagtatttaaatccttttcccataaataaaagtacagttttcttggtggcagaatgaaaatcagcaacttctagcatatagactatataatcagattgacagcatatagaatatattatcagacaagatgaggaggtataaaagttactattgctcataatgacttacaggctaaaattagttttaaaatactatattaaattctgaatgcaatttttttttgttcccttgagaccaaaatttaagttaactgttgctggcagtctaagtgtaaatgttaacagcaggagaagttaagaattgagcagttctgttgcatgatttcccaaatgaaatactgccttggctagagtttgaaaaactaattgagcctgtgcctggctagaaaacaagcgtttatttgaatgtgaatagtgtttcaaaggtatgtagttacagaattcctaccaaacagcttaaattcttcaagaaagaattcctgcagcagttattcccttacctgaaggcttcaatcatttggatcaacaactgctactctcgggaagactcctctactcacagctgaagaaaatgagcacacccttcacactgttattacctatcctgaagatgtgatacactgaatggaaataaatagatgtaaataaaattgagttctcatttaaaaaaaaaat

SEQ ID NO: 422031 - DNA, 3102 bp, Homo sapiens
  misc_feature (1432)..(1432): n is a, c, g, or t
tgggcgggggaggaggggcgcgcggcggccgaggaggggcgcgcggcggccgggcggggcgagcggaggcgagtggaggacgcgtagacgcgccgcggtccccgcctgccgctgctccgccgcagtcgccgctccagtctatccggcactaggaacagccccgagcggcgagacggtccccgccatgtctgcggccatgagggagaggttcgaccggttcctgcacgagaagaactgcatgactgaccttctggccaagctcgaggccaaaaccggcgtgaacaggagcttcatcgctcttggtgtcatcggactggtggccttgtacctggtgttcggttatggagcctctctcctctgcaacctgataggatttggctacccagcctacatctcaattaaagctatagagagtcccaacaaagaagatgatacccagtggctgacctactgggtagtgtatggtgtgttcagcattgctgaattcttctctgatatcttcctgtcatggttccccttctactacatgctgaagtgtggcttcctgttgtggtgcatggccccgagcccttctaatggggctgaactgctctacaagcgcatcatccgtcctttcttcctgaagcacgagtcccagatggacagtgtggtcaaggaccttaaagacaaggccaaagagactgcagatgccatcactaaagaagcgaagaaagctaccgtgaatttactgggtgaagaaaagaagagcacctaaaccagactggatggaaacttcctgccctctctgtaccttcctactggagcttgatgttatattagggactgtggtataattattttaataatgttgccttggaaacatttttgagatattaaagattggaatgtgttgtaagtttctttgcttacttttactgtctatatatatagggagcactttaaacttaatgcagtgggcagtgtccacgtttttggaaaatgtattttgcctctgggtaggaaaagatgtatgttgctatcctgcaggaaatataaacttaaaataaaattatataccccacaggctgtgtactttactgggctctccctgcacgcattttctctgtagttacatttaggataatctttatggttctacttcctgtaatgtacaattttatataattctgaaatgtttttaatgtatttgtgcacatgtacatatggaaatgttactgtctgactacaacatgcatcatgctcatggggagggagcaggggaaggttgtatgtgtcatttataacttctgtacagtaagaccacctgccaaaagctggaggaaccattgtgctggtgtggtctactaaataatactttaggaaatacgtgattaatatgcaagtgaacaaagtgagaaatgaaatcgaatggagattggcctggttgtttccntagtatatggcatatgaataccaggatagctttataaagcagttagttagttagttactcactctagtgataaatcgggaaatttacacacacacacacacacacacacacacacacacacagagtaacctgtaactctcaattccctgaaaaactagtaatactgtcttatctgctataaactttacatatttgtctattgtcaagatgctacaatggaaaccatttctggttttatcttcaaagcggagaaacatgttgatttagtcttctttcccaatcttcttttttaaaccagtttaaggaacttctgaagatttgtccacctctgattacatgtatgttcttgtttgtatcattagcaacaacatgctaatgacgacacctagctctaagagcaattctgggagaatgaaaggaagtataaagtaacccataatctgcttggcaatagttaagtcaatctatcttcagtttttctctggcctttaaggtcaaacacaagaggcttccctagtttacaagtcagagtcacttgtagtccatttaaatgccctcatccgtattctttgtgttgataagctgcacatgactacatagtaagtacagaacagtaaagttaaaacggatgtctccattgatctgccaaatcgttatagagagcaatttgtctggactagaaaatctgagttttacaccatactgttaagagtccttttgaattaaactagactaaaacaagtgtataactaaactaacaagattaaatatccagccagtacagtattttttaaggcaaataaagatgattagctcaccttgagataacaatcaggtaagatcataacaatgtctcatgatgtaaaaaatattaaagatatcaatactaagtgacagtatcactctaatataatatggatcagagcatttattttggggaggaaaacagtggtgattaccggcattttattaaacttaaaactttgtagaaagcaaacaaaattgttcttgggagaaaatcaacttttagattaaaaaaattttaagtatctaggagtatttaaatccttttcccataaataaaagtacagttttcttggtggcagaatgaaaatcagcaacttctagcatatagactatataatcagattgacagcatatagaatatattatcagacaagatgaggaggtataaaagttactattgctcataatgacttacaggctaaaattagttttaaaatactatattaaattctgaatgcaatttttttttgttcccttgagaccaaaatttaagttaactgttgctggcagtctaagtgtaaatgttaacagcaggagaagttaagaattgagcagttctgttgcatgatttcccaaatgaaatactgccttggctagagtttgaaaaactaattgagcctgtgcctggctagaaaacaagcgtttatttgaatgtgaatagtgtttcaaaggtatgtagttacagaattcctaccaaacagcttaaattcttcaagaaagaattcctgcagcagttattcccttacctgaaggcttcaatcattcggttcttcaccggggaatcccccctagggttcaaaccccaatcccccattttcttcgctatccctcaacccggacatcattacggggttttcttttta

SEQ ID NO: 422032 - DNA, 2585 bp, Homo sapiens
  misc_feature (857)..(857): n is a, c, g, or t
accttgtggctgactcctggggtcctttcccccggtacctattgtagataactctatggttggggcactcctttcttgccctattccacagggacacctgaattctcttgtttcctccttacctgttccaaattccatttacttgatcattctcagtatccactgtctaaacgccatctgcttgcatttagaccagcttcctgccctctctgtaccttcctactggagcttgatgttatattagggactgtggtataattattttaataatgttgccttggaaacatttttgagatattaaagattggaatgtgttgtaagtttctttgcttacttttactgtctatatatatagggagcactttaaacttaatgcagtgggcagtgtccacgtttttggaaaatgtattttgcctctgggtaggaaaagatgtatgttgctatcctgcaggaaatataaacttaaaataaaattatataccccacaggctgtgtactttactgggctctccctgcacgcattttctctgtagttacatttaggataatctttatggttctacttcctgtaatgtacaattttatataattctgaaatgtttttaatgtatttgtgcacatgtacatatggaaatgttactgtctgactacaacatgcatcatgctcatggggagggagcaggggaaggttgtatgtgtcatttataacttctgtacagtaagaccacctgccaaaagctggaggaaccattgtgctggtgtggtctactaaataatactttaggaaatacgtgattaatatgcaagtgaacaaagtgagaaatgaaatcgaatggagattggcctggttgtttccntagtatatggcatatgaataccaggatagctttataaagcagttagttagttagttactcactctagtgataaatcgggaaatttacacacacacacacacacacacacacacacacacacagagtaacctgtaactctcaattccctgaaaaactagtaatactgtcttatctgctataaactttacatatttgtctattgtcaagatgctacaatggaaaccatttctggttttatcttcaaagcggagaaacatgttgatttagtcttctttcccaatcttcttttttaaaccagtttaaggaacttctgaagatttgtccacctctgattacatgtatgttcttgtttgtatcattagcaacaacatgctaatgacgacacctagctctaagagcaattctgggagaatgaaaggaagtataaagtaacccataatctgcttggcaatagttaagtcaatctatcttcagtttttctctggcctttaaggtcaaacacaagaggcttccctagtttacaagtcagagtcacttgtagtccatttaaatgccctcatccgtattctttgtgttgataagctgcacatgactacatagtaagtacagaacagtaaagttaaaacggatgtctccattgatctgccaaatcgttatagagagcaatttgtctggactagaaaatctgagttttacaccatactgttaagagtccttttgaattaaactagactaaaacaagtgtataactaaactaacaagattaaatatccagccagtacagtattttttaaggcaaataaagatgattagctcaccttgagataacaatcaggtaagatcataacaatgtctcatgatgtaaaaaatattaaagatatcaatactaagtgacagtatcactctaatataatatggatcagagcatttattttggggaggaaaacagtggtgattaccggcattttattaaacttaaaactttgtagaaagcaaacaaaattgttcttgggagaaaatcaacttttagattaaaaaaattttaagtatctaggagtatttaaatccttttcccataaataaaagtacagttttcttggtggcagaatgaaaatcagcaacttctagcatatagactatataatcagattgacagcatatagaatatattatcagacaagatgaggaggtataaaagttactattgctcataatgacttacaggctaaaattagttttaaaatactatattaaattctgaatgcaatttttttttgttcccttgagaccaaaatttaagttaactgttgctggcagtctaagtgtaaatgttaacagcaggagaagttaagaattgagcagttctgttgcatgatttcccaaatgaaatactgccttggctagagtttgaaaaactaattgagcctgtgcctggctagaaaacaagcgtttatttgaatgtgaatagtgtttcaaaggtatgtagttacagaattcctaccaaacagcttaaattcttcaagaaagaattcctgcagcagttattcccttacctgaaggcttcaatcatttggatcaacaactgctactctcgggaagactcctctactcacagctgaagaaaatgagcacacccttcacactgttattacctatcctgaagatgtgatacactgaatggaaataaatagatgtaaataaaattgagttctcatttaaaaaaaaaat

SEQ ID NO: 422033 - DNA, 3107 bp, Homo sapiens
  misc_feature (1432)..(1432): n is a, c, g, or t
tgggcgggggaggaggggcgcgcggcggccgaggaggggcgcgcggcggccgggcggggcgagcggaggcgagtggaggacgcgtagacgcgccgcggtccccgcctgccgctgctccgccgcagtcgccgctccagtctatccggcactaggaacagccccgagcggcgagacggtccccgccatgtctgcggccatgagggagaggttcgaccggttcctgcacgagaagaactgcatgactgaccttctggccaagctcgaggccaaaaccggcgtgaacaggagcttcatcgctcttggtgtcatcggactggtggccttgtacctggtgttcggttatggagcctctctcctctgcaacctgataggatttggctacccagcctacatctcaattaaagctatagagagtcccaacaaagaagatgatacccagtggctgacctactgggtagtgtatggtgtgttcagcattgctgaattcttctctgatatcttcctgtcatggttccccttctactacatgctgaagtgtggcttcctgttgtggtgcatggccccgagcccttctaatggggctgaactgctctacaagcgcatcatccgtcctttcttcctgaagcacgagtcccagatggacagtgtggtcaaggaccttaaagacaaggccaaagagactgcagatgccatcactaaagaagcgaagaaagctaccgtgaatttactgggtgaagaaaagaagagcacctaaaccagactggatggaaacttcctgccctctctgtaccttcctactggagcttgatgttatattagggactgtggtataattattttaataatgttgccttggaaacatttttgagatattaaagattggaatgtgttgtaagtttctttgcttacttttactgtctatatatatagggagcactttaaacttaatgcagtgggcagtgtccacgtttttggaaaatgtattttgcctctgggtaggaaaagatgtatgttgctatcctgcaggaaatataaacttaaaataaaattatataccccacaggctgtgtactttactgggctctccctgcacgcattttctctgtagttacatttaggataatctttatggttctacttcctgtaatgtacaattttatataattctgaaatgtttttaatgtatttgtgcacatgtacatatggaaatgttactgtctgactacaacatgcatcatgctcatggggagggagcaggggaaggttgtatgtgtcatttataacttctgtacagtaagaccacctgccaaaagctggaggaaccattgtgctggtgtggtctactaaataatactttaggaaatacgtgattaatatgcaagtgaacaaagtgagaaatgaaatcgaatggagattggcctggttgtttccntagtatatggcatatgaataccaggatagctttataaagcagttagttagttagttactcactctagtgataaatcgggaaatttacacacacacacacacacacacacacacacacacacagagtaacctgtaactctcaattccctgaaaaactagtaatactgtcttatctgctataaactttacatatttgtctattgtcaagatgctacaatggaaaccatttctggttttatcttcaaagcggagaaacatgttgatttagtcttctttcccaatcttcttttttaaaccagtttaaggaacttctgaagatttgtccacctctgattacatgtatgttcttgtttgtatcattagcaacaacatgctaatgacgacacctagctctaagagcaattctgggagaatgaaaggaagtataaagtaacccataatctgcttggcaatagttaagtcaatctatcttcagtttttctctggcctttaaggtcaaacacaagaggcttccctagtttacaagtcagagtcacttgtagtccatttaaatgccctcatccgtattctttgtgttgataagctgcacatgactacatagtaagtacagaacagtaaagttaaaacggatgtctccattgatctgccaaatcgttatagagagcaatttgtctggactagaaaatctgagttttacaccatactgttaagagtccttttgaattaaactagactaaaacaagtgtataactaaactaacaagattaaatatccagccagtacagtattttttaaggcaaataaagatgattagctcaccttgagataacaatcaggtaagatcataacaatgtctcatgatgtaaaaaatattaaagatatcaatactaagtgacagtatcactctaatataatatggatcagagcatttattttggggaggaaaacagtggtgattaccggcattttattaaacttaaaactttgtagaaagcaaacaaaattgttcttgggagaaaatcaacttttagattaaaaaaattttaagtatctaggagtatttaaatccttttcccataaataaaagtacagttttcttggtggcagaatgaaaatcagcaacttctagcatatagactatataatcagattgacagcatatagaatatattatcagacaagatgaggaggtataaaagttactattgctcataatgacttacaggctaaaattagttttaaaatactatattaaattctgaatgcaatttttttttgttcccttgagaccaaaatttaagttaactgttgctggcagtctaagtgtaaatgttaacagcaggagaagttaagaattgagcagttctgttgcatgatttcccaaatgaaatactgccttggctagagtttgaaaaactaattgagcctgtgcctggctagaattcctaccaaacagcttaaattcttcaagaaagaattcctgcagcagttattcccttacctgaaggcttcaatcatttggatcaacaactgctactctcgggaagactcctctactcacagctgaagaaaatgagcacacccttcacactgttattacctatcctgaagatgtgatacactgaatggaaataaatagatgtaaataaaattgagttctcatttaaaaaaaaaat

SEQ ID NO: 422034 - DNA, 2950 bp, Homo sapiens
  misc_feature (1432)..(1432): n is a, c, g, or t
tgggcgggggaggaggggcgcgcggcggccgaggaggggcgcgcggcggccgggcggggcgagcggaggcgagtggaggacgcgtagacgcgccgcggtccccgcctgccgctgctccgccgcagtcgccgctccagtctatccggcactaggaacagccccgagcggcgagacggtccccgccatgtctgcggccatgagggagaggttcgaccggttcctgcacgagaagaactgcatgactgaccttctggccaagctcgaggccaaaaccggcgtgaacaggagcttcatcgctcttggtgtcatcggactggtggccttgtacctggtgttcggttatggagcctctctcctctgcaacctgataggatttggctacccagcctacatctcaattaaagctatagagagtcccaacaaagaagatgatacccagtggctgacctactgggtagtgtatggtgtgttcagcattgctgaattcttctctgatatcttcctgtcatggttccccttctactacatgctgaagtgtggcttcctgttgtggtgcatggccccgagcccttctaatggggctgaactgctctacaagcgcatcatccgtcctttcttcctgaagcacgagtcccagatggacagtgtggtcaaggaccttaaagacaaggccaaagagactgcagatgccatcactaaagaagcgaagaaagctaccgtgaatttactgggtgaagaaaagaagagcacctaaaccagactggatggaaacttcctgccctctctgtaccttcctactggagcttgatgttatattagggactgtggtataattattttaataatgttgccttggaaacatttttgagatattaaagattggaatgtgttgtaagtttctttgcttacttttactgtctatatatatagggagcactttaaacttaatgcagtgggcagtgtccacgtttttggaaaatgtattttgcctctgggtaggaaaagatgtatgttgctatcctgcaggaaatataaacttaaaataaaattatataccccacaggctgtgtactttactgggctctccctgcacgcattttctctgtagttacatttaggataatctttatggttctacttcctgtaatgtacaattttatataattctgaaatgtttttaatgtatttgtgcacatgtacatatggaaatgttactgtctgactacaacatgcatcatgctcatggggagggagcaggggaaggttgtatgtgtcatttataacttctgtacagtaagaccacctgccaaaagctggaggaaccattgtgctggtgtggtctactaaataatactttaggaaatacgtgattaatatgcaagtgaacaaagtgagaaatgaaatcgaatggagattggcctggttgtttccntagtatatggcatatgaataccaggatagctttataaagcagttagttagttagttactcactctagtgataaatcgggaaatttacacacacacacacacacacacacacacacacacacagagtaacctgtaactctcaattccctgaaaaactagtaatactgtcttatctgctataaactttacatatttgtctattgtcaagatgctacaatggaaaccatttctggttttatcttcaaagcggagaaacatgttgatttagtcttctttcccaatcttcttttttaaaccagtttaaggaacttctgaagatttgtccacctctgattacatgtatgttcttgtttgtatcattagcaacaacatgctaatgacgacacctagctctaagagcaattctgggagaatgaaaggaagtataaagtaacccataatctgcttggcaatagttaagtcaatctatcttcagtttttctctggcctttaaggtcaaacacaagaggcttccctagtttacaagtcagagtcacttgtagtccatttaaatgccctcatccgtattctttgtgttgataagctgcacatgactacatagtaagtacagaacagtaaagttaaaacggatgtctccattgatctgccaaatcgttatagagagcaatttgtctggactagaaaatctgagttttacaccatactgttaagagtccttttgaattaaactagactaaaacaagtgtataactaaactaacaagattaaatatccagccagtacagtattttttaaggcaaataaagatgattagctcaccttgagataacaatcaggtaagatcataacaatgtctcatgatgtaaaaaatattaaagatatcaatactaagtgacagtatcactctaatataatatggatcagagcatttattttggggaggaaaacagtggtgattaccggcattttattaaacttaaaactttgtagaaagcaaacaaaattgttcttgggagaaaatcaacttttagattaaaaaaattttaagtatctaggagtatttaaatccttttcccataaataaaagtacagttttcttggtggcagaatgaaaatcagcaacttctagcatatagactatataatcagattgacagcatatagaatatattatcagacaagatgaggaggtataaaagttactattgctcataatgacttacaggctaaaaaacaagcgtttatttgaatgtgaatagtgtttcaaaggtatgtagttacagaattcctaccaaacagcttaaattcttcaagaaagaattcctgcagcagttattcccttacctgaaggcttcaatcatttggatcaacaactgctactctcgggaagactcctctactcacagctgaagaaaatgagcacacccttcacactgttattacctatcctgaagatgtgatacactgaatggaaataaatagatgtaaataaaattgagttctcatttaaaaaaaaaat

SEQ ID NO: 422035 - DNA, 1060 bp, Homo sapiens
tgggcgggggaggaggggcgcgcggcggccgaggaggggcgcgcggcggccgggcggggcgagcggaggcgagtggaggacgcgtagacgcgccgcggtccccgcctgccgctgctccgccgcagtcgccgctccagtctatccggcactaggaacagccccgagcggcgagacggtccccgccatgtctgcggccatgagggagaggttcgaccggttcctgcacgagaagaactgcatgactgaccttctggccaagctcgaggccaaaaccggcgtgaacaggagcttcatcgctcttggtgtcatcggactggtggccttgtacctggtgttcggttatggagcctctctcctctgcaacctgataggatttggctacccagcctacatctcaattaaagctatagagagtcccaacaaagaagatgatacccagtggctgacctactgggtagtgtatggtgtgttcagcattgctgaattcttctctgatatcttcctgtcatggttccccttctactacatgctgaagtgtggcttcctgttgtggtgcatggccccgagcccttctaatggggctgaactgctctacaagcgcatcatccgtcctttcttcctgaagcacgagtcccagatggacagtgtggtcaaggaccttaaagacaaggccaaagagactgcagatgccatcactaaagaagcgaagaaagctaccgtgaatttactgggtgaagaaaagaagagcacctaaaccagactggatggaaacttcctgccctctctgtaccttcctactggagcttgatgttatattagggactgtggtataattattttaataatgttgccttggaaacatttttgagatattaaagattggaatgtgttgtaagtttctttgcttacttttactgtctatatatatagggagcactttaaacttaatgcagtgggcagtgtccacgtttttggaaaatgtattttgcctctgggtaggaaaagatgtatgttgctatcctgcaggaaatataaacttaaaataaaattatatacccca

SEQ ID NO: 422036 - DNA, 2102 bp, Homo sapiens
  misc_feature (1432)..(1432): n is a, c, g, or t
tgggcgggggaggaggggcgcgcggcggccgaggaggggcgcgcggcggccgggcggggcgagcggaggcgagtggaggacgcgtagacgcgccgcggtccccgcctgccgctgctccgccgcagtcgccgctccagtctatccggcactaggaacagccccgagcggcgagacggtccccgccatgtctgcggccatgagggagaggttcgaccggttcctgcacgagaagaactgcatgactgaccttctggccaagctcgaggccaaaaccggcgtgaacaggagcttcatcgctcttggtgtcatcggactggtggccttgtacctggtgttcggttatggagcctctctcctctgcaacctgataggatttggctacccagcctacatctcaattaaagctatagagagtcccaacaaagaagatgatacccagtggctgacctactgggtagtgtatggtgtgttcagcattgctgaattcttctctgatatcttcctgtcatggttccccttctactacatgctgaagtgtggcttcctgttgtggtgcatggccccgagcccttctaatggggctgaactgctctacaagcgcatcatccgtcctttcttcctgaagcacgagtcccagatggacagtgtggtcaaggaccttaaagacaaggccaaagagactgcagatgccatcactaaagaagcgaagaaagctaccgtgaatttactgggtgaagaaaagaagagcacctaaaccagactggatggaaacttcctgccctctctgtaccttcctactggagcttgatgttatattagggactgtggtataattattttaataatgttgccttggaaacatttttgagatattaaagattggaatgtgttgtaagtttctttgcttacttttactgtctatatatatagggagcactttaaacttaatgcagtgggcagtgtccacgtttttggaaaatgtattttgcctctgggtaggaaaagatgtatgttgctatcctgcaggaaatataaacttaaaataaaattatataccccacaggctgtgtactttactgggctctccctgcacgcattttctctgtagttacatttaggataatctttatggttctacttcctgtaatgtacaattttatataattctgaaatgtttttaatgtatttgtgcacatgtacatatggaaatgttactgtctgactacaacatgcatcatgctcatggggagggagcaggggaaggttgtatgtgtcatttataacttctgtacagtaagaccacctgccaaaagctggaggaaccattgtgctggtgtggtctactaaataatactttaggaaatacgtgattaatatgcaagtgaacaaagtgagaaatgaaatcgaatggagattggcctggttgtttccntagtatatggcatatgaataccaggatagctttataaagcagttagttagttagttactcactctagtgataaatcgggaaatttacacacacacacacacacacacacacacacacacacagagtaacctgtaactctcaattccctgaaaaactagtaatactgtcttatctgctataaactttacatatttgtctattgtcaagatgctacaatggaaaccatttctggttttatcttcaaagcggagaaacatgttgatttagtcttctttcccaatcttcttttttaaaccagtttaaggaacttctgaagatttgtccacctctgattacatgtatgttcttgtttgtatcattagcaacaacatgctaatgacgacacctagctctaagagcaattctgggagaatgaaaggaagtataaagtaacccataatctgcttggcaatagttaagtcaatctatcttcagtttttctctggcctttaaggtcaaacacaagaggcttccctagtttacaagtcagagtcacttgtagtccatttaaatgccctcatccgtattctttgtgttgagacaatgcaggtacacagtggagagtttccagaggtaaggaaggttgctaggggtacaggaaggttgctagggtacaggaaggttgctaggg

SEQ ID NO: 422037 - DNA, 622 bp, Homo sapiens
tgggcgggggaggaggggcgcgcggcggccgaggaggggcgcgcggcggccgggcggggcgagcggaggcgagtggaggacgcgtagacgcgccgcggtccccgcctgccgctgctccgccgcagtcgccgctccagtctatccggcactaggaacagccccgagcggcgagacggtccccgccatgtctgcggccatgagggagaggttcgaccggttcctgcacgagaagaactgcatgactgaccttctggccaagctcgaggccaaaaccggcgtgaacaggagcttcatcgctcttggtgtcatcggactggtggccttgtacctggtgttcggttatggagcctctctcctctgcaacctgataggatttggctacccagcctacatctcaattaaagctatagagagtcccaacaaagaagatgatacccagtggctgacctactgggtagtgtatggtgtgttcagcattgctgaattcttctctgatatcttcctgtcatggttccccttctactacatgctgaagcagatttatttagaacctccatgtgccagattctgttctacatctgggagatactttggcgaataaaacaaagtccttgttgtccta

SEQ ID NO: 422038 - DNA, 613 bp, Homo sapiens
tgggcgggggaggaggggcgcgcggcggccgaggaggggcgcgcggcggccgggcggggcgagcggaggcgagtggaggacgcgtagacgcgccgcggtccccgcctgccgctgctccgccgcagtcgccgctccagtctatccggcactaggaacagccccgagcggcgagacggtccccgccatgtctgcggccatgagggagaggttcgaccggttcctgcacgagaagaactgcatgactgaccttctggccaagctcgaggccaaaaccggcgtgaacaggagcttcatcgctcttggtgtcatcggactggtggccttgtacctggtgttcggttatggagcctctctcctctgcaacctgataggatttggctacccagcctacatctcaattaaagctatagagagtcccaacaaagaagatgatacccagtggctgacctactgggtagtgtatggtgtgttcagcattgctgaattcttctctgatatcttcctgtcatggttccccttctactacatgctgaaggtgtggtctggactagggtttctccttccccgctgcctgctgtagtagtggtcgtggtggcccatcttctccctcctc

SEQ ID NO: 422039 - DNA, 3146 bp, Homo sapiens
ggccgtgtccgagcgctggcggagcacgggccgccgcggcgcgcgcctacccccgcgcacacgtgcatgcagtgagccaggtgcatcagctgcacccgccctcgggcttcgcgcgcctccgctggagcccagctagcctcgcggctccggggccgaccgggtcggaactgctgcgtccccattccggacgcagagagcgcgcggggcgccggcgccgccggttaaagtgccgcggggcaggggccgggccgcggccacccgctcctcccgctccggtcccgactgtcgggctctcggccgagtcgccccggacaatcacaaagagtgtgtaggccagccccggtcacagagtgcaccgtatcctgtcacttctggatgtgagggagaagtgagtcatctcattcccctccgtggatcagaggacttggactagatagaagcatgtggtgtctcctacgaggcctgggccggcctggagccctggcacggggagccctggggcagcagcaatccctgggtgcccgggccctggccagcgcaggctctgagagccgggacgagtacagctatgtggtggtgggcgcgggctcggcgggctgcgtgctggctgggaggctcacggaggaccccgccgagcgcgtgctgctgctggaggccgggcccaaggacgtgcgcgcggggagcaagcggctctcgtggaagatccacatgcccgcggccctggtggccaacctgtgcgacgacaggtacaactggtgctaccacacagaggtgcagcggggcctggacggccgcgtgctgtactggccacgcggccgcgtctggggtggctcctcatccctcaatgccatggtctacgtccgtgggcacgccgaggactacgagcgctggcagcgccagggcgcccgcggctgggactacgcgcactgcctgccctacttccgcaaggcgcagggccacgagctgggcgccagccggtaccggggcgccgatggcccgctgcgggtgtcccggggcaagaccaaccacccgctgcactgcgcattcctggaggccacgcagcaggccggctacccgctcaccgaggacatgaatggcttccagcaggagggcttcggctggatggacatgaccatccatgaaggcaaacggtggagcgcggcctgtgcctacctgcacccagcactgagccgcaccaacctcaaggccgaggccgagacgcttgtgagcagggtgctatttgagggcacccgtgcagtgggcgtggagtatgtcaagaatggccagagccacagggcttatgccagcaaggaggtgattctgagtggaggtgccatcaactctccacagctgctcatgctctctggcatcgggaatgctgatgacctcaagaaactgggcatccctgtggtgtgccacctacctggggttggccagaacctgcaagaccacctggagatctacattcagcaggcatgcacccgccctatcaccctccattcagcacagaagcccctgcggaaggtctgcattggtctggagtggctctggaaattcacaggggagggagccactgcccatctggaaacaggtgggttcatccgcagccagcctggggtcccccacccggacatccagttccatttcctgccatcccaagtgattgaccacgggcgggtccccacccagcaggaggcttaccaggtacatgtggggccatgcggggcacgagtgtgggctggctcaaactgagaagtgccaatccccaagaccaccctgtgatccagcccatacttgtcaacagaaactgatattgaggatttccgtctgtgtgtgaagctcaccagagaaatttttgcacaggaagccctggctccgttccgagggaaagagctccagccaggaagccacattcagtcagataaagagatagatgcctttgtgcgggcaaaagccgacagcgcctaccacccctcgtgcacctgtaagatgggccagccctccgatcccactgccgtggtggatccgcagacaagggtcctcggggtggaaaacctcagggtcgtcgatgcctccatcatgcctagcatggtcagcggcaacctgaacgcccccacaatcatgatcgcagagaaggcagctgacattatcaaggggcagcctgcactctgggacaaagatgtccctgtctacaagcccaggacgctggccacccagcgctaagacagttgctgctggaggatgaccagggaagccccctgataagccaagagggccagcacagcccttgctcccaggctcctgcctgaaactatctagcacactaggacccaggtggtaccctactcagtggctgagaattggataaagtcttgggaaatgagacaagtactgggcagtgaatccagctccttttccccagcctttccctgtgggccatttggggaaggccagcattcagcctgagatgttcctccctgcctcctgggagggacagaaggggaggatggttaactcctgccgcatcctttttcttgtgttcacgtggcattctctaacccagggcagtggttccttcccaggccatgcacagaggctgggtgcctgccagacccacggagggttcgcgaaggaaggggcatcctccttcttgagctgcaagctttagctgaggcagtaagtcacacagtagttagttcagcctgggctggcacataagtccccagtgtccctgttgagaggggaaagttgcctgctggttgaaaaactggcttttcctttctcgctgcctaatttcactctcagagtgaggcaggtaactggggctccactgggtcactctgagagggttgtggctctggttcttattaaaccagggccaggtgcagggctcacacctgtaatcccagcactttgggaaggtcacttgagctcaggagttcaagaccagcctgggcaacatagtgagaccttgtctctggaaaacaattagctgggcatggtggtacacacctgtagtcccagctacttgggaggctgaggcgggaggatggctttagcccaggaggttgaggctcctgtgaaccctgatggcaccactgcactccagcctgggttgacagggtgagaccctgtctcaaaaaaaa

SEQ ID NO: 422040 - DNA, 2879 bp, Homo sapiens
ggtgttgttcggcacacaggctttgagacaaccagggtgcggagacaatcacaaagagtgtgtaggccagccccggtcacagagtgcaccgtatcctgtcacttctggatgtgagggagaagtgagtcatctcattcccctccgtggatcagaggacttggactagatagaagcatgtggtgtctcctacgaggcctgggccggcctggagccctggcacggggagccctggggcagcagcaatccctgggtgcccgggccctggccagcgcaggctctgagagccgggacgagtacagctatgtggtggtgggcgcgggctcggcgggctgcgtgctggctgggaggctcacggaggaccccgccgagcgcgtgctgctgctggaggccgggcccaaggacgtgcgcgcggggagcaagcggctctcgtggaagatccacatgcccgcggccctggtggccaacctgtgcgacgacaggtacaactggtgctaccacacagaggtgcagcggggcctggacggccgcgtgctgtactggccacgcggccgcgtctggggtggctcctcatccctcaatgccatggtctacgtccgtgggcacgccgaggactacgagcgctggcagcgccagggcgcccgcggctgggactacgcgcactgcctgccctacttccgcaaggcgcagggccacgagctgggcgccagccggtaccggggcgccgatggcccgctgcgggtgtcccggggcaagaccaaccacccgctgcactgcgcattcctggaggccacgcagcaggccggctacccgctcaccgaggacatgaatggcttccagcaggagggcttcggctggatggacatgaccatccatgaaggcaaacggtggagcgcggcctgtgcctacctgcacccagcactgagccgcaccaacctcaaggccgaggccgagacgcttgtgagcagggtgctatttgagggcacccgtgcagtgggcgtggagtatgtcaagaatggccagagccacagggcttatgccagcaaggaggtgattctgagtggaggtgccatcaactctccacagctgctcatgctctctggcatcgggaatgctgatgacctcaagaaactgggcatccctgtggtgtgccacctacctggggttggccagaacctgcaagaccacctggagatctacattcagcaggcatgcacccgccctatcaccctccattcagcacagaagcccctgcggaaggtctgcattggtctggagtggctctggaaattcacaggggagggagccactgcccatctggaaacaggtgggttcatccgcagccagcctggggtcccccacccggacatccagttccatttcctgccatcccaagtgattgaccacgggcgggtccccacccagcaggaggcttaccaggtacatgtggggccatgcggggcacgagtgtgggctggctcaaactgagaagtgccaatccccaagaccaccctgtgatccagcccatacttgtcaacagaaactgatattgaggatttccgtctgtgtgtgaagctcaccagagaaatttttgcacaggaagccctggctccgttccgagggaaagagctccagccaggaagccacattcagtcagataaagagatagatgcctttgtgcgggcaaaagccgacagcgcctaccacccctcgtgcacctgtaagatgggccagccctccgatcccactgccgtggtggatccgcagacaagggtcctcggggtggaaaacctcagggtcgtcgatgcctccatcatgcctagcatggtcagcggcaacctgaacgcccccacaatcatgatcgcagagaaggcagctgacattatcaaggggcagcctgcactctgggacaaagatgtccctgtctacaagcccaggacgctggccacccagcgctaagacagttgctgctggaggatgaccagggaagccccctgataagccaagagggccagcacagcccttgctcccaggctcctgcctgaaactatctagcacactaggacccaggtggtaccctactcagtggctgagaattggataaagtcttgggaaatgagacaagtactgggcagtgaatccagctccttttccccagcctttccctgtgggccatttggggaaggccagcattcagcctgagatgttcctccctgcctcctgggagggacagaaggggaggatggttaactcctgccgcatcctttttcttgtgttcacgtggcattctctaacccagggcagtggttccttcccaggccatgcacagaggctgggtgcctgccagacccacggagggttcgcgaaggaaggggcatcctccttcttgagctgcaagctttagctgaggcagtaagtcacacagtagttagttcagcctgggctggcacataagtccccagtgtccctgttgagaggggaaagttgcctgctggttgaaaaactggcttttcctttctcgctgcctaatttcactctcagagtgaggcaggtaactggggctccactgggtcactctgagagggttgtggctctggttcttattaaaccagggccaggtgcagggctcacacctgtaatcccagcactttgggaaggtcacttgagctcaggagttcaagaccagcctgggcaacatagtgagaccttgtctctggaaaacaattagctgggcatggtggtacacacctgtagtcccagctacttgggaggctgaggcgggaggatggctttagcccaggaggttgaggctcctgtgaaccctgatggcaccactgcactccagcctgggttgacagggtgagaccctgtctcaaaaaaaa

SEQ ID NO: 422041 - DNA, 3407 bp, Homo sapiens
ggccgtgtccgagcgctggcggagcacgggccgccgcggcgcgcgcctacccccgcgcacacgtgcatgcagtgagccaggtgcatcagctgcacccgccctcgggcttcgcgcgcctccgctggagcccagctagcctcgcggctccggggccgaccgggtcggaactgctgcgtccccattccggacgcagagagcgcgcggggcgccggcgccgccggttaaagtgccgcggggcaggggccgggccgcggccacccgctcctcccgctccggtcccgactgtcgggctctcggccgagtcgccccgggtgagtagccgcggaggcgccccgaccaccccgcagcagcgccgcccggccgctagcccggagaggcctgggggccggaggtttggggccgggctggacgccgagacccgggcccgctttacacaatcgccccgccgcgcgaagcgaaacgggtggaacgcagactgccgaagctcactgactcctttgagggagcgaattctttcagctacgcggggttagagcggtaggagtgcccgctgcccgaccccaggctttctgacaatcacaaagagtgtgtaggccagccccggtcacagagtgcaccgtatcctgtcacttctggatgtgagggagaagtgagtcatctcattcccctccgtggatcagaggacttggactagatagaagcatgtggtgtctcctacgaggcctgggccggcctggagccctggcacggggagccctggggcagcagcaatccctgggtgcccgggccctggccagcgcaggctctgagagccgggacgagtacagctatgtggtggtgggcgcgggctcggcgggctgcgtgctggctgggaggctcacggaggaccccgccgagcgcgtgctgctgctggaggccgggcccaaggacgtgcgcgcggggagcaagcggctctcgtggaagatccacatgcccgcggccctggtggccaacctgtgcgacgacaggtacaactggtgctaccacacagaggtgcagcggggcctggacggccgcgtgctgtactggccacgcggccgcgtctggggtggctcctcatccctcaatgccatggtctacgtccgtgggcacgccgaggactacgagcgctggcagcgccagggcgcccgcggctgggactacgcgcactgcctgccctacttccgcaaggcgcagggccacgagctgggcgccagccggtaccggggcgccgatggcccgctgcgggtgtcccggggcaagaccaaccacccgctgcactgcgcattcctggaggccacgcagcaggccggctacccgctcaccgaggacatgaatggcttccagcaggagggcttcggctggatggacatgaccatccatgaaggcaaacggtggagcgcggcctgtgcctacctgcacccagcactgagccgcaccaacctcaaggccgaggccgagacgcttgtgagcagggtgctatttgagggcacccgtgcagtgggcgtggagtatgtcaagaatggccagagccacagggcttatgccagcaaggaggtgattctgagtggaggtgccatcaactctccacagctgctcatgctctctggcatcgggaatgctgatgacctcaagaaactgggcatccctgtggtgtgccacctacctggggttggccagaacctgcaagaccacctggagatctacattcagcaggcatgcacccgccctatcaccctccattcagcacagaagcccctgcggaaggtctgcattggtctggagtggctctggaaattcacaggggagggagccactgcccatctggaaacaggtgggttcatccgcagccagcctggggtcccccacccggacatccagttccatttcctgccatcccaagtgattgaccacgggcgggtccccacccagcaggaggcttaccaggtacatgtggggccatgcggggcacgagtgtgggctggctcaaactgagaagtgccaatccccaagaccaccctgtgatccagcccatacttgtcaacagaaactgatattgaggatttccgtctgtgtgtgaagctcaccagagaaatttttgcacaggaagccctggctccgttccgagggaaagagctccagccaggaagccacattcagtcagataaagagatagatgcctttgtgcgggcaaaagccgacagcgcctaccacccctcgtgcacctgtaagatgggccagccctccgatcccactgccgtggtggatccgcagacaagggtcctcggggtggaaaacctcagggtcgtcgatgcctccatcatgcctagcatggtcagcggcaacctgaacgcccccacaatcatgatcgcagagaaggcagctgacattatcaaggggcagcctgcactctgggacaaagatgtccctgtctacaagcccaggacgctggccacccagcgctaagacagttgctgctggaggatgaccagggaagccccctgataagccaagagggccagcacagcccttgctcccaggctcctgcctgaaactatctagcacactaggacccaggtggtaccctactcagtggctgagaattggataaagtcttgggaaatgagacaagtactgggcagtgaatccagctccttttccccagcctttccctgtgggccatttggggaaggccagcattcagcctgagatgttcctccctgcctcctgggagggacagaaggggaggatggttaactcctgccgcatcctttttcttgtgttcacgtggcattctctaacccagggcagtggttccttcccaggccatgcacagaggctgggtgcctgccagacccacggagggttcgcgaaggaaggggcatcctccttcttgagctgcaagctttagctgaggcagtaagtcacacagtagttagttcagcctgggctggcacataagtccccagtgtccctgttgagaggggaaagttgcctgctggttgaaaaactggcttttcctttctcgctgcctaatttcactctcagagtgaggcaggtaactggggctccactgggtcactctgagagggttgtggctctggttcttattaaaccagggccaggtgcagggctcacacctgtaatcccagcactttgggaaggtcacttgagctcaggagttcaagaccagcctgggcaacatagtgagaccttgtctctggaaaacaattagctgggcatggtggtacacacctgtagtcccagctacttgggaggctgaggcgggaggatggctttagcccaggaggttgaggctcctgtgaaccctgatggcaccactgcactccagcctgggttgacagggtgagaccctgtctcaaaaaaaa

SEQ ID NO: 422042 - DNA, 3354 bp, Homo sapiens
ggccgtgtccgagcgctggcggagcacgggccgccgcggcgcgcgcctacccccgcgcacacgtgcatgcagtgagccaggtgcatcagctgcacccgccctcgggcttcgcgcgcctccgctggagcccagctagcctcgcggctccggggccgaccgggtcggaactgctgcgtccccattccggacgcagagagcgcgcggggcgccggcgccgccggttaaagtgccgcggggcaggggccgggccgcggccacccgctcctcccgctccggtcccgactgtcgggctctcggccgagtcgccccggacaatcacaaagagtgtgtaggccagccccggtcacagagtgcaccgtatcctgtcacttctggatgtgagggagaagtgagtcatctcattcccctccgtggatcagaggacttggactagatagaagcatgtggtgtctcctacgaggcctgggccggcctggagccctggcacggggagccctggggcagcagcaatccctgggtgcccgggccctggccagcgcaggctctgagagccgggacgagtacagctatgtggtggtgggcgcgggctcggcgggctgcgtgctggctgggaggctcacggaggaccccgccgagcgcgtgctgctgctggaggccgggcccaaggacgtgcgcgcggggagcaagcggctctcgtggaagatccacatgcccgcggccctggtggccaacctgtgcgacgacaggtacaactggtgctaccacacagaggtgcagcggggcctggacggccgcgtgctgtactggccacgcggccgcgtctggggtggctcctcatccctcaatgccatggtctacgtccgtgggcacgccgaggactacgagcgctggcagcgccagggcgcccgcggctgggactacgcgcactgcctgccctacttccgcaaggcgcagggccacgagctgggcgccagccggtaccggggcgccgatggcccgctgcgggtgtcccggggcaagaccaaccacccgctgcactgcgcattcctggaggccacgcagcaggccggctacccgctcaccgaggacatgaatggcttccagcaggagggcttcggctggatggacatgaccatccatgaaggcaaacggtggagcgcggcctgtgcctacctgcacccagcactgagccgcaccaacctcaaggccgaggccgagacgcttgtgagcagggtgctatttgagggcacccgtgcagtgggcgtggagtatgtcaagaatggccagagccacagggcttatgccagcaaggaggtgattctgagtggaggtgccatcaactctccacagctgctcatgctctctggcatcgggaatgctgatgacctcaagaaactgggcatccctgtggtgtgccacctacctggggttggccagaacctgcaagaccacctggagatctacattcagcaggcatgcacccgccctatcaccctccattcagcacagaagcccctgcggaaggtctgcattggtctggagtggctctggaaattcacaggggagggagccactgcccatctggaaacaggtgggttcatccgcagccagcctggggtcccccacccggacatccagttccatttcctgccatcccaagtgattgaccacgggcgggtccccacccagcaggaggcttaccaggtacatgtggggccatgcggggcacgagtgtgggctggctcaaactgagaagtgccaatccccaagaccaccctgtgatccagcccatacttgtcaacagaaactgatattgaggatttccgtctgtgtgtgaagctcaccagagaaatttttgcacaggaagccctggctccgttccgagggaaagagctccagccaggaagccacattcagtcagataaagagatagatgcctttgtgcgggcaaaagccgacagcgcctaccacccctcgtgcacctgtaagatgggccagccctccgatcccactgccgtggtggatccgcagacaagggtcctcggggtggaaaacctcagggtcgtcgatgcctccatcatgcctagcatggtcagcggcaacctgaacgcccccacaatcatgatcgcagagaaggcagctgacattatcaaggggcagcctgcactctgggacaaagatgtccctgtctacaagcccaggacgctggccacccagcgctaagacagttgctgctggaggatgaccagggaagccccctgataagccaagagggccagcacagcccttgctcccaggctcctgcctgaaactatctagcacactaggacccaggtggtaccctactcagtggctgagaattggataaagtcttgggaaatgagacaagtactgggcagtgaatccagctccttttccccagcctttccctgtgggccatttggggaaggccagcattcagcctgagatgttcctccctgcctcctgggagggacagaaggggaggatggttaactcctgccgcatcctttttcttgtgttcacgtggcattctctaacccagggcagtggttccttcccaggccatgcacagaggctgggtgcctgccagacccacggagggttcgcgaaggaaggggcatcctccttcttgagctgcaagctttagctgaggcagtaagtcacacagtagttagttcagcctgggctggcacataagtccccagtgtccctgttgagaggggaaagttgcctgctggttgaaaaactggcttttcctttctcgctgcctaatttcactctcagagtgaggcaggtaactggggctccactgggtcactctgagagggttgtggctctggttcttattaaaccagggccaggtgcagggctcacacctgtaatcccagcactttgggaaggtcacttgagctcaggagttcaagaccagcctgggcaacatagtgagaccttgtctctggaaaacaattagctgggcatggtggtacacacctgtagtcccagctacttgggaggctgaggcgggaggatggctttagcccaggaggttgaggctccttactctgttttggcagtatgggcagcagacagtgagactctgtttctacaaaatattaaaaaaattaattgggtatggtggcatgtgcctgtagttcccagctaccgaagaggctaaagcgggagggagttgaaattaggaatgggctcatgcagaaatatttgtaataatatttaaacgaaatcctttgggtaaaaaaagcataatataaaaaggacacctctcttcccatgtcattccatagttgctcacatgaagagagtctccgtcgaact

SEQ ID NO: 422043 - DNA, 2897 bp, Homo sapiens
tagagggctagtccctctgagacgagcgagcaggcagccattcactaacatgcgttcattccacaatcacaaagagtgtgtaggccagccccggtcacagagtgcaccgtatcctgtcacttctggatgtgagggagaagtgagtcatctcattcccctccgtggatcagaggacttggactagatagaagcatgtggtgtctcctacgaggcctgggccggcctggagccctggcacggggagccctggggcagcagcaatccctgggtgcccgggccctggccagcgcaggctctgagagccgggacgagtacagctatgtggtggtgggcgcgggctcggcgggctgcgtgctggctgggaggctcacggaggaccccgccgagcgcgtgctgctgctggaggccgggcccaaggacgtgcgcgcggggagcaagcggctctcgtggaagatccacatgcccgcggccctggtggccaacctgtgcgacgacaggtacaactggtgctaccacacagaggtgcagcggggcctggacggccgcgtgctgtactggccacgcggccgcgtctggggtggctcctcatccctcaatgccatggtctacgtccgtgggcacgccgaggactacgagcgctggcagcgccagggcgcccgcggctgggactacgcgcactgcctgccctacttccgcaaggcgcagggccacgagctgggcgccagccggtaccggggcgccgatggcccgctgcgggtgtcccggggcaagaccaaccacccgctgcactgcgcattcctggaggccacgcagcaggccggctacccgctcaccgaggacatgaatggcttccagcaggagggcttcggctggatggacatgaccatccatgaaggcaaacggtggagcgcggcctgtgcctacctgcacccagcactgagccgcaccaacctcaaggccgaggccgagacgcttgtgagcagggtgctatttgagggcacccgtgcagtgggcgtggagtatgtcaagaatggccagagccacagggcttatgccagcaaggaggtgattctgagtggaggtgccatcaactctccacagctgctcatgctctctggcatcgggaatgctgatgacctcaagaaactgggcatccctgtggtgtgccacctacctggggttggccagaacctgcaagaccacctggagatctacattcagcaggcatgcacccgccctatcaccctccattcagcacagaagcccctgcggaaggtctgcattggtctggagtggctctggaaattcacaggggagggagccactgcccatctggaaacaggtgggttcatccgcagccagcctggggtcccccacccggacatccagttccatttcctgccatcccaagtgattgaccacgggcgggtccccacccagcaggaggcttaccaggtacatgtggggccatgcggggcacgagtgtgggctggctcaaactgagaagtgccaatccccaagaccaccctgtgatccagcccatacttgtcaacagaaactgatattgaggatttccgtctgtgtgtgaagctcaccagagaaatttttgcacaggaagccctggctccgttccgagggaaagagctccagccaggaagccacattcagtcagataaagagatagatgcctttgtgcgggcaaaagccgacagcgcctaccacccctcgtgcacctgtaagatgggccagccctccgatcccactgccgtggtggatccgcagacaagggtcctcggggtggaaaacctcagggtcgtcgatgcctccatcatgcctagcatggtcagcggcaacctgaacgcccccacaatcatgatcgcagagaaggcagctgacattatcaaggggcagcctgcactctgggacaaagatgtccctgtctacaagcccaggacgctggccacccagcgctaagacagttgctgctggaggatgaccagggaagccccctgataagccaagagggccagcacagcccttgctcccaggctcctgcctgaaactatctagcacactaggacccaggtggtaccctactcagtggctgagaattggataaagtcttgggaaatgagacaagtactgggcagtgaatccagctccttttccccagcctttccctgtgggccatttggggaaggccagcattcagcctgagatgttcctccctgcctcctgggagggacagaaggggaggatggttaactcctgccgcatcctttttcttgtgttcacgtggcattctctaacccagggcagtggttccttcccaggccatgcacagaggctgggtgcctgccagacccacggagggttcgcgaaggaaggggcatcctccttcttgagctgcaagctttagctgaggcagtaagtcacacagtagttagttcagcctgggctggcacataagtccccagtgtccctgttgagaggggaaagttgcctgctggttgaaaaactggcttttcctttctcgctgcctaatttcactctcagagtgaggcaggtaactggggctccactgggtcactctgagagggttgtggctctggttcttattaaaccagggccaggtgcagggctcacacctgtaatcccagcactttgggaaggtcacttgagctcaggagttcaagaccagcctgggcaacatagtgagaccttgtctctggaaaacaattagctgggcatggtggtacacacctgtagtcccagctacttgggaggctgaggcgggaggatggctttagcccaggaggttgaggctcctgtgaaccctgatggcaccactgcactccagcctgggttgacagggtgagaccctgtctcaaaaaaaa

SEQ ID NO: 422044 - DNA, 2988 bp, Homo sapiens
ggccgtgtccgagcgctggcggagcacgggccgccgcggcgcgcgcctacccccgcgcacacgtgcatgcagtgagccaggtgcatcagctgcacccgccctcgggcttcgcgcgcctccgctggagcccagctagcctcgcggctccggggccgaccgggtcggaactgctgcgtccccattccggacgcagagagcgcgcggggcgccggcgccgccggttaaagtgccgcggggcaggggccgggccgcggccacccgctcctcccgctccggtcccgactgtcgggctctcggccgagtcgccccggacaatcacaaagagtgtgtaggccagccccggtcacagagtgcaccgtatcctgtcacttctggatgtgagggagaagtgagtcatctcattcccctccgtggatcagaggacttggactagatagaagcatgtggtgtctcctacgaggcctgggccggcctggagccctggcacggggagccctggggcagcagcaatccctgggtgcccgggccctggccagcgcaggctctgagagccgggacgagtacagctatgtggtggtgggcgcgggctcggcgggctgcgtgctggctgggaggctcacggaggaccccgccgagcgcgtgctgctgctggaggccgggcccaaggacgtgcgcgcggggagcaagcggctctcgtggaagatccacatgcccgcggccctggtggccaacctgtgcgacgacaggtacaactggtgctaccacacagaggtgcagcggggcctggacggccgcgtgctgtactggccacgcggccgcgtctggggtggctcctcatccctcaatgccatggtctacgtccgtgggcacgccgaggactacgagcgctggcagcgccagggcgcccgcggctgggactacgcgcactgcctgccctacttccgcaaggcgcagggccacgagctgggcgccagccggtaccggggcgccgatggcccgctgcgggtgtcccggggcaagaccaaccacccgctgcactgcgcattcctggaggccacgcagcaggccggctacccgctcaccgaggacatgaatggcttccagcaggagggcttcggctggatggacatgaccatccatgaaggcaaacggtggagcgcggcctgtgcctacctgcacccagcactgagccgcaccaacctcaaggccgaggccgagacgcttgtgagcagggtgctatttgagggcacccgtgcagtgggcgtggagtatgtcaagaatggccagagccacagggcttatgccagcaaggaggtgattctgagtggaggtgccatcaactctccacagctgctcatgctctctggcatcgggaatgctgatgacctcaagaaactgggcatccctgtggtgtgccacctacctggggttggccagaacctgcaagaccacctggagatctacattcagcaggcatgcacccgccctatcaccctccattcagcacagaagcccctgcggaaggtctgcattggtctggagtggctctggaaattcacaggggagggagccactgcccatctggaaacaggtgggttcatccgcagccagcctggggtcccccacccggacatccagttccatttcctgccatcccaagtgattgaccacgggcgggtccccacccagcaggaggcttaccaggtacatgtggggccatgcggggcacgagtgtgggctggctcaaactgagaagtgccaatccccaagaccaccctgtgatccagcccatacttgtcaacagaaactgatattgaggatttccgtctgtgtgtgaagctcaccagagaaatttttgcacaggaagccctggctccgttccgagggaaagagctccagccaggaagccacattcagtcagataaagagatagatgcctttgtgcgggcaaaagccgacagcgcctaccacccctcgtgcacctgtaagatgggccagccctccgatcccactgccgtggtggatccgcagacaagggtcctcggggtggaaaacctcagggtcgtcgatgcctccatcatgcctagcatggtcagcggcaacctgaacgcccccacaatcatgatcgcagagaaggcagctgacattatcaaggggcagcctgcactctgggacaaagatgtccctgtctacaagcccaggacgctggccacccagcgctaagacagttgctgctggaggatgaccagggaagccccctgataagccaagagggccagcacagcccttgctcccaggctcctgcctgaaactatctagcacactaggacccaggtggtaccctactcagtggctgagaattggataaagtcttgggaaatgagacaagtactgggcagtgaatccagctccttttccccagcctttccctgtgggccatttggggaaggccagcattcagcctgagatgttcctccctgcctcctgggagggacagaaggggaggatggttaactcctgccgcatcctttttcttgtgttcacgtggcattctctaacccagggcagtggttccttcccaggccatgcacagaggctgggtgcctgccagacccacggagggttcgcgaaggaaggggcatcctccttcttgagctgcaagctttagctgaggcagtaagtcacacagtagttagttcagcctgggctggcacataagtccccagtgtccctgttgagaggggaaagttgcctgctggttgaaaaactggcttttcctttctcgctgcctaatttcactctcagagtgaggcaggtaactggggctccactgggtcactctgagagggttgtggctctggttcttattaaaccagggccaggtgcagggctcacacctgtaatcccagcactttgggaaggtgaaccctgatggcaccactgcactccagcctgggttgacagggtgagaccctgtctcaaaaaaaa

SEQ ID NO: 422045 - DNA, 3092 bp, Homo sapiens
ggccgtgtccgagcgctggcggagcacgggccgccgcggcgcgcgcctacccccgcgcacacgtgcatgcagtgagccaggtgcatcagctgcacccgccctcgggcttcgcgcgcctccgctggagcccagctagcctcgcggctccggggccgaccgggtcggaactgctgcgtccccattccggacgcagagagcgcgcggggcgccggcgccgccggttaaagtgccgcggggcaggggccgggccgcggccacccgctcctcccgctccggtcccgactgtcgggctctcggccgagtcgccccggacaatcacaaagagtgtgtaggccagccccggtcacagagtgcaccgtatcctgtcacttctggatgtgagggagaagtgagtcatctcattcccctccgtggatcagaggacttggactagatagaagcatgtggtgtctcctacgaggcctgggccggcctggagccctggcacggggagccctggggcagcagcaatccctgggtgcccgggccctggccagcgcaggctctgagagccgggacgagtacagctatgtggtggtgggcgcgggctcggcgggctgcgtgctggctgggaggctcacggaggaccccgccgagcgcgtgctgctgctggaggccgggcccaaggacgtgcgcgcggggagcaagcggctctcgtggaagatccacatgcccgcggccctggtggccaacctgtgcgacgacaggtacaactggtgctaccacacagaggtgcagcggggcctggacggccgcgtgctgtactggccacgcggccgcgtctggggtggctcctcatccctcaatgccatggtctacgtccgtgggcacgccgaggactacgagcgctggcagcgccagggcgcccgcggctgggactacgcgcactgcctgccctacttccgcaaggcgcagggccacgagctgggcgccagccggtaccggggcgccgatggcccgctgcgggtgtcccggggcaagaccaaccacccgctgcactgcgcattcctggaggccacgcagcaggccggctacccgctcaccgaggacatgaatggcttccagcaggagggcttcggctggatggacatgaccatccatgaaggcaaacggtggagcgcggcctgtgcctacctgcacccagcactgagccgcaccaacctcaaggccgaggccgagacgcttgtgagcagggtgctatttgagggcacccgtgcagtgggcgtggagtatgtcaagaatggccagagccacaggctgctcatgctctctggcatcgggaatgctgatgacctcaagaaactgggcatccctgtggtgtgccacctacctggggttggccagaacctgcaagaccacctggagatctacattcagcaggcatgcacccgccctatcaccctccattcagcacagaagcccctgcggaaggtctgcattggtctggagtggctctggaaattcacaggggagggagccactgcccatctggaaacaggtgggttcatccgcagccagcctggggtcccccacccggacatccagttccatttcctgccatcccaagtgattgaccacgggcgggtccccacccagcaggaggcttaccaggtacatgtggggccatgcggggcacgagtgtgggctggctcaaactgagaagtgccaatccccaagaccaccctgtgatccagcccatacttgtcaacagaaactgatattgaggatttccgtctgtgtgtgaagctcaccagagaaatttttgcacaggaagccctggctccgttccgagggaaagagctccagccaggaagccacattcagtcagataaagagatagatgcctttgtgcgggcaaaagccgacagcgcctaccacccctcgtgcacctgtaagatgggccagccctccgatcccactgccgtggtggatccgcagacaagggtcctcggggtggaaaacctcagggtcgtcgatgcctccatcatgcctagcatggtcagcggcaacctgaacgcccccacaatcatgatcgcagagaaggcagctgacattatcaaggggcagcctgcactctgggacaaagatgtccctgtctacaagcccaggacgctggccacccagcgctaagacagttgctgctggaggatgaccagggaagccccctgataagccaagagggccagcacagcccttgctcccaggctcctgcctgaaactatctagcacactaggacccaggtggtaccctactcagtggctgagaattggataaagtcttgggaaatgagacaagtactgggcagtgaatccagctccttttccccagcctttccctgtgggccatttggggaaggccagcattcagcctgagatgttcctccctgcctcctgggagggacagaaggggaggatggttaactcctgccgcatcctttttcttgtgttcacgtggcattctctaacccagggcagtggttccttcccaggccatgcacagaggctgggtgcctgccagacccacggagggttcgcgaaggaaggggcatcctccttcttgagctgcaagctttagctgaggcagtaagtcacacagtagttagttcagcctgggctggcacataagtccccagtgtccctgttgagaggggaaagttgcctgctggttgaaaaactggcttttcctttctcgctgcctaatttcactctcagagtgaggcaggtaactggggctccactgggtcactctgagagggttgtggctctggttcttattaaaccagggccaggtgcagggctcacacctgtaatcccagcactttgggaaggtcacttgagctcaggagttcaagaccagcctgggcaacatagtgagaccttgtctctggaaaacaattagctgggcatggtggtacacacctgtagtcccagctacttgggaggctgaggcgggaggatggctttagcccaggaggttgaggctcctgtgaaccctgatggcaccactgcactccagcctgggttgacagggtgagaccctgtctcaaaaaaaa

SEQ ID NO: 422046 - DNA, 7444 bp, Homo sapiens
  misc_feature (6453)..(6453): n is a, c, g, or t
  misc_feature (6843)..(6843): n is a, c, g, or t
  misc_feature (6888)..(6888): n is a, c, g, or t
  misc_feature (6892)..(6892): n is a, c, g, or t
  misc_feature (6991)..(6991): n is a, c, g, or t
  misc_feature (7443)..(7443): n is a, c, g, or t
ccgcattcaagctttcaagcattcaaaggtctaaatgaaaaaggctaagtattatttcaaaaggcaagtatatcctaatatagcaaaacaaacaaagcaaaatccatcagctactcctccaattgaagtgatgaagcccaaataattcatatagcaaaatggagaaaattagaccggccatctaaaaatctgccattggtgaagtgatgaagaacatttactgtcttattccgaagcttgtcaattttgcaactcttggctgcctatggatttctgtggtgcagtgtacagttttaaatagctgcctaaagtcgtgtgtaactaatctgggccagcagcttgaccttggcacaccacataatctgagtgaaccgtgtatccaaggatgtcacttttggaactctgtagatcagaaaaactgtgctttaaagtgtcgggagtcgtgtgaggttggctgtagcagcgcggaaggtgcatatgaagaggaagtactggaaaatgcagacctaccaactgctccctttgcttcttccattggaagccacaatatgacattacgatggaaatctgcaaacttctctggagtaaaatacatcattcagtggaaatatgcacaacttctgggaagctggacttatactaagactgtgtccagaccgtcctatgtggtcaagcccctgcaccccttcactgagtacattttccgagtggtttggatcttcacagcgcagctgcagctctactcccctccaagtcccagttacaggactcatcctcatggagttcctgaaactgcacctttgattaggaatattgagagctcaagtcccgacactgtggaagtcagctgggatccacctcaattcccaggtggacctattttgggttataacttaaggctgatcagcaaaaatcaaaaattagatgcagggacacagagaaccagtttccagttttactccactttaccaaatactatctacaggttttctattgcagcagtaaatgaagttggtgagggtccagaagcagaatctagtattaccacttcatcttcagcagttcaacaagaggaacagtggctctttttatccagaaaaacttctctaagaaagagatctttaaaacatttagtagatgaagcacattgccttcggttggatgctatataccataatattacaggaatatctgttgatgtccaccagcaaattgtttatttctctgaaggaactctcatatgggcgaagaaggctgccaacatgtctgatgtatctgacctgagaattttttacagaggttcaggattaatttcttctatctccatagattggctttatcaaagaatgtatttcatcatggatgaactggtatgtgtctgtgatttagagaactgctcaaacatcgaggaaattactccaccctctattagtgcacctcaaaaaattgtggctgattcatacaatgggtatgtcttttacctcctgagagatggcatttatagagcagaccttcctgtaccatctggccggtgtgcagaagctgtgcgtattgtggagagttgcacgttaaaggactttgcaatcaagccacaagccaagcgaatcatttacttcaatgacactgcccaagtcttcatgtcaacatttctggatggctctgcttcccatctcatcctacctcgcatcccctttgctgatgtgaaaagttttgcttgtgaaaacaatgactttcttgtcacagatggcaaggtcattttccaacaggatgctttgtcttttaatgaattcatcgtgggatgtgacctgagtcacatagaagaatttgggtttggtaacttggtcatctttggctcatcctcccagctgcaccctctgccaggccgcccgcaggagctttcggtgctgtttggctctcaccaggctcttgttcaatggaagcctcctgcccttgccataggagccaatgtcatcctgatcagtgatattattgaactctttgaattaggcccttctgcctggcagaactggacctatgaggtgaaagtatccacccaagaccctcctgaagtcactcatattttcttgaacataagtggaaccatgctgaatgtacctgagctgcagagtgctatgaaatacaaggtttctgtgagagcaagttctccaaagaggccaggcccctggtcagagccctcagtgggtactaccctggtgccagctagtgaaccaccatttatcatggctgtgaaagaagatgggctttggagtaaaccattaaatagctttggcccaggagagttcttatcctctgatataggaaatgtgtcagacatggattggtataacaacagcctctactacagtgacacgaaaggcgacgtttttgtgtggctgctgaatgggacggatatctcagagaattatcacctacccagcattgcaggagcaggggctttagcttttgagtggctgggtcactttctctactgggctggaaagacatatgtgatacaaaggcagtctgtgttgacgggacacacagacattgttacccacgtgaagctattggtgaatgacatggtggtggattcagttggtggatatctctactggaccacactctattcagtggaaagcaccagactaaatggggaaagttcccttgtactacagacacagccttggttttctgggaaaaaggtaattgctctaactttagacctcagtgatgggctcctgtattggttggttcaagacagtcaatgtattcacctgtacacagctgttcttcggggacagagcactggggataccaccatcacagaatttgcagcctggagtacttctgaaatttcccagaatgcactgatgtactatagtggtcggctgttctggatcaatggctttaggattatcacaactcaagaaataggtcagaaaaccagtgtctctgttttggaaccagccagatttaatcagttcacaattattcagacatcccttaagcccctgccagggaacttttcctttacccctaaggttattccagattctgttcaagagtcttcatttaggattgaaggaaatgcttcaagttttcaaatcctgtggaatggtccccctgcggtagactggggtgtagttttctacagtgtagaatttagtgctcattctaagttcttggctagtgaacaacactctttacctgtatttactgtggaaggactggaaccttatgccttatttaatctttctgtcactccttatacctactggggaaagggccccaaaacatctctgtcacttcgagcacctgaaacagttccatcagcaccagagaaccccagaatatttatattaccaagtggaaaatgctgcaacaagaatgaagttgtggtggaatttaggtggaacaaacctaagcatgaaaatggggtgttaacaaaatttgaaattttctacaatatatccaatcaaagtattacaaacaaaacatgtgaagactggattgctgtcaatgtcactccctcagtgatgtcttttcaacttgaaggcatgagtcccagatgctttattgccttccaggttagggcctttacatctaaggggccaggaccatatgctgacgttgtaaagtctacaacatcagaaatcaacccatttcctcacctcataactcttcttggtaacaagatagtttttttagatatggatcaaaatcaagttgtgtggacgttttcagcagaaagagttatcagtgccgtttgctacacagctgataatgagatgggatattatgctgaaggggactcactctttcttctgcacttgcacaatcgctctagctctgagcttttccaagattcactggtttttgatatcacagttattacaattgactggatttcaaggcacctctactttgcactgaaagaatcacaaaatggaatgcaagtatttgatgttgatcttgaacacaaggtgaaatatcccagagaggtgaagattcacaataggaattcaacaataatttctttttctgtatatcctcttttaagtcgcttgtattggacagaagtttccaattttggctaccagatgttctactacagtattatcagtcacaccttgcaccgaattctgcaacccacagctacaaaccaacaaaacaaaaggaatcaatgttcttgtaatgtgactgaatttgagttaagtggagcaatggctattgatacctctaacctagagaaaccattgatatactttgccaaagcacaagagatctgggcaatggatctggaaggctgtcagtgttggagagttatcacagtacctgctatgctcgcaggaaaaacccttgttagcttaactgtggatggagatcttatatactggatcatcacagcaaaggacagcacacagatttatcaggcaaagaaaggaaatggggccatcgtttcccaggtgaaggccctaaggagtaggcatatcttggcttacagttcagttatgcagccttttccagataaagcgtttctgtctctagcttcagacactgtggaaccaactatacttaatgccactaacactagcctcacaatcagattacctctggccaagacaaacctcacatggtatggcatcaccagccctactccaacatacctggtttattatgcagaagttaatgacaggaaaaacagctctgacttgaaatatagaattctggaatttcaggacagtatagctcttattgaagatttacaaccattttcaacatacatgatacagatagctgtaaaaaattattattcagatcctttggaacatttaccaccaggaaaagagatttggggaaaaactaaaaatggagtaccagaggcagtgcagctcattaatacaactgtgcggtcagacaccagcctcattatatcttggagagaatctcacaagccaaatggacctaaagaatcagtccgttatcagttggcaatctcacacctggccctaattcctgaaactcctctaagacaaagtgaatttccaaatggaaggctcactctccttgttactagactgtctggtggaaatatttatgtgttaaaggttcttgcctgccactctgaggaaatgtggtgtacagagagtcatcctgtcactgtggaaatgtttaacacaccagagaaaccttattccttggttccagagaacactagtttgcaatttaattggaaggctccattgaatgttaacctcatcagattttgggttgagctacagaagtggaaatacaatgagttttaccatgttaaaacttcatgcagccaaggtcctgcttatgtctgtaatatcacaaatctacaaccttatacttcatataatgtcagagtagtggtggtttataagacgggagaaaatagcacctcacttccagaaagctttaagacaaaagctggagtcccaaataaaccaggcattcccaaattactagaagggagtaaaaattcaatacagtgggagaaagctgaagataatggatgtagaattacatactatatccttgagataagaaagagcacttcaaataatttacagaaccagaatttaaggtggaagatgacatttaatggatcctgcagtagtgtttgcacatggaagtccaaaaacctgaaaggaatatttcagttcagagtagtagctgcaaataatctagggtttggtgaatatagtggaatcagtgagaatattatattagttggagatgatttttggataccagaaacaagtttcatacttactattatagttggaatatttctggttgttacaatcccactgacctttgtctggcatagaagattaaagaatcaaaaaagtgccaaggaaggggtgacagtgcttataaacgaagacaaagagttggctgagctgcgaggtctggcagccggagtaggcctggctaatgcctgctatgcaatacatactcttccaacccaagaggagattgaaaatcttcctgccttccctcgggaaaaactgactctgcgtctcttgctgggaagtggagcctttggagaagtgtatgaaggaacagcagtggacatcttaggagttggaagtggagaaatcaaagtagcagtgaagactttgaagaagggttccacagaccaggagaagattgaattcctgaaggaggcacatctgatgagcaaatttaatcatcccaacattctgaagcagcttggagtttgtctgctgaatgaaccccaatacattatcctggaactgatggagggaggagaccttcttacttatttgcgtaaagcccggatggcaacgttttatggtcctttactcaccttggttgaccttgtagacctgtgtgtagatatttcaaaaggctgtgtctacttggaacggatgcatttcattcacagggatctggcagctngaaattgccttgtttccgtgaaagactataccagtccacggatagtgaagattggagactttggactcgccagagacatctataaaaatgattactatagaaagagaggggaaggcctgctcccagttcggtggatggctccagaaagtttgatggatggaatcttcactactcaatctgatgtatggtcttttggaattctgatttgggagattttaactcttggtcatcagccttatccagctcattccaaccttgatgtgttaaactatgtgcaaacaggagggagactggagccaccaagaaattgtcctgatgatctgtggaatttaatgacccagtgctgggctcaagaacccgaccaaagacctacttttcatagaattcagnaccaacttcagttattcagaaattttttcttaaatagcatttatnagtncagagatgaagcaaacaacagtggagtcataaatgaaagctttgaaggtgaagatggcgatgtgatttgtttgaattcagatgacattatgccagttgntttaatggaaacgaagaaccgagaagggttaaactatatggtacttgctacagaatgtggccaaggtgaagaaaagtctgagggtcctctaggctcccaggaatctgaatcttgtggtctgaggaaagaagagaaggaaccacatgcagacaaagatttctgccaagaaaaacaagtggcttactgcccttctggcaagcctgaaggcctgaactatgcctgtctcactcacagtggatatggagatgggtctgattaatagcgttgtttgggaaatagagagttgagataaacactctcattcagtagttactgaaagaaaactctgctagaatgataaatgtcatggtggtctataactccaaataaacaatgcaacgttcctgatttctaatcttggttctgagagccatttggtttcagttgtagcaatccccataccagctgcctgnc

SEQ ID NO: 422047 - DNA, 809 bp, Homo sapiens
gaattttatgtattgatacttttacttctcgttttattagaaaaaactttcgtgtacacccacccagcagtgcattgaaaatcttcctgccttccctcgggaaaaactgactctgcgtctcttgctgggaagtggagcctttggagaagtgtatgaaggaacagcagtggacatcttaggagttggaagtggagaaatcaaagtagcagtgaagactttgaagaagggttccacagaccaggagaagattgaattcctgaaggaggcacatctgatgagcaaatttaatcatcccaacattctgaagcagcttggagtttgtctgctgaatgaaccccaatacattatcctggaactgatggagggaggagaccttcttacttatttgcgtaaagcccggatggcaacgttttatggtcctttactcaccttggttgaccttgtagacctgtgtgtagatatttcaaaaggctgtgtctacttggaacggatgcatttcattcacagggatctggctgtttgcaaccgcctcttttccgcgaaattctttccgattcccgtttaatgcaccattgtcatatttgcgctagctccatacctttcttcaccgtttccattgcaaatagagggaagccctgttcccacatcgttggatggttttataactctattgaattctttgtaactatttgccttcctctcgggcgtttcggctcggcatctcgaaatttgtactgttggatttcgcttatctggtcttgtcgtccgttccttctctccctgtcccatggtaaataactttatttacg

SEQ ID NO: 422048 - DNA, 5971 bp, Homo sapiens
ccgcattcaagctttcaagcattcaaaggtctaaatgaaaaaggctaagtattatttcaaaaggcaagtatatcctaatatagcaaaacaaacaaagcaaaatccatcagctactcctccaattgaagtgatgaagcccaaataattcatatagcaaaatggagaaaattagaccggccatctaaaaatctgccattggtgaagtgatgaagaacatttactgtcttattccgaagcttgtcaattttgcaactcttggctgcctatggatttctgtggtgcagtgtacagttttaaatagctgcctaaagtcgtgtgtaactaatctgggccagcagcttgaccttggcacaccacataatctgagtgaaccgtgtatccaaggatgtcacttttggaactctgtagatcagaaaaactgtgctttaaagtgtcgggagtcgtgtgaggttggctgtagcagcgcggaaggtgcatatgaagaggaagtactggaaaatgcagacctaccaactgctccctttgcttcttccattggaagccacaatatgacattacgatggaaatctgcaaacttctctggagtaaaatacatcattcagtggaaatatgcacaacttctgggaagctggacttatactaagactgtgtccagaccgtcctatgtggtcaagcccctgcaccccttcactgagtacattttccgagtggtttggatcttcacagcgcagctgcagctctactcccctccaagtcccagttacaggactcatcctcatggagttcctgaaactgcacctttgattaggaatattgagagctcaagtcccgacactgtggaagtcagctgggatccacctcaattcccaggtggacctattttgggttataacttaaggctgatcagcaaaaatcaaaaattagatgcagggacacagagaaccagtttccagttttactccactttaccaaatactatctacaggttttctattgcagcagtaaatgaagttggtgagggtccagaagcagaatctagtattaccacttcatcttcagcagttcaacaagaggaacagtggctctttttatccagaaaaacttctctaagaaagagatctttaaaacatttagtagatgaagcacattgccttcggttggatgctatataccataatattacaggaatatctgttgatgtccaccagcaaattgtttatttctctgaaggaactctcatatgggcgaagaaggctgccaacatgtctgatgtatctgacctgagaattttttacagaggttcaggattaatttcttctatctccatagattggctttatcaaagaatgtatttcatcatggatgaactggtatgtgtctgtgatttagagaactgctcaaacatcgaggaaattactccaccctctattagtgcacctcaaaaaattgtggctgattcatacaatgggtatgtcttttacctcctgagagatggcatttatagagcagaccttcctgtaccatctggccggtgtgcagaagctgtgcgtattgtggagagttgcacgttaaaggactttgcaatcaagccacaagccaagcgaatcatttacttcaatgacactgcccaagtcttcatgtcaacatttctggatggctctgcttcccatctcatcctacctcgcatcccctttgctgatgtgaaaagttttgcttgtgaaaacaatgactttcttgtcacagatggcaaggtcattttccaacaggatgctttgtcttttaatgaattcatcgtgggatgtgacctgagtcacatagaagaatttgggtttggtaacttggtcatctttggctcatcctcccagctgcaccctctgccaggccgcccgcaggagctttcggtgctgtttggctctcaccaggctcttgttcaatggaagcctcctgcccttgccataggagccaatgtcatcctgatcagtgatattattgaactctttgaattaggcccttctgcctggcagaactggacctatgaggtgaaagtatccacccaagaccctcctgaagtcactcatattttcttgaacataagtggaaccatgctgaatgtacctgagctgcagagtgctatgaaatacaaggtttctgtgagagcaagttctccaaagaggccaggcccctggtcagagccctcagtgggtactaccctggtgccagctagtgaaccaccatttatcatggctgtgaaagaagatgggctttggagtaaaccattaaatagctttggcccaggagagttcttatcctctgatataggaaatgtgtcagacatggattggtataacaacagcctctactacagtgacacgaaaggcgacgtttttgtgtggctgctgaatgggacggatatctcagagaattatcacctacccagcattgcaggagcaggggctttagcttttgagtggctgggtcactttctctactgggctggaaagacatatgtgatacaaaggcagtctgtgttgacgggacacacagacattgttacccacgtgaagctattggtgaatgacatggtggtggattcagttggtggatatctctactggaccacactctattcagtggaaagcaccagactaaatggggaaagttcccttgtactacagacacagccttggttttctgggaaaaaggtaattgctctaactttagacctcagtgatgggctcctgtattggttggttcaagacagtcaatgtattcacctgtacacagctgttcttcggggacagagcactggggataccaccatcacagaatttgcagcctggagtacttctgaaatttcccagaatgcactgatgtactatagtggtcggctgttctggatcaatggctttaggattatcacaactcaagaaataggtcagaaaaccagtgtctctgttttggaaccagccagatttaatcagttcacaattattcagacatcccttaagcccctgccagggaacttttcctttacccctaaggttattccagattctgttcaagagtcttcatttaggattgaaggaaatgcttcaagttttcaaatcctgtggaatggtccccctgcggtagactggggtgtagttttctacagtgtagaatttagtgctcattctaagttcttggctagtgaacaacactctttacctgtatttactgtggaaggactggaaccttatgccttatttaatctttctgtcactccttatacctactggggaaagggccccaaaacatctctgtcacttcgagcacctgaaacagttccatcagcaccagagaaccccagaatatttatattaccaagtggaaaatgctgcaacaagaatgaagttgtggtggaatttaggtggaacaaacctaagcatgaaaatggggtgttaacaaaatttgaaattttctacaatatatccaatcaaagtattacaaacaaaacatgtgaagactggattgctgtcaatgtcactccctcagtgatgtcttttcaacttgaaggcatgagtcccagatgctttattgccttccaggttagggcctttacatctaaggggccaggaccatatgctgacgttgtaaagtctacaacatcagaaatcaacccatttcctcacctcataactcttcttggtaacaagatagtttttttagatatggatcaaaatcaagttgtgtggacgttttcagcagaaagagttatcagtgccgtttgctacacagctgataatgagatgggatattatgctgaaggggactcactctttcttctgcacttgcacaatcgctctagctctgagcttttccaagattcactggtttttgatatcacagttattacaattgactggatttcaaggcacctctactttgcactgaaagaatcacaaaatggaatgcaagtatttgatgttgatcttgaacacaaggtgaaatatcccagagaggtgaagattcacaataggaattcaacaataatttctttttctgtatatcctcttttaagtcgcttgtattggacagaagtttccaattttggctaccagatgttctactacagtattatcagtcacaccttgcaccgaattctgcaacccacagctacaaaccaacaaaacaaaaggaatcaatgttcttgtaatgtgactgaatttgagttaagtggagcaatggctattgatacctctaacctagagaaaccattgatatactttgccaaagcacaagagatctgggcaatggatctggaaggctgtcagtgttggagagttatcacagtacctgctatgctcgcaggaaaaacccttgttagcttaactgtggatggagatcttatatactggatcatcacagcaaaggacagcacacagatttatcaggcaaagaaaggaaatggggccatcgtttcccaggtgaaggccctaaggagtaggcatatcttggcttacagttcagttatgcagccttttccagataaagcgtttctgtctctagcttcagacactgtggaaccaactatacttaatgccactaacactagcctcacaatcagattacctctggccaagacaaacctcacatggtatggcatcaccagccctactccaacatacctggtttattatgcagaagttaatgacaggaaaaacagctctgacttgaaatatagaattctggaatttcaggacagtatagctcttattgaagatttacaaccattttcaacatacatgatacagatagctgtaaaaaattattattcagatcctttggaacatttaccaccaggaaaagagatttggggaaaaactaaaaatggagtaccagaggcagtgcagctcattaatacaactgtgcggtcagacaccagcctcattatatcttggagagaatctcacaagccaaatggacctaaagaatcagtccgttatcagttggcaatctcacacctggccctaattcctgaaactcctctaagacaaagtgaatttccaaatggaaggctcactctccttgttactagactgtctggtggaaatatttatgtgttaaaggttcttgcctgccactctgaggaaatgtggtgtacagagagtcatcctgtcactgtggaaatgtttaacacaccagagaaaccttattccttggttccagagaacactagtttgcaatttaattggaaggctccattgaatgttaacctcatcagattttgggttgagctacagaagtggaaatacaatgagttttaccatgttaaaacttcatgcagccaaggtcctgcttatgtctgtaatatcacaaatctacaaccttatacttcatataatgtcagagtagtggtggtttataagacgggagaaaatagcacctcacttccagaaagctttaagacaaaagctggagtcccaaataaaccaggcattcccaaattactagaagggagtaaaaattcaatacagtgggagaaagctgaagataatggatgtagaattacatactatatccttgagataagggactgaaaacacaccgtcgatgaaaaccagccactgatgaacagcctcagacctggccagtacggggagcacgtgaaccataactggcttagaaggactgatttcatgccaacttgaggggagaattccaaattccaaagacactcctctcacaggactatgaaaccatcttttaagaagttccaaggacaaaagtcacttccataattatagtcctggcaacttgatctttagatctatttttgcttcatctggctctggcattcccataaccttaaaaaatgttcctgttcatactagagaattcccttggcccttatttctaattgaaacctccttgaagtttctgttgctgcttttcatgcagagtgaaatacattctaacctgcagaactgtc

SEQ ID NO: 422049 - DNA, 1919 bp, Homo sapiens
ggcctggagacagccgagagccgccttcaaggagggctgggggcggggctagaggaggggctgggggcgggtttcccgatgaaggggcggccatggcagctgcgcagaggcaacgcaggctgctacggagcgcgcgcccggctttgaatgagcggggctgggagtgagcgggcggagcgcgagctcgaggaagagacaggcagcgcgcgtgagcgcgccttgtgtgcgcgcgcggcccgcggcagctcggagcctccgccgggcgggcggggagggggaggggcaggttttgattcccaccatggccatcacccagtttcggttatttaaattttgtacctgcctagcaacagtattctcattcctaaagagattaatatgcagatctggcagaggacggaaattaagtggagaccaaataactttgccaactacagttgattattcatcagttcctaagcagacagatgttgaagagtggacttcctgggatgaagatgcacccaccagtgtaaagatcgaaggagggaatgggaatgtggcaacacaacaaaattctttggaacaactggaacctgactattttaaggacatgacaccaactattaggaaaactcagaaaattgttattaagaagagagaaccattgaattttggcatcccagatgggagcacaggtttctctagtagattagcagctacacaagatctgccttttattcatcagtcttctgaattaggtgacttagatacctggcaggaaaataccaatgcatgggaagaagaagaagatgcagcctggcaagcagaagaagttctgagacagcagaaactagcagacagagaaaagagagcagccgaacaacaaaggaagaaaatggaaaaggaagcacaacggctaatgaagaaggaacaaaacaaaattggtgtgaaactttcataacacatgttcaaattttatcatgccagtaggagaaatctcagctccacaacccaagcaacatttgtatggatttaagagtattttaagaagacatactgcttgattttaatacattgatcaggccatccaggacaccacgattctcccaaagtaccttgaactcttagtgattgagactcaaaaaaacaaaaaagacttgagacaatgttttcttcaacatgctccaaatataagacatttgtttgctgtacagaaagtatcacaaatggaatatatcagtacctctcaagctagtgtttctagctaaataaatgggtgtatataattttatggtggaaaagaactgtactgtctgttatgatttccttcaatgtgcataatgataaaataaataattttaatattcttttgtttccatggttacctgacctaaattagataaattgtagggctttagctttcttatttttgtcaaaagttggtgttgacatacattccctctaatttgaactggtattgtttacgtttgatacaacattaaggaatttgatgattttcatttcatgaaaatgacattaaatgcaataattttacttatcataaacattttgtacatcattattttcttttggattagtgttgtcatacatgtaatttatatcacatgtataaacattgaaaatcaactaaaatgacatttgttctacattataacttgtgagtttcaagaactagtattagtagttttttcctttcattatagattgtaagatgttgtggtatctttgagtgccttagttcttccttcctcccaaaagccattaatttacaaatgcttaaagccatcaggtcaaatatttcaaagcctttagatgatttctgtactagctttagatgtctgacgttatgtaggttacctgtgttcttggctaggaaaacattattgattcattaaatcataaaggtgggaataata

SEQ ID NO: 422050 - DNA, 1734 bp, Homo sapiens
catggcacagaatgttcgattttactaccagctctcacactccgcttctgtttccccttctcttacgggccgctgctcaaacctttatttatcaaatttaagttttgattcccaccatggccatcacccagtttcggttatttaaattttgtacctgcctagcaacagtattctcattcctaaagagattaatatgcagatctggcagaggacggaaattaagtggagaccaaataactttgccaactacagttgattattcatcagttcctaagcagacagatgttgaagagtggacttcctgggatgaagatgcacccaccagtgtaaagatcgaaggagggaatgggaatgtggcaacacaacaaaattctttggaacaactggaacctgactattttaaggacatgacaccaactattaggaaaactcagaaaattgttattaagaagagagaaccattgaattttggcatcccagatgggagcacaggtttctctagtagattagcagctacacaagatctgccttttattcatcagtcttctgaattaggtgacttagatacctggcaggaaaataccaatgcatgggaagaagaagaagatgcagcctggcaagcagaagaagttctgagacagcagaaactagcagacagagaaaagagagcagccgaacaacaaaggaagaaaatggaaaaggaagcacaacggctaatgaagaaggaacaaaacaaaattggtgtgaaactttcataacacatgttcaaattttatcatgccagtaggagaaatctcagctccacaacccaagcaacatttgtatggatttaagagtattttaagaagacatactgcttgattttaatacattgatcaggccatccaggacaccacgattctcccaaagtaccttgaactcttagtgattgagactcaaaaaaacaaaaaagacttgagacaatgttttcttcaacatgctccaaatataagacatttgtttgctgtacagaaagtatcacaaatggaatatatcagtacctctcaagctagtgtttctagctaaataaatgggtgtatataattttatggtggaaaagaactgtactgtctgttatgatttccttcaatgtgcataatgataaaataaataattttaatattcttttgtttccatggttacctgacctaaattagataaattgtagggctttagctttcttatttttgtcaaaagttggtgttgacatacattccctctaatttgaactggtattgtttacgtttgatacaacattaaggaatttgatgattttcatttcatgaaaatgacattaaatgcaataattttacttatcataaacattttgtacatcattattttcttttggattagtgttgtcatacatgtaatttatatcacatgtataaacattgaaaatcaactaaaatgacatttgttctacattataacttgtgagtttcaagaactagtattagtagttttttcctttcattatagattgtaagatgttgtggtatctttgagtgccttagttcttccttcctcccaaaagccattaatttacaaatgcttaaagccatcaggtcaaatatttcaaagcctttagatgatttctgtactagctttagatgtctgacgttatgtaggttacctgtgttcttggctaggaaaacattattgattcattaaatcataaaggtgggaataata

SEQ ID NO: 422051 - DNA, 1504 bp, Homo sapiens
  misc_feature (234)..(234): n is a, c, g, or t
tgcaaaaatcaatggttctctcttcttaataccaattttctgagttttcttaatagtggtgtcgatgtcgttaaaatagtcaggttccagttgttccaaagaattatgttgtgttgcgacattcgcattccctccttcgatctttacactggtgggtgcatcttcatcccaggaagtccactcttcaacatctgtctgcttaggaactgatgaataatcaactgtagttggcanagttatttggtctccacttaatttccgtcctctgccagatctgcatattaatctctttaggaatgagaatactgttgctaggcaggtacaaaatttaaataaccgaaactgggtgatggcaatgcatgggaagaagaagaagatgcagcctggcaagcagaagaagttctgagacagcagaaactagcagacagagaaaagagagcagccgaacaacaaaggaagaaaatggaaaaggaagcacaacggctaatgaagaaggaacaaaacaaaattggtgtgaaactttcataacacatgttcaaattttatcatgccagtaggagaaatctcagctccacaacccaagcaacatttgtatggatttaagagtattttaagaagacatactgcttgattttaatacattgatcaggccatccaggacaccacgattctcccaaagtaccttgaactcttagtgattgagactcaaaaaaacaaaaaagacttgagacaatgttttcttcaacatgctccaaatataagacatttgtttgctgtacagaaagtatcacaaatggaatatatcagtacctctcaagctagtgtttctagctaaataaatgggtgtatataattttatggtggaaaagaactgtactgtctgttatgatttccttcaatgtgcataatgataaaataaataattttaatattcttttgtttccatggttacctgacctaaattagataaattgtagggctttagctttcttatttttgtcaaaagttggtgttgacatacattccctctaatttgaactggtattgtttacgtttgatacaacattaaggaatttgatgattttcatttcatgaaaatgacattaaatgcaataattttacttatcataaacattttgtacatcattattttcttttggattagtgttgtcatacatgtaatttatatcacatgtataaacattgaaaatcaactaaaatgacatttgttctacattataacttgtgagtttcaagaactagtattagtagttttttcctttcattatagattgtaagatgttgtggtatctttgagtgccttagttcttccttcctcccaaaagccattaatttacaaatgcttaaagccatcaggtcaaatatttcaaagcctttagatgatttctgtactagctttagatgtctgacgttatgtaggttacctgtgttcttggctaggaaaacattattgattcattaaatcataaaggtgggaataata

SEQ ID NO: 422052 - DNA, 1347 bp, Homo sapiens
gcctttatgcctcattttacttatttgtaaaatagagataatatttcttctatttcacaagtcacgttctaaggactaagagaaatcctgtttttgaaaatatttggaattttcaaattagtgagaaaattttaagactttcaacattttatttggtgataataaaaaggcactgctatttctttctagaatttatttgccattttacctgtttggtattttctaaaagtaaaagtatgtttcttttcagacagcagaaactagcagacagagaaaagagagcagccgaacaacaaaggaagaaaatggaaaaggaagcacaacggctaatgaagaaggaacaaaacaaaattggtgtgaaactttcataacacatgttcaaattttatcatgccagtaggagaaatctcagctccacaacccaagcaacatttgtatggatttaagagtattttaagaagacatactgcttgattttaatacattgatcaggccatccaggacaccacgattctcccaaagtaccttgaactcttagtgattgagactcaaaaaaacaaaaaagacttgagacaatgttttcttcaacatgctccaaatataagacatttgtttgctgtacagaaagtatcacaaatggaatatatcagtacctctcaagctagtgtttctagctaaataaatgggtgtatataattttatggtggaaaagaactgtactgtctgttatgatttccttcaatgtgcataatgataaaataaataattttaatattcttttgtttccatggttacctgacctaaattagataaattgtagggctttagctttcttatttttgtcaaaagttggtgttgacatacattccctctaatttgaactggtattgtttacgtttgatacaacattaaggaatttgatgattttcatttcatgaaaatgacattaaatgcaataattttacttatcataaacattttgtacatcattattttcttttggattagtgttgtcatacatgtaatttatatcacatgtataaacattgaaaatcaactaaaatgacatttgttctacattataacttgtgagtttcaagaactagtattagtagttttttcctttcattatagattgtaagatgttgtggtatctttgagtgccttagttcttccttcctcccaaaagccattaatttacaaatgcttaaagccatcaggtcaaatatttcaaagcctttagatgatttctgtactagctttagatgtctgacgttatgtaggttacctgtgttcttggctaggaaaacattattgattcattaaatcataaaggtgggaataata

SEQ ID NO: 422053 - DNA, 919 bp, Homo sapiens
ggcctggagacagccgagagccgccttcaaggagggctgggggcggggctagaggaggggctgggggcgggtttcccgatgaaggggcggccatggcagctgcgcagaggcaacgcaggctgctacggagcgcgcgcccggctttgaatgagcggggctgggagtgagcgggcggagcgcgagctcgaggaagagacaggcagcgcgcgtgagcgcgccttgtgtgcgcgcgcggcccgcggcagctcggagcctccgccgggcgggcggggagggggaggggcaggttttgattcccaccatggccatcacccagtttcggttatttaaattttgtacctgcctagcaacagtattctcattcctaaagagattaatatgcagatctggcagaggacggaaattaagtggagaccaaataactttgccaactacagttgattattcatcagttcctaagcagacagatgttgaagagtggacttcctgggatgaagatgcacccaccagtgtaaagatcgaaggagggaatgggaatgtggcaacacaacaaaattctttggaacaactggaacctgactattttaaggacatgacaccaactattaggaaaactcagaaaattgttattaagaagagagaaccattgaattttggcatcccagatgggagcacaggtttctctagtagattagcagctacacaagatctgccttttattcatcagtctacaagtcattgggttggggctacaatcatctgaaggcttgattgtggtcgaaggattcatttcaaagacagctcacttctacacctgacaaattaatgctgtttgtttgcacaaagcctcagttccttgctgtgcacctctccaaggagctgcttgaatttctttatgatgtaactcctgattttccca

SEQ ID NO: 422054 - DNA, 394 bp, Homo sapiens
gtaaataagttttatgttcaaactaacctgtttatctcctcgctggttttggataccttcaaaacttcaaatttcgtggacaggacaggttatatttaagctgaatatcttgattgcagtatttattcattaattcctagtcatttttaaatactttttctctacttcagatctagaaaatagaggttcagttgttttgttcattcaaattcttacactttccactaaaataacatgcttaatactatttaggaatagacagaccaactttcattattataatcatcacagaactttgatgtattcgtttcattatgggaatgttttaaagtggttaggtgaaattcggaataggtatttctgtctatactacaatagtgttgtttttatattt

SEQ ID NO: 422055 - DNA, 312 bp, Homo sapiens
gttttatccttacaaccattgaaaactcgaaaacctggtttttgacttgttaatatgatttaaattataattttaaaatttactgtgttatagtttctagagaaaggtaaaaaatatcttagatttttcttagtgcataataggtcttttcaggacaggagtatgacttttgaaatcaatttaatgcattttttgttttgtgcctcttccacaggttttgattcccaccatggccatcacccagtttcggttatttaaattttgtacctgcctagcaacagtattctcattcctaaagagattaatatgcag

SEQ ID NO: 422056 - DNA, 2021 bp, Homo sapiens
tccaccagacctccctcgacgcccgacagctgctctgggtactgtttccgggtcagggtgacctctggggtgaggaaactgcgactgggagcgggacccaggcgtgcagcattcgccatgctccgctcacgcgtgggagactgggctgtggggtaccggcccggaaagcacgcagcctccaaagccgccttcctcagggaaatttgcgtgaccttactgccctccgtctacaggccttgtacctctccaggccgatttttccacaatttaaatcccagttcacctggtatccagctccagcaacttagagcgtttcacgtcacgccgggcgccaggcgtcggcttgtataacctgaaaacgctcctgtttttctcatctgtgcagtgggttttgattcccaccatggccatcacccagtttcggttatttaaattttgtacctgcctagcaacagtattctcattcctaaagagattaatatgcagatctggcagaggacggaaattaagtggagaccaaataactttgccaactacagttgattattcatcagttcctaagcagacagatgttgaagagtggacttcctgggatgaagatgcacccaccagtgtaaagatcgaaggagggaatgggaatgtggcaacacaacaaaattctttggaacaactggaacctgactattttaaggacatgacaccaactattaggaaaactcagaaaattgttattaagaagagagaaccattgaattttggcatcccagatgggagcacaggtttctctagtagattagcagctacacaagatctgccttttattcatcagtcttctgaattaggtgacttagatacctggcaggaaaataccaatgcatgggaagaagaagaagatgcagcctggcaagcagaagaagttctgagacagcagaaactagcagacagagaaaagagagcagccgaacaacaaaggaagaaaatggaaaaggaagcacaacggctaatgaagaaggaacaaaacaaaattggtgtgaaactttcataacacatgttcaaattttatcatgccagtaggagaaatctcagctccacaacccaagcaacatttgtatggatttaagagtattttaagaagacatactgcttgattttaatacattgatcaggccatccaggacaccacgattctcccaaagtaccttgaactcttagtgattgagactcaaaaaaacaaaaaagacttgagacaatgttttcttcaacatgctccaaatataagacatttgtttgctgtacagaaagtatcacaaatggaatatatcagtacctctcaagctagtgtttctagctaaataaatgggtgtatataattttatggtggaaaagaactgtactgtctgttatgatttccttcaatgtgcataatgataaaataaataattttaatattcttttgtttccatggttacctgacctaaattagataaattgtagggctttagctttcttatttttgtcaaaagttggtgttgacatacattccctctaatttgaactggtattgtttacgtttgatacaacattaaggaatttgatgattttcatttcatgaaaatgacattaaatgcaataattttacttatcataaacattttgtacatcattattttcttttggattagtgttgtcatacatgtaatttatatcacatgtataaacattgaaaatcaactaaaatgacatttgttctacattataacttgtgagtttcaagaactagtattagtagttttttcctttcattatagattgtaagatgttgtggtatctttgagtgccttagttcttccttcctcccaaaagccattaatttacaaatgcttaaagccatcaggtcaaatatttcaaagcctttagatgatttctgtactagctttagatgtctgacgttatgtaggttacctgtgttcttggctaggaaaacattattgattcattaaatcataaaggtgggaataata

SEQ ID NO: 422057 - DNA, 2195 bp, Homo sapiens
gtactcctaggtattggcatttctttaatagattcccagatttgtgaaccactggactaaatgagctccatggtaactttcaatttactagctatgtgactttggtcaagttatttgacctctcttaattcaatttcctcatctataaaatggatataaggaaatatattcatctgcaagttaaaaatatttaaagtattttaaatagtattatgttcatgtggttcaaactttaaaaggtacacagagatttaatatattctattttatacttttttattttttgaattgtagatttttgtattaatagatttaggtaaaattattttcaaaaactcagaatgaagggttttatccttacaaccattgaaaactcgaaaacctggtttttgacttgttaatatgatttaaattataattttaaaatttactgtgttatagtttctagagaaaggtaaaaaatatcttagatttttcttagtgcataataggtcttttcaggacaggagtatgacttttgaaatcaatttaatgcattttttgttttgtgcctcttccacaggttttgattcccaccatggccatcacccagtttcggttatttaaattttgtacctgcctagcaacagtattctcattcctaaagagattaatatgcagatctggcagaggacggaaattaagtggagaccaaataactttgccaactacagttgattattcatcagttcctaagcagacagatgttgaagagtggacttcctgggatgaagatgcacccaccagtgtaaagatcgaaggagggaatgggaatgtggcaacacaacaaaattctttggaacaactggaacctgactattttaaggacatgacaccaactattaggaaaactcagaaaattgttattaagaagagagaaccattgaattttggcatcccagatgggagcacaggtttctctagtagattagcagctacacaagatctgccttttattcatcagtcttctgaattaggtgacttagatacctggcaggaaaataccaatgcatgggaagaagaagaagatgcagcctggcaagcagaagaagttctgagacagcagaaactagcagacagagaaaagagagcagccgaacaacaaaggaagaaaatggaaaaggaagcacaacggctaatgaagaaggaacaaaacaaaattggtgtgaaactttcataacacatgttcaaattttatcatgccagtaggagaaatctcagctccacaacccaagcaacatttgtatggatttaagagtattttaagaagacatactgcttgattttaatacattgatcaggccatccaggacaccacgattctcccaaagtaccttgaactcttagtgattgagactcaaaaaaacaaaaaagacttgagacaatgttttcttcaacatgctccaaatataagacatttgtttgctgtacagaaagtatcacaaatggaatatatcagtacctctcaagctagtgtttctagctaaataaatgggtgtatataattttatggtggaaaagaactgtactgtctgttatgatttccttcaatgtgcataatgataaaataaataattttaatattcttttgtttccatggttacctgacctaaattagataaattgtagggctttagctttcttatttttgtcaaaagttggtgttgacatacattccctctaatttgaactggtattgtttacgtttgatacaacattaaggaatttgatgattttcatttcatgaaaatgacattaaatgcaataattttacttatcataaacattttgtacatcattattttcttttggattagtgttgtcatacatgtaatttatatcacatgtataaacattgaaaatcaactaaaatgacatttgttctacattataacttgtgagtttcaagaactagtattagtagttttttcctttcattatagattgtaagatgttgtggtatctttgagtgccttagttcttccttcctcccaaaagccattaatttacaaatgcttaaagccatcaggtcaaatatttcaaagcctttagatgatttctgtactagctttagatgtctgacgttatgtaggttacctgtgttcttggctaggaaaacattattgattcattaaatcataaaggtgggaataata

SEQ ID NO: 422058 - DNA, 358 bp, Homo sapiens
aaaaaaatacagttttaaaaagtaacgtgtttttttcccttgcctttctgatgatagatgtatcagttaggatgctcttggttgtgagtcacagacaacttgatataaatctagttaaatcataagaaagactccagaagtagggcaggctccaaggtgagtataacccagccccagggctgacacggggacctcgatttgctctgtctccaactccatcctcagcagcctggacgcaccctgaggcccaagcctgctgaggtcaccagatggccagtgtcacatgcatcctcatgtcagccagcaggaaggagcagtcctaggagagatgggatgccttcaactggaagcagatatt

SEQ ID NO: 422059 - DNA, 892 bp, Homo sapiens
gcggccgcggcggtggcggagactgtggctttaagagcgtgccgggagcccgagccccagccgggccgcgcttcgccgctgcgcaccccagcggagccaagccccacgctggccggacagggccgcctgtcgccggtcattccaaggaagtcaaggacgagcatacctctttaactcagtagttaatgtgggctgtgggcctgcagaagagcgagtgttgctaacaggactgcatgcagtcgcagacatttactgtgaaaactgcaaaaccactctgggctggaaatacgaacatgcttttgaaagcagccagaaatataaagaaggcaaatacatcattgaactagcacacatgatcaaggacaatggctgggactgattggacagcatctacccaacccagtgtccacgtgaacgccattcaaccgaacattcttcccaagcgtgagagagtgactgacacttggttccatccatttaggggccttgccatccggggcatcctcccaccctgacgccatctttctggtgaccggcctctaaatcgctgtctctctgtctctttgctttgtatctgtttgtgagttgatcctggcttctctctctgttctagttttggctgaaaacaaaacaacaaaaggaacagatccttgaccgcatggcggcagcccaccttggtaagggccccagggcccatgcgagagctgcctgatggcctcttgtcaggagagcagtggcacgggggcgtgaggaagagggaaaggggaaactctaagggtcctggcgcggggaaggggtggaagggtggaggtaggaacaaaattgcgccgctcctggagacctgataacttaggcttgaaataattgacttgtctaaaaggacaaagagaaa

SEQ ID NO: 422060 - DNA, 488 bp, Homo sapiens
cggtgactatccagtgagccttcagtgggtgcaaggcgccatacttgctgtgagagagctgagtagagtgttggtttttccataactacagggggaaaaaaagtcattaggctttccctttgtgtcagtgaaaccaaaagtgcttcttacaacgttcgctctgttcatgggttgtctatctaacattgagcagcattggagaggccacagctgagctatggagatgctaaattaactcatggcctcagtcagttcattctttaatttcctcaccaaattattgacttagagcataaccaaagacctcattcattcaccccaggtgggttggggtaattggagtttgttggtgaagtttgggggcggggtgttgggagtagagacagggtaaggggtggaagggtggaggtaggaacaaaattgcgccgctcctggagacctgataacttaggcttcaaataattgacttgtctaaaaggacaaagaga

SEQ ID NO: 422061 - DNA, 2326 bp, Homo sapiens
gcggccgcggcggtggcggagactgtggctttaagagcgtgccgggagcccgagccccagccgggccgcgcttcgccgctgcgcaccccagcggagccaagccccacgctggccggacagggccgcctgtcgccgggctgctgagaactagccctagacctctgcgtgagggttcttctgccgaagacatcaccagtgtgtggagcctgccacacccacccgctgccaaaccacggcctttacctgtgtcttccggtgtttcccgtgcgacccatcctgtgggagtgcctcgtgggctgccccagagttcaccccacactcagcagcaccaatggtgaagatgacaagatcgaagactttccaggcatatctgccctcctgccaccggacctacagctgcattcactgcagagctcacttggccaatcatgatgaactaatttccaagtcattccaaggaagtcaaggacgagcatacctctttaactcagtagttaatgtgggctgtgggcctgcagaagagcgagtgttgctaacaggactgcatgcagtcgcagacatttactgtgaaaactgcaaaaccactctgggctggaaatacgaacatgcttttgaaagcagccagaaatataaagaaggcaaatacatcattgaactagcacacatgatcaaggacaatggctgggactgattggacagcatctacccaacccagtgtccacgtgaacgccattcaaccaaacacagccaaactcgatacccacaagctgtcagctgaacctgactgagtgttcttcctgagttcacgaggataggctagagtgcatttttactggtggatcagtgtgtgcgaaagagatgaccctttataaagagattttcaagtggatatatataaaagaaacagttgcttgtaaaatatacttttgtaaataatatttaattttttaaataatatatttggtgctgttttctcagatcccctgagagcactttttattttccttttaaattctatggtttcctttgcatttcttgaagtatattttaagggaaacagtgatcaccaatacatgttttcagttttttttttttttaaggtctctatcactttaatctggatcaaggctttgaagcaatgcctctctgcattttttccccagtggaacagactctgcagtacattaatcaggttgagaattgaaatattttcttgcatcagtattggctagaaaagaaaataaataaaaccaagttaatttagtagtaacaacttacagtgattcttcctgttggaagaatttccaacaaatcagaatcacgtttttagttgtgcgtgtgcgcgcacacgtgtgtaaaaagcactttcgattgtgcctcctgttttctcgagtggggacactttaactacagtttacacctcgggcgcataaagtttttcttctctttctctctggttgtttctgtttctgagtggaccaacagcagaacccacgaggatttgttttgagtatggagctgttgcgggtttgctcctttttcttgctttgcgtgctcagtttttacagactgtaaaggagatgtgttgtttgtgaagatggagcagagtcaaatctgtgcttctaactgagatgagagtgtattaatcacgtatcgcagggctccagctgttttagaagccacatcatgttaaacattaactggtttggattaaaagaacattaatattataatacacatatcttagtggtaaacagctttttttttttaaggtcagattgcctcaggtttagaaagaggctgagaaatcaaatcttgaacacaatcaacttacatattttaaaggaatctgcctcaaatgagaaaatatgctagttatctagatagaggaaagagatatttacttttttaaaaattaaaatagttatgaaatctggcagaaaaggtaaagcctagaagaaactatgaaagctattctcatgttaccaaattctatctgcgcatatgtttttgtataacatttcggtgacagtgggagtcggttccctttcccaacctgcagagactatcttccaatacagaatctgtctatttatgcttgtgtttacaaactgtatttgttgggtttgggtttttgttttctttggtggcatttttcaggtcactttgcttctataacaaaggtaattgttttcaaataatttgtcttcaccttttcctgtatttgtacatagtgattcagtattagagaaaagtgcattgtttctgtcatatttccaatctgtgttggtgctcatttgagaaaataaaagttttcaaatattaa

SEQ ID NO: 422062 - DNA, 2463 bp, Homo sapiens
gcggccgcggcggtggcggagactgtggctttaagagcgtgccgggagcccgagccccagccgggccgcgcttcgccgctgcgcaccccagcggagccaagccccacgctggccggacagggccgcctgtcgccgggctgctgagaactagccctagacctctgcgtgagggttcttctgccgaagacatcaccagtgtgtggagcctgccacacccacccgctgccaaaccacggcctttacctgtgtcttccggtgtttcccgtgcgacccatcctgtgggagtgcctcgtgggctgccccagagttcaccccacactcagcagcaccaatggtgaagatgacaagatcgaagactttccaggcatatctgccctcctgccaccggacctacagctgcattcactgcagagctcacttggccaatcatgatgaactaatttccaagtctatctaacattgagcagcattggagaggccacagctgagctatggagatgctaaattaactcatggcctcagtcagttcattctttaatttcctcaccaaattattgacttagagcataaccaaagacctcattcattcaccccaggtgggttggggtaattggagtttgttggtgaagtttgggggcggggtgttgggagtagagacagggtaaggggacgtgagaaaggaaaaggcatgaagttctatacctcagccagcagctgccttcgtttggaactgaagtccagccagcagactctctagctccatctcccctgtgccaccctaggtcatatgaccttggccaccttggagtagacccagacccctcgggacccgggacattagtctcaggctgctgatggattgatttgacatgaaccaaacacagccaaactcgatacccacaagctgtcagctgaacctgactgagtgttcttcctgagttcacgaggataggctagagtgcatttttactggtggatcagtgtgtgcgaaagagatgaccctttataaagagattttcaagtggatatatataaaagaaacagttgcttgtaaaatatacttttgtaaataatatttaattttttaaataatatatttggtgctgttttctcagatcccctgagagcactttttattttccttttaaattctatggtttcctttgcatttcttgaagtatattttaagggaaacagtgatcaccaatacatgttttcagttttttttttttttaaggtctctatcactttaatctggatcaaggctttgaagcaatgcctctctgcattttttccccagtggaacagactctgcagtacattaatcaggttgagaattgaaatattttcttgcatcagtattggctagaaaagaaaataaataaaaccaagttaatttagtagtaacaacttacagtgattcttcctgttggaagaatttccaacaaatcagaatcacgtttttagttgtgcgtgtgcgcgcacacgtgtgtaaaaagcactttcgattgtgcctcctgttttctcgagtggggacactttaactacagtttacacctcgggcgcataaagtttttcttctctttctctctggttgtttctgtttctgagtggaccaacagcagaacccacgaggatttgttttgagtatggagctgttgcgggtttgctcctttttcttgctttgcgtgctcagtttttacagactgtaaaggagatgtgttgtttgtgaagatggagcagagtcaaatctgtgcttctaactgagatgagagtgtattaatcacgtatcgcagggctccagctgttttagaagccacatcatgttaaacattaactggtttggattaaaagaacattaatattataatacacatatcttagtggtaaacagctttttttttttaaggtcagattgcctcaggtttagaaagaggctgagaaatcaaatcttgaacacaatcaacttacatattttaaaggaatctgcctcaaatgagaaaatatgctagttatctagatagaggaaagagatatttacttttttaaaaattaaaatagttatgaaatctggcagaaaaggtaaagcctagaagaaactatgaaagctattctcatgttaccaaattctatctgcgcatatgtttttgtataacatttcggtgacagtgggagtcggttccctttcccaacctgcagagactatcttccaatacagaatctgtctatttatgcttgtgtttacaaactgtatttgttgggtttgggtttttgttttctttggtggcatttttcaggtcactttgcttctataacaaaggtaattgttttcaaataatttgtcttcaccttttcctgtatttgtacatagtgattcagtattagagaaaagtgcattgtttctgtcatatttccaatctgtgttggtgctcatttgagaaaataaaagttttcaaatattaa

SEQ ID NO: 422063 - DNA, 1204 bp, Homo sapiens
gcggccgcggcggtggcggagactgtggctttaagagcgtgccgggagcccgagccccagccgggccgcgcttcgccgctgcgcaccccagcggagccaagccccacgctggccggacagggccgcctgtcgccgggctgctgagaactagccctagacctctgcgtgagggttcttctgccgaagacatcaccagtgtgtggagcctgccacacccacccgctgccaaaccacggcctttacctgtgtcttccggtgtttcccgtgcgacccatcctgtgggagtgcctcgtgggctgccccagagttcaccccacactcagcagcaccaatggtgaagatgacaagatcgaagactttccaggcatatctgccctcctgccaccggacctacagctgcattcactgcagagctcacttggccaatcatgatgaactaatttccaagtcattccaaggaagtcaaggacgagcatacctctttaactcagtagttaatgtgggctgtgggcctgcagaagagcgagtgttgctaacaggactgcatgcagtcgcagacatttactgtgaaaactgcaaaaccactctgggctggaaatacgaacatgcttttgaaagcagccagaaatataaagaaggcaaatacatcattgaactagcacacatgatcaaggacaatggctgggactgattggacagcatctacccaacccagtgtccacgtgaacgccattcaaccgaacattcttcccaagcgtgagagagtgactgacacttggttccatccatttaggggccttgccatccggggcatcctcccaccctgacgccatctttctggtgaccggcctctaaatcgctgtctctctgtctctttgctttgtatctgtttgtgagttgatcctggcttctctctctgttctagttttggctgaaaacaaaacaacaaaaggaacagatccttgaccgcatggcggcagcccaccttggtaagggccccagggcccatgcgagagctgcctgatggcctcttgtcaggagagcagtggcacgggggcgtgaggaagagggaaaggggaaactctaagggtcctggcgcggggaaggggtggaagggtggaggtaggaacaaaattgcgccgctcctggagacctgataacttaggcttgaaataattgacttgtctaaaaggacaaagagaaa

SEQ ID NO: 422064 - DNA, 530 bp, Homo sapiens
agacgtcaccggctgcgcccttcagtatcgcggacggaagatggcgtccgccacccgtctcatccagcggctgcggaactgggcgtccgggcatgacctgcaggggaagctgcagctacgctaccaggagatctccaagcgaactcagcctcctcccaagctccctgtgggtcctagccacaagctctccaacaattactattgcactcgcgatggccgccgggaatctgtgcccccttccatcatcatgtcgtcgcagaaggcgctggtgtcaggcaagccagcagagagctctgctgtagctgccactgagaagaaggcggtgactccagctcctcccataaagaggtgggagctgtcctcggaccagccttacctgtgacactgcaccctcacggccacccgactactttgcctccttggatttcctccagggagaatgtgacctaatttatgacaaatacgtagagctcaggtatcacttctagttttactttaaaaaataaaaaaatagagacagagtctcacca

SEQ ID NO: 422065 - DNA, 642 bp, Homo sapiens
agacgtcaccggctgcgcccttcagtatcgcggacggaagatggcgtccgccacccgtctcatccagcggctgcggaactgggcgtccgggcatgacctgcaggggaagctgcagctacgctaccaggagatctccaagcgaactcagcctcctcccaagctccctgtgggtcctagccacaagctctccaacaattactattgcactcgcgatggccgccgggaatctgtgcccccttccatcatcatgtcgtcgcagaaggcgctggtgtcaggcaagccagcagagagctctgctgtagctgccactgagaagaaggcggtgactccagctcctcccataaagaggtgggagctgtcctcggaccagccttacctgtgacactgcaccctcacggccacccgactactttgcctccttggatttcctccagggagaatgtgacctaatttatgacaaatacgtagagctcaggtatcacttctagttttactttaaaaaataaaaaaatagagacagagtctcaccaaaaaaacaaaaacaaaaaccccggaggacctctagtggcgggctgcggacacaacgggcgcccggacacgggcccagggccactcagcggtttccctgacccagtttcctgc

SEQ ID NO: 422066 - DNA, 767 bp, Homo sapiens
gtatcaacgcagagtggccattatgggggggcggacggaagatggcgtccgccacccgtctcatccagcggctgcggaactgggcgtccgggcatgacctgcaggggaagctgcagctacgctaccaggagatctccaagcgaactcagcctcctcccaagctccctgtgggtcctagccacaagctctccaacaattactattgcactcgcgatggccgccgggaatctgtgcccccttccatcatcatgtcgtcgcagaaggcgctggtgtcaggcaagccagcagagagctctgctgtagctgccactgagaagaaggcggtgactccagctcctcccataaagaggtgggagctgtcctcggaccagccttacctgtgacactgcaccctcacggccacccgactactttgcctccttggatttcctccagggagaatgtgacctaatttatgacaaatacgtagagctcaggtatcacttctagttttactttaaaaaataaaaaaatagagacagagtctcaccaaaaaaaaaaaaaaacaaaaaaaaaactcggggcacaagttgaacggtatggccaaatatgtcggcgctaatatatatatctgccagggggccgagcgtgatggctcaccacctgtatattccgcacttggggacgtcaaggaagcaaaatacgaacccaaagttagaaatcttgccagggaaatctgtttacaaaatacgggcgatacattcgatacccctctggaaggtggcaca

SEQ ID NO: 422067 - DNA, 508 bp, Homo sapiens
aaagacggctaggtagcgagcgggtgggggtcgcacgtctatcagcggctgcggaactgggcgtccgggcatgacctgcaggggaagctgcagctacgctaccaggagatctccaagcgaactcagcctcctcccaagctccctgtgggtcctagccacaagctctccaacaattactattgcactcgcgatggccgccgggaatctgtgcccccttccatcatcatgtcgtcgcagaaggcgctggtgtcaggcaagccagcagagagctctgctgtagctgccactgagaagaaggcggtgactccagctcctcccataaagaggtgggagctgtcctcggaccagccttacctgtgacactgcaccctcacggccacccgactactttgcctccttggatttcctccagggagaatgtgacctaatttatgacaaatacgtagagctcaggtatcacttctagttttactttaaaaaataaaaaaatagagacagagtctcacca

SEQ ID NO: 422068 - DNA, 560 bp, Homo sapiens
  misc_feature (34)..(34): n is a, c, g, or t
ggggatgagacgggatggcgtgggctgttgaatnggtgcgcgagggtatggcggagggatatggatggcgctcgccacgcgttctcattcgaacggtctgtaggtaactggccgtccgtgtcatgacctgcaggggaagctgcagctacgctaccaggagatctccaagcgaactcagcctcctcccaagctccctgtgggtcctagccacaagctctccaacaattactattgcactcgcgatggccgccgggaatctgtgcccccttccatcatcatgtcgtcgcagaaggcgctggtgtcaggcaagccagcagagagctctgctgtagctgccactgagaagaaggcggtgactccagctcctcccataaagaggtgggagctgtcctcggaccagccttacctgtgacactgcaccctcacggccacccgactactttgcctccttggatttcctccagggagaatgtgacctaatttatgacaaatacgtagagctcaggtatcacttctagttttactttaaaaaataaaaaaatagagacagagtctcacca

SEQ ID NO: 422069 - DNA, 1740 bp, Homo sapiens
  misc_feature (697)..(697): n is a, c, g, or t
  misc_feature (768)..(768): n is a, c, g, or t
  misc_feature (845)..(845): n is a, c, g, or t
  misc_feature (1214)..(1214): n is a, c, g, or t
  misc_feature (1724)..(1724): n is a, c, g, or t
gagacggagttttgctcttattgcccaggctggagtgcaatggcacaatctcagctcactgcaatctccatctcccgggttcaagcgattctcctgcctcagcctcccaagtagctgggattacaggcatgtgccaccacgcctgactaattttttgtatctttagtagaaacggggtttcaccatgttggccagtctggtctcgaactcctgacctcataatccgcctgcctcggcctcccaaagtgctgggattacaggtgtgagccaccacgcctggcccctgattttaagcaatacccagcttacttggattttggggtgaagtcagtgctgagtctcccaactctgttggcactccaggggtgggacagacactgtccctgggtgcagaggccctggaggcagcactgccctttcccccaaaggccaggctctgaccttgagagtggtgggagtgggtgatccttctgggaggttggactcccaggaccgctggctgttggggagcattgattgtgaagaccagtcaggtggggtaaggggtgtatgtgcggacactcagtaggccagccacagacttctcacttcttttttttttttgagacagagtttcgctcttgttgcccaggctagagtacaatggcgcgatcacggctcactataacctctgcctcctgggttcaagtgattctcntgcctcagcctcccgagtagctgggattacaggcgcctgccacaagcccagctaatttttgtatttttagnagagacggggtttcgccatgttggccaggctggtctcaaactcctgacctcaagtgatccgcccacctctgcctccngaagtgttgggattacaggcgtgagccaccgcgcctggcctaacttccatctcttgagggctcccacagccacttctcacatgaaccttcctcagcaccttcccactgaggctcctgcttgaccatggtcaccctgcagctcaacggggaaggcagaggacagtaagggctgctcacagggaaggcaaacctagggcagatcaggaaaggcctccctgagccagatcccattatgctggggctgtgggataagaatgaattcgccccagaaggaaggcagctggttcctggggaggagacagaaatctgcaaagggagggtgtccaagtctggctgcaggagccacccagtgaccctacgcaggggagngtcatggcttccccagggcacagccccagacccttcagcagctaaaaaagatcagctgtggaccaagagggtgctgagaccgccctgccctctggaaggggaaaggccacggctacaggcagcaggtaccagtgtcccagagtgggtcctacaaaggctaacaccttcctggagaaggtgggattctgcttggggcaaaaggatgaatcagattcagaaaggtcaggagggaaggaaagactaggcagggtgtgcagaggccacaaggagggcaagaccctaggcaaggcatgccgctgacggcatctgaaccaagttttatgaccacaacttttttttttttttgagacagagtctcactctgtcacccaggctggagttcaatgatgtggtctcggcgcactgcaacctccgcctcccgggttcaagcgattctcccatctcagcctccctagtagctgggactacaggagcatgttaccacacccggctaatttttgtatttttggnagagacgggagtttta

SEQ ID NO: 422070 - DNA, 718 bp, Homo sapiens
ggcacggtctcgtccagcgagtagtaacctggcgcgttcggtgcatgacctgcaggggaagctgcagctacgctaccaggagatctccaagcgaactcagcctcctcccaagctccctgtgggtcctagccacaagctctccaacaattactattgcactcgcgatggccgccgggaatctgtgcccccttccatcatcatgtcgtcgcagaaggcgctggtgtcaggcaagccagcagagagctctgctgtagctgccactgagaagaaggcggtgactccagctcctcccataaagaggtgggagctgtcctcggaccagccttacctgtgacactgcaccctcacggccacccgactactttgcctccttggatttcctccagggagaatgtgacctaatttatgacaaatacgtagagctcaggtatcacttctagttttactttaaaaaataaaaaaatagagacagagtctcaccaaaaaaaaaaaaaaacaaaaaaaaaactcggggcacaagttgaacggtatggccaaatatgtcggcgctaatatatatatctgccagggggccgagcgtgatggctcaccacctgtatattccgcacttggggacgtcaaggaagcaaaatacgaacccaaagttagaaatcttgccagggaaatctgtttacaaaatacgggcgatacattcgatacccctctggaaggtggcaca

SEQ ID NO: 422071 - DNA, 493 bp, Homo sapiens
  misc_feature (35)..(35): n is a, c, g, or t
tactactattaaattcgcggccgcgtcgactacgnctaccaggagatctccaagcgaactcagcctcctcccaagctccctgtgggtcctagccacaagctctccaacaattactattgcactcgcgatggccgccgggaatctgtgcccccttccatcatcatgtcgtcgcagaaggcgctggtgtcaggcaagccagcagagagctctgctgtagctgccactgagaagaaggcggtgactccagctcctcccataaagaggtgggagctgtcctcggaccagccttacctgtgacactgcaccctcacggccacccgactactttgcctccttggatttcctccagggagaatgtgacctaatttatgacaaatacgtagagctcaggtatcacttctagttttactttaaaaaataaaaaaatagagacagagtctcaccaatgtttcccaggctgatcttgaactcctggcctcaagcgatcctcctg

SEQ ID NO: 422072 - DNA, 480 bp, Homo sapiens
gacttgctgtgttgcccaggctgatctcgaactcctgggctcaagcgatctgcccgcctctgcttcccaaaatgctgggatcacacacgtgacccaccgcgcccggcctttattattaaatttaattaattaattgatttcctttcctttttcccccccaagcaacccgactccgagaatggacgtttcatttattcatttactcaccaaatgtttactaagagcctactatgagtcaagcactatgtgtcagatcctgagaataaagcagtgagcaacagaagatccctgccctccagtagctagcattctatggggactcggacaacaaaccagaataagtaaataaaataaattacctgtcggcgccacaaaagcagtgggatgagggaggaaatgcggagtgcctgaggggcgtggctgccatattaaagaagatcacgaggcagtaacatttgcagcagtcctcatttggaacgg

SEQ ID NO: 422073 - DNA, 627 bp, Homo sapiens
tcacatgcacatacgcacacactccccacagatgtcatacacatacccatgcaccttacatacacatcacgctacacacatctacagacactacaccatacatacatacaaagcacacacttacacataccacacacacagacacagcccacatcatacgcccaggtatgcatacctgggcgtatgggcatgacctgcaggggaagctgcagctacgctaccaggagatctccaagcgaactcagcctcctcccaagctccctgtgggtcctagccacaagctctccaacaattactattgcactcgcgatggccgccgggaatctgtgcccccttccatcatcatgtcgtcgcagaaggcgctggtgtcaggcaagccagcagagagctctgctgtagctgccactgagaagaaggcggtgactccagctcctcccataaagaggtgggagctgtcctcggaccagccttacctgtgacactgcaccctcacggccacccgactactttgcctccttggatttcctccagggagaatgtgacctaatttatgacaaatacgtagagctcaggtatcacttctagttttactttaaaaaataaaaaaatagagacagagtctcacca

SEQ ID NO: 422074 - DNA, 766 bp, Homo sapiens
agacgtcaccggctgcgcccttcagtatcgcggacggaagatggcgtccgccacccgtctcatccagcggctgcggaactgggcgtccgggcatgacctgcaggggaagctgcagctacgctaccaggagatctccaagcgaactcagcctcctcccaagctccctgtgggtcctagccacaagctctccaacaattactattgcactcgcgatggccgccgggaatctgtgcccccttccatcatcatgtcgtcgcagaaggcgctggtgtcaggcaagccagcagagagctctgctgtagctgccactgagaagaaggcggtgactccagctcctcccataaagaggtgggagctgtcctcggaccagccttacctgtgacactgcaccctcacggccacccgactactttgcctccttggatttcctccagggagaatgtgacctaatttatgacaaatacgtagagctcaggtatcacttctagttttactttaaaaaataaaaaaatagagacagagtctcaccaaaaaaaaaaaaaaacaaaaaaaaaactcggggcacaagttgaacggtatggccaaatatgtcggcgctaatatatatatctgccagggggccgagcgtgatggctcaccacctgtatattccgcacttggggacgtcaaggaagcaaaatacgaacccaaagttagaaatcttgccagggaaatctgtttacaaaatacgggcgatacattcgatacccctctggaaggtggcaca

SEQ ID NO: 422075 - DNA, 578 bp, Homo sapiens
agacgtcaccggctgcgcccttcagtatcgcggacggaagatggcgtccgccacccgtctcatccagcggctgcggaactgggcgtccgggcatgacctgcaggggaagctgcagctacgctaccaggagatctccaagcgaactcagcctcctcccaagctccctgtgggtcctagccacaagctctccaacaattactattgcactcgcgatggccgccgggaatctgtgcccccttccatcatcatgtcgtcgcagaaggcgctggtgtcaggcaagccagcagagagctctgctgtagctgccactgagaagaaggcggtgactccagctcctcccataaagaggtgggagctgtcctcggaccagccttacctgtgacactgcaccctcacggccacccgactactttgcctccttggatttcctccagggagaatgtgacctaatttatgacaaatacgtagagctcaggtatcacttctagttttactttaaaaaataaaaaaatagagacagagtctcaccaatgtttcccaggctgatcttgaactcctggcctcaagcgatcctcctg

SEQ ID NO: 422076 - DNA, 793 bp, Homo sapiens
agacgtcaccggctgcgcccttcagtatcgcggacggaagatggcgtccgccacccgtctcatccagcggctgcggaactgggcgtccgggcatgacctgcaggggaagctgcagctacgctaccaggagatctccaagcgaactcagcctcctcccaagctccctgtgggtcctagccacaagctctccaacaattactattgcactcgcgatggccgccgggaatctgtgcccccttccatcatcatgtcgtcgcagaaggcgctggtgtcaggcaagccagcagagagctctgctgtagctgccactgagaagaaggcggtgactccagctcctcccataaagaggtgggagctgtcctcggaccagccttacctgtgacactgcaccctcacggccacccgactactttgcctccttggatttcctccagggagaatgtgacctaatttatgacaaatacgtagagctcagcaacccgactccgagaatggacgtttcatttattcatttactcaccaaatgtttactaagagcctactatgagtcaagcactatgtgtcagatcctgagaataaagcagtgagcaacagaagatccctgccctccagtagctagcattctatggggactcggacaacaaaccagaataagtaaataaaataaattacctgtcggcgccacaaaagcagtgggatgagggaggaaatgcggagtgcctgaggggcgtggctgccatattaaagaagatcacgaggcagtaacatttgcagcagtcctcatttggaacgg

SEQ ID NO: 422077 - DNA, 625 bp, Homo sapiens
gtatcaacgcagagtggccattatgggggggcggacggaagatggcgtccgccacccgtctcatccagcggctgcggaactgggcgtccgggcatgacctgcaggggaagctgcagctacgctaccaggagatctccaagcgtagaaacggggtttcaccatgttggccagtctggtctcgaactcctgacctcataatccgcctgcctcggcctcccaaagtgctgggattacagaactcagcctcctcccaagctccctgtgggtcctagccacaagctctccaacaattactattgcactcgcgatggccgccgggaatctgtgcccccttccatcatcatgtcgtcgcagaaggcgctggtgtcaggcaagccagcagagagctctgctgtagctgccactgagaagaaggcggtgactccagctcctcccataaagaggtgggagctgtcctcggaccagccttacctgtgacactgcaccctcacggccacccgactactttgcctccttggatttcctccagggagaatgtgacctaatttatgacaaatacgtagagctcaggtatcacttctagttttactttaaaaaataaaaaaatagagacagagtctcacca

SEQ ID NO: 422078 - DNA, 511 bp, Homo sapiens
gtcgccgttcactatcgcgcacgtacgatgagcgtcggcccccgttctcatccaggtcgtctgcataacttggcgctccgtttaaaaccctgagggctgagtcctaccaggagatctcacgtaactcagcctcctcccaagctccctgtgggtcctagccacaagctctccaacaattactattgcactcgcgatggccgccgggaatctgtgcccccttccatcatcatgtcgtcgcagaaggcgctggtgtcaggcaagccagcagagagctctgctgtagctgccactgagaagaaggcggtgactccagctcctcccataaagaggtgggagctgtcctcggaccagccttacctgtgacactgcaccctcacggccacccgactactttgcctccttggatttcctccagggagaatgtgacctaatttatgacaaatacgtagagctcaggtatcacttctagttttactttaaaaaataaaaaaatagagacagagtctcacca

SEQ ID NO: 422079 - DNA, 401 bp, Homo sapiens
gtggggactcctgagtaggctggggcctcaggaacagaagaggggatgggctggtgctatatctggggcagaaggaaccagatttgggttattatctgcctgggagagcttaaggagggcatgaaagaaagggaaaaagacaaacagtgttggatttgcaactggtcttaacaaaaagaattcacaaagcattttatatttttaaaaattctggcttgtactcatttataaactaaaaaaaaataactatatgatgcaggcaacgtggtgagaccccatccctacaaaacatgaaaaaaattatccaggtgtggtggcacatacctgtagtcgtagatacttgggaggctgaggtggtaggatcacttgagcccaggaggttcaggctgcaatgagccatg

SEQ ID NO: 422080 - DNA, 786 bp, Homo sapiens
cgggcggctacggaagcggtgagactgtctctcggctgcagccctggtgcgacccggcccgttgccgtagagatgggcagggctggatggagtggggtgcggtgagctgagctgaccctgcttcgccacggggactgcagtgaccccggcttgccggcagggcgggtaacaggttgagccagggtggggctgctcaggggcgtggagccgaggccaggatttctctgaagacccggcacaggctattcctttctgcgacgagcccattgctatggaaaccaaagcgttaggccagcggggattgaggctgcgggatcatgacgggtctctctcccgaagaaccttgcctaaggcttccccaagcggctacttcctgagcgaacccgcccacccgcctgaaggagagagagccctgcattttaacttccctatcagaagcgagaaaaatagttatcattttgagagggcttactctatgccaagccctgagaaaactctttacgtggattatctcgtttaatttcacaacatccttttaagcccctgcccttgatggatcagctggcaccacccagattgataaactggctcgtctgatcttgtggcccccacccaggaactgactgggcactagaaaacagcttcaacatcctgtgatttcatccctgaccaatcagcactcctgtctcactggcttcccccaacccaccaagttgtccttaaaactctgctccctgaatggtcggggagactgatttcagtaatagtaaaactctggtctcctgc

SEQ ID NO: 422081 - DNA, 2451 bp, Homo sapiens
cgggcggctacggaagcggtgagactgtctctcggctgcagccctggtgcgacccggcccgttgccgtagagatgggcagggctggatggagtggggtgcggtgagctgagctgaccctgcttcgccacggggactgcagtgaccccggcttgccggcagggcgggtaacaggttgagccagggtggggctgctcaggggcgtggagccgaggccaggatttctctgaagacccggcacaggctattcctttctgcgacgagcccattgctatggaaaccaaagcgttaggccagcggggattgaggctgcgggatcatgacgggtctctctcccgaagaaccttgcctaaggcttccccaagcggctacttcctgagcgaacccgcccacccgcctgaaggagagagttttccatggacacagcctagcagaaagacgcagccttcgtgcttcgctgactgctgaccactgacccaccgccttgatgacagcaccctcgtgtgccttcccagttcagttccggcagccctcagtcagcggcctctcgcagataaccaaaagcctgtatatcagcaatggtgtggccgccaacaacaagctcatgctgtctagcaaccagatcaccatggtcatcaatgtctcagtggaggtagtgaacaccttgtatgaggatatccagtacatgcaggtacctgtggctgactcccctaactcacgtctctgtgacttctttgaccctattgctgaccatatccacagcgtggagatgaagcagggccgtactttgctgcactgtgctgctggtgtgagccgctcagctgccctgtgcctcgcctacctcatgaagtaccacgccatgtccctgctggacgcccacacgtggaccaagtcatgccggcccatcatccgacccaacagcggcttttgggagcagctcatccactatgagttccaattgtttggcaagaacactgtgcacatggtcagttccccagtgggaatgatccctgacatctatgagaaggaagtccgtttgatgattccactgtgagccatcccacgagcccctgcattggagtcagaggtacagatctattgttgatcttacaccaagatccaaacttgaacattctacttttgttgatacagaaaaaaacagatgatgccttttatgagcacaaaaaagagttgctgtagcttttaactttataatccattttttttcagattaaactaattgtgagatggtgaagataaattttctgccctgtgagtgacactggccaggggataggttgaggcagatggtgcccagaagaaagagggcagcacccattgcacatggcaggcctggaatcctgcagccctccccaaaaacagattgacccaggaatgaatctgctacaattccacctcattctttcacacccagagccagagccttaagcatcatggtacctcttgcgcttcttacagtgagtgccaatctactagataaatggccttcaggcagtgctccaggaatcctggggggtcccaggccacctctgcttccaccttcactataagtggcccagttctggttttctagattgtacttatgcataagatagtttttaaagaaagcattccactgtgtaaatttttttttgtctttttttgaaactgtcctgctctgtcacccatcctagagtgcagtagtgtgatcatggctcactgtagccacaacctctcaggctcaagtgatcctcttaccttagcctcctgcgtggctgggactacagatgtttgccaccatgcccgcctcattttttttctttttttatagagatgagattttactatgtcgcccagactggtctcaaactcctggcctcaagcaatcctcacgcctcagcctcccaaagtgttgatgagccactgtaccccgataccactgtataaaaaatttaaaaaaaattgtgagtgctattgtacatggcaaagtttcaaagagctcttggccatccctcaccaaactttggcaaaagatggtgttagtccccttctccagggcacatgagaaaaacaggcctaacatcaggtctcagcggttcctctcacaggccttggcttggaaggctggagcttcggaccaaggcccagccctgtcacctcctcttcatgtgatgtggacccctgggagcatcagtgtcctcatctgtccaatgacagcccttttctcacagagttattgtgaagattcaacaatttcttggcatagtgcctggcacatggtgtgtgcttagcgcaaatggcagctctcatcatgaatgatagactctttcaccctgctggtcccaggtcggcacacacatcctcataatggcatttctcctttctgtgcacagcactttattgttacaaagtactcttccaaaaagttaccctgtgtgtaaaaaaaaaaaaaa

SEQ ID NO: 422082 - DNA, 2341 bp, Homo sapiens
cgggcggctacggaagcggtgagactgtctctcggctgcagccctggtgcgacccggcccgttgccgtagagatgggcagggctggatggagtggggtgcggtgagctgagctgaccctgcttcgccacggggactgcagtgaccccggcttgccggcagggcgggtaacaggttgagccagggtggggctgctcaggggcgtggagccgaggccaggatttctctgaagacccggcacaggctattcctttctgcgacgagcccattgctatggaaaccaaagcgttaggccagcggggattgaggctgcgggatcatgacgggtctctctcccgaagaaccttgcctaaggcttccccaagcggctacttcctgagcgaacccgcccacccgcctgaaggagagagttttccatggacacagcctagcagaaagacgcagccttcgtgcttcgctgactgctgaccactgacccaccgccttgatgacagcaccctcgtgtgccttcccagttcagttccggcagccctcagtcagcggcctctcgcagataaccaaaagcctgtatatcagcaatggtgtggccgccaacaacaagctcatgctgtctagcaaccagatcaccatggtcatcaatgtctcagtggagcgtggagatgaagcagggccgtactttgctgcactgtgctgctggtgtgagccgctcagctgccctgtgcctcgcctacctcatgaagtaccacgccatgtccctgctggacgcccacacgtggaccaagtcatgccggcccatcatccgacccaacagcggcttttgggagcagctcatccactatgagttccaattgtttggcaagaacactgtgcacatggtcagttccccagtgggaatgatccctgacatctatgagaaggaagtccgtttgatgattccactgtgagccatcccacgagcccctgcattggagtcagaggtacagatctattgttgatcttacaccaagatccaaacttgaacattctacttttgttgatacagaaaaaaacagatgatgccttttatgagcacaaaaaagagttgctgtagcttttaactttataatccattttttttcagattaaactaattgtgagatggtgaagataaattttctgccctgtgagtgacactggccaggggataggttgaggcagatggtgcccagaagaaagagggcagcacccattgcacatggcaggcctggaatcctgcagccctccccaaaaacagattgacccaggaatgaatctgctacaattccacctcattctttcacacccagagccagagccttaagcatcatggtacctcttgcgcttcttacagtgagtgccaatctactagataaatggccttcaggcagtgctccaggaatcctggggggtcccaggccacctctgcttccaccttcactataagtggcccagttctggttttctagattgtacttatgcataagatagtttttaaagaaagcattccactgtgtaaatttttttttgtctttttttgaaactgtcctgctctgtcacccatcctagagtgcagtagtgtgatcatggctcactgtagccacaacctctcaggctcaagtgatcctcttaccttagcctcctgcgtggctgggactacagatgtttgccaccatgcccgcctcattttttttctttttttatagagatgagattttactatgtcgcccagactggtctcaaactcctggcctcaagcaatcctcacgcctcagcctcccaaagtgttgatgagccactgtaccccgataccactgtataaaaaatttaaaaaaaattgtgagtgctattgtacatggcaaagtttcaaagagctcttggccatccctcaccaaactttggcaaaagatggtgttagtccccttctccagggcacatgagaaaaacaggcctaacatcaggtctcagcggttcctctcacaggccttggcttggaaggctggagcttcggaccaaggcccagccctgtcacctcctcttcatgtgatgtggacccctgggagcatcagtgtcctcatctgtccaatgacagcccttttctcacagagttattgtgaagattcaacaatttcttggcatagtgcctggcacatggtgtgtgcttagcgcaaatggcagctctcatcatgaatgatagactctttcaccctgctggtcccaggtcggcacacacatcctcataatggcatttctcctttctgtgcacagcactttattgttacaaagtactcttccaaaaagttaccctgtgtgtaaaaaaaaaaaaaa

SEQ ID NO: 422083 - DNA, 1579 bp, Homo sapiens
cgggcggctacggaagcggtgagactgtctctcggctgcagccctggtgcgacccggcccgttgccgtagagatgggcagggctggatggagtggggtgcggtgagctgagctgaccctgcttcgccacggggactgcagtgaccccggcttgccggcagggcgggtaacaggttgagccagggtggggctgctcaggggcgtggagccgaggccaggatttctctgaagacccggcacaggctattcctttctgcgacgagcccattgctatggaaaccaaagcgttaggccagcggggattgaggctgcgggatcatgacgggtctctctcccgaagaaccttgcctaaggcttccccaagcggctacttcctgagcgaacccgcccacccgcctgaaggagagagttttccatggacacagcctagcagaaagacgcagccttcgtgcttcgctgactgctgaccactgacccaccgccttgatgacagcaccctcgtgtgccttcccagttcagttccggcagccctcagtcagcggcctctcgcagataaccaaaagcctgtatatcagcaatggtgtggccgccaacaacaagctcatgctgtctagcaaccagatcaccatggtcatcaatgtctcagtggaggtagtgaacaccttgtatgaggatatccagtacatgcaggtacctgtggctgactcccctaactcacgtctctgtgacttctttgaccctattgctgaccatatccacagcgtggagatgaagcagggccgtactttgctgcactgtgctgctggtgtgagccgctcagctgccctgtgcctcgcctacctcatgaagtaccacgccatgtccctgctggacgcccacacgtggaccaagtcatgccggcccatcatccgacccaacagcggcttttgggagcagctcatccactatgagttccaattgtttggcaagaacactgtgcacatggtcagttccccagtgggaatgatccctgacatctatgagaaggaagtccgtttgatgattccactgtgagccatcccacgagcccctgcattggagtcagagattaaactaattgtgagatggtgaagataaattttctgccctgtgagtgacactggccaggggataggttgaggcagatggtgcccagaagaaagagggcagcacccattgcacatggcaggcctggaatcctgcagccctccccaaaaacagattgacccaggaatgaatctgctacaattccacctcattctttcacacccagagccagagccttaagcatcatggtacctcttgcgcttcttacacccctgcccttgatggatcagctggcaccacccagattgataaactggctcgtctgatcttgtggcccccacccaggaactgactgggcactagaaaacagcttcaacatcctgtgatttcatccctgaccaatcagcactcctgtctcactggcttcccccaacccaccaagttgtccttaaaactctgctccctgaatggtcggggagactgatttcagtaatagtaaaactctggtctcctgc

SEQ ID NO: 422084 - DNA, 2618 bp, Homo sapiens
cgggcggctacggaagcggtgagactgtctctcggctgcagccctggtgcgacccggcccgttgccgtagagatgggcagggctggatggagtggggtgcggtgagctgagctgaccctgcttcgccacggggactgcagtgaccccggcttgccggcagggcgggtaacaggttgagccagggtggggctgctcaggggcgtggagccgaggccaggatttctctgaagacccggcacaggctattcctttctgcgacgagcccattgctatggaaaccaaagcgttaggccagcggggattgaggctgcgggatcatgacgggtctctctcccgaagaaccttgcctaaggcttccccaagcggctacttcctgagcgaacccgcccacccgcctgaaggagagagctttgtttaagactgagaaagtgagggtccgagagtctaatgaatgctctgggcacccaggccgcacctgaggagcaccgacgactgcacggtctgcggcgcgggaagcagatctgcggctgaacctctaccccaattacttagcggcgactgagcctatcgagcagttttccatggacacagcctagcagaaagacgcagccttcgtgcttcgctgactgctgaccactgacccaccgccttgatgacagcaccctcgtgtgccttcccagttcagttccggcagccctcagtcagcggcctctcgcagataaccaaaagcctgtatatcagcaatggtgtggccgccaacaacaagctcatgctgtctagcaaccagatcaccatggtcatcaatgtctcagtggaggtagtgaacaccttgtatgaggatatccagtacatgcaggtacctgtggctgactcccctaactcacgtctctgtgacttctttgaccctattgctgaccatatccacagcgtggagatgaagcagggccgtactttgctgcactgtgctgctggtgtgagccgctcagctgccctgtgcctcgcctacctcatgaagtaccacgccatgtccctgctggacgcccacacgtggaccaagtcatgccggcccatcatccgacccaacagcggcttttgggagcagctcatccactatgagttccaattgtttggcaagaacactgtgcacatggtcagttccccagtgggaatgatccctgacatctatgagaaggaagtccgtttgatgattccactgtgagccatcccacgagcccctgcattggagtcagaggtacagatctattgttgatcttacaccaagatccaaacttgaacattctacttttgttgatacagaaaaaaacagatgatgccttttatgagcacaaaaaagagttgctgtagcttttaactttataatccattttttttcagattaaactaattgtgagatggtgaagataaattttctgccctgtgagtgacactggccaggggataggttgaggcagatggtgcccagaagaaagagggcagcacccattgcacatggcaggcctggaatcctgcagccctccccaaaaacagattgacccaggaatgaatctgctacaattccacctcattctttcacacccagagccagagccttaagcatcatggtacctcttgcgcttcttacagtgagtgccaatctactagataaatggccttcaggcagtgctccaggaatcctggggggtcccaggccacctctgcttccaccttcactataagtggcccagttctggttttctagattgtacttatgcataagatagtttttaaagaaagcattccactgtgtaaatttttttttgtctttttttgaaactgtcctgctctgtcacccatcctagagtgcagtagtgtgatcatggctcactgtagccacaacctctcaggctcaagtgatcctcttaccttagcctcctgcgtggctgggactacagatgtttgccaccatgcccgcctcattttttttctttttttatagagatgagattttactatgtcgcccagactggtctcaaactcctggcctcaagcaatcctcacgcctcagcctcccaaagtgttgatgagccactgtaccccgataccactgtataaaaaatttaaaaaaaattgtgagtgctattgtacatggcaaagtttcaaagagctcttggccatccctcaccaaactttggcaaaagatggtgttagtccccttctccagggcacatgagaaaaacaggcctaacatcaggtctcagcggttcctctcacaggccttggcttggaaggctggagcttcggaccaaggcccagccctgtcacctcctcttcatgtgatgtggacccctgggagcatcagtgtcctcatctgtccaatgacagcccttttctcacagagttattgtgaagattcaacaatttcttggcatagtgcctggcacatggtgtgtgcttagcgcaaatggcagctctcatcatgaatgatagactctttcaccctgctggtcccaggtcggcacacacatcctcataatggcatttctcctttctgtgcacagcactttattgttacaaagtactcttccaaaaagttaccctgtgtgtaaaaaaaaaaaaaa

SEQ ID NO: 422085 - DNA, 1763 bp, Homo sapiens
cgggcggctacggaagcggtgagactgtctctcggctgcagccctggtgcgacccggcccgttgccgtagagatgggcagggctggatggagtggggtgcggtgagctgagctgaccctgcttcgccacggggactgcagtgaccccggcttgccggcagggcgggtaacaggttgagccagggtggggctgctcaggggcgtggagccgaggccaggatttctctgaagacccggcacaggctattcctttctgcgacgagcccattgctatggaaaccaaagcgttaggccagcggggattgaggctgcgggatcatgacgggtctctctcccgaagaaccttgcctaaggcttccccaagcggctacttcctgagcgaacccgcccacccgcctgaaggagagagttttccatggacacagcctagcagaaagacgcagccttcgtgcttcgctgactgctgaccactgacccaccgccttgatgacagcaccctcgtgtgccttcccagttcagttccggcagccctcagtcagcggcctctcgcagataaccaaaagcctgtatatcagcaatggtgtggccgccaacaacaagctcatgctgtctagcaaccagatcaccatggtcatcaatgtctcagtggaggtagtgaacaccttgtatgaggatatccagtacatgcaggtacctgtggctgactcccctaactcacgtctctgtgacttctttgaccctattgctgaccatatccacagcgtggagatgaagcagggccgtactttgctgcactgtgctgctggtgtgagccgctcagctgccctgtgcctcgcctacctcatgaagtaccacgccatgtccctgctggacgcccacacgtggaccaagtcatgccggcccatcatccgacccaacagcggcttttgggagcagctcatccactatgagttccaattgtttggcaagaacactgtgcacatggtcagttccccagtgggaatgatccctgacatctatgagaaggaagtccgtttgatgattccactgtgagccatcccacgagcccctgcattggagtcagaggtacagatctattgttgatcttacaccaagatccaaacttgaacattctacttttgttgatacagaaaaaaacagatgatgccttttatgagcacaaaaaagagttgctgtagcttttaactttataatccattttttttcagattaaactaattgtgagatggtgaagataaattttctgccctgtgagtgacactggccaggggataggttgaggcagatggtgcccagaagaaagagggcagcacccattgcacatggcaggcctggaatcctgcagccctccccaaaaacagattgacccaggaatgaatctgctacaattccacctcattctttcacacccagagccagagccttaagcatcatggtacctcttgcgcttcttacagtgagtgccaatctactagataaatggccttcaggcagtgctccaggaatcctggggggtcccaggccacctctgcttccaccttcactataagtggcccagttctggttttctagattgtacttatgcataagatagtttttaaagaaagcattccactgtgtaaatttttttttgtctttttttgaaactgtcctgctctgtcacccatcctagagtgcagtagttgagccaagatcaggacattgcactccagcctgggcaacagagcaagactccatctcaaa

SEQ ID NO: 422086 - DNA, 1605 bp, Homo sapiens
  misc_feature (9)..(9): n is a, c, g, or t
  misc_feature (17)..(17): n is a, c, g, or t
  misc_feature (21)..(21): n is a, c, g, or t
  misc_feature (23)..(23): n is a, c, g, or t
tcgtggaanttcggcanaaanancaaggtggctggtctttcctggagcctgagggtgaggggagtgatgctgaagaaggggattcagagtctgaaattgaagatgagacttttaatccttcagaagatgactatgaagaggaagaggaggacagtgatgaagattattcatcagaagcagaagagtcagactattctaaggagtcattgggtagtgaagaagagagtggaaaggattgggatgaactggaggaagaagcccgaaaagcggaccgagaaagtcgttacgaggaagaagaagaacaaagtcgaagtatgagccggaagaggaaggcatctgtgcacagttcgggccgtggctctaaccgtggttccagacacagctctgcaccccccaagaaaaagaggaagtaacttctgaactttggccctgagctccattcttcctccagccaacccctgaaaattttacatgacatagaaactgtatttttcctttcgttttcatttgaagttttgccatttgtgtttatgggtttagggggccatttgtgtggaccaatctactcggggaattccaggcccaccaggacacgtgccaatggccccattcagatggcaagggaggaggtgttcttgaagacaggaggaggctcccgctgttaataaatattgtttcattcttctctcttcctgtcaccttctgccaagacattgatggcttctgacatcttatttggtgtctcaaagctgtatttccaagacagtggtacaaggtgacccttaattacccgtatcatggttcttgaccagcacattcaatcctccaacctaccctactgccatgaccttccgcacatctctaagttttatctttgcaatactcaaggttctcggaaatttgctaatggttgtgataaaccatacagcttgagccagtgaggcagattgggctggtgccttcgtctgagttttcctgctttcctgcctcgtgcagattctgaggtatatctgctgccttggaagacataagaagcagtgatactccctggctcggttattttctccatacaatgcacacatggtacaatgatagaaggcaaaattgccactgtcttcttttttttctcatatatctaaggaagatatatcaggttgtgcctcatgtaccgcttctagtgaaatgtagaggaaggctcaaaggagtcaacatttagatctggaagggacaagtcatgccttgggcctagaataccctgatgagaaaagagaagaggaagggaggccatatctacaacacagcctctcggcactgctgctccttattttaactttgtcttgcattgtcctgtatttatcacagtttctgttgaacagcttttcaagtatttggggagtttatcttgccatcctccccttctggttctctgcacccacctgtcccactgcagttccttccgtgctctgtgactttaagagaagaaggggggaggggtcccggattttatgtttgtttgttttttctccttagcagtaggacttgatattttcaattttggaagaactaaaagatgaataaactgggttttttttgttgtttgttttt

SEQ ID NO: 422087 - DNA, 949 bp, Homo sapiens
  misc_feature (795)..(795): n is a, c, g, or t
ataagttatattaattaattgtttatgttgtggtatactgatttgtatagttactgtgaggtatagacagattaatagtagatcgtaaggaagttagtgaatatgttttttgcgatgttttaagtggtgaatataggtatggagaggtgttgctgatggtttgtaattgtattgactgatggtatataatattaagatatatgtatatgtgggtgggtattatctaatatgtgagtggggcgatgttgggtttggggggttttttatttcggataggccctccctcgggtatataaaaaaatatttgtttccaagagaagatgcacatatatctctccactatgattgtgccacacaacatttgtttcacaggccgccgtcgcgcggcacataatagccccacgctgtatgtgtgtaaacaccacctgtaaaacacactctgtctaaaaagttttataatattgtccccttaggagaggcctcttaaataatctccgttatagagtgtgtattttgtgtcgcccctatataagtgtttccctccccccccagcaagatgtataagaggttcccctctcacacaaagttctcgccacaccgtgtgtgcaccgtgtgtttccccacgttccccagaccgctgtttgtataaacacgccgcgcgcgcccctgtgcgctatgtggtctatataaataacacaggcctcccactatatatatgggggcgccaccctcttgtggagccaaaaaaacctggggagagcggcgcgagaaacctggggcgccccccgagagagngagagaaattttatgagagcgcgcgcgcccccccttttttttttttttttttttatgtttgtttgttttttctccttagcagtaggacttgatattttcaattttggaagaactaaaagatgaataaactgggttttttttgttgtttgttttt

SEQ ID NO: 422088 - DNA, 313 bp, Homo sapiens
cttactttcttttagtaagaaaattgttagagaaaataaagaaggataggtgttttttatcctaattattgtcattttcatttttgatatttacttagacttaaaactcattgaacaaatgttacttttaaagtctctttagggcaggcataatggctcacacctgtaatcccagcacaattagaggccaaggtgggaggaacacttgaggccaggaactcaagaccagtctgggcaacatagcaagaacctatctctcttttttttattttttattttttaagataatgtctttttaaatagtttattttaa

SEQ ID NO: 422089 - DNA, 4677 bp, Homo sapiens
ggcagaccgtcacgtgacgacgtcgattcgcgtgcggcagtggcgaagttgacaaaccccgcgaaaatcgactctttgcatcgcacattttgttgattttccctcgtttttctttctctctttcccccgtccatccgaaagagggttggaaaaaaacaaaacaaacaaacaaacaaaaaaaaaaaacctaacgctgttgggacccggaagcggaaagggcatctttgaggtcgatacttccgggtcattgggagagtgcgggattcctgggccgagagcgggtggctgagccgggacctcgcgtgattctcggaacccgaggagaagcggcgtccggggctatggctgtgactctggacaaagacgcttattatcggcgagtgaagagactgtacagcaattggcggaaaggagaagatgagtatgccaacgttgatgccattgttgtatcagtgggtgttgatgaagaaattgtttatgccaaatcaactgccttacagacatggctctttggttatgaactaactgatactatcatggtcttttgtgatgacaaaatcatctttatggccagcaagaaaaaagtggagttcttgaaacagattgccaacactaagggcaatgagaatgctaatggagcccctgccatcacactgctaatacgagaaaagaatgaaagtaataagagtagctttgacaaaatgattgaagccattaaagaaagcaagaatggcaagaagattggagtgttcagcaaagacaaattccctggagagttcatgaagagctggaatgactgcctcaacaaagaaggctttgacaaaatagatatcagtgcagttgtggcatataccatcgctgtaaaggaggatggggagctcaacctaatgaagaaagcagccagcatcacttctgaagtcttcaacaaattcttcaaggaaagagtcatggaaatagttgatgcagatgagaaagttcgacacagcaaactggctgagtctgtggaaaaggccattgaagagaaaaaataccttgctggggcagacccttctactgtggaaatgtgttaccctcctatcattcagagtggtggcaactataatctcaagttcagtgtggtgagtgacaagaatcatatgcactttggggctatcacttgtgccatgggtattcgcttcaagtcttactgctccaaccttgttcgcactttgatggttgatccttctcaagaagttcaagaaaattataactttttgctccagcttcaagaggagctgctgaaggaattaagacatggtgtgaagatatgtgacgtgtataacgctgtcatggacgtggttaaaaagcagaagccagaactgctgaacaaaattaccaaaaacctagggtttgggatgggaattgaattccgtgaaggctccctagtaatcaatagcaaaaatcaatacaaactgaagaaaggaatggttttcagcatcaatttaggattctcagacctgactaacaaggaggggaaaaagccagaagagaaaacctatgccctgttcattggtgacacagtgcttgtggatgaggatggcccagctactgttctcacttctgtgaagaagaaagtgaagaatgtggggattttcctaaagaatgaagatgaggaagaagaggaggaggagaaagatgaggcagaggaccttttgggaagaggttctcgggcagcattacttacagaaagaacaagaaatgaaatgactgcagaagagaagcgaagagcacatcagaaagaactagcggctcaactcaatgaagaagcaaagaggcgattgactgaacaaaagggagaacagcagattcagaaagctcgcaagtctaatgtgtcctataaaaacccatctctgatgcctaaggaaccgcatattcgggaaatgaagatctacatcgataagaaatatgagactgtaataatgcccgtgtttggcattgcaacaccgtttcacattgccacaatcaagaatataagtatgtccgtggaaggagattatacttacttgcgaatcaacttttattgcccaggcagtgctctgggcaggaatgaaggcaacatctttcctaaccctgaagcgacttttgtcaaggaaattacataccgagcatcaaatattaaggcacccggagaacagacagtaccagccttgaaccttcagaatgctttccgaattattaaagaagtacagaaacgttataaaactcgagaagctgaagagaaagagaaggagggcattgtaaaacaagactcactggtgatcaatctaaaccggagtaatccgaaactgaaagatctatacattcgcccaaatattgcccaaaagaggatgcaaggctcactggaggcccatgtcaatggcttccgcttcacatctgttcgaggagacaaagtggatattttgtacaataatattaagcatgctttgttccagccctgtgatggagaaatgattattgtcttgcactttcacctcaagaatgccatcatgtttgggaagaagcggcacacggatgtgcagttctacacagaagtgggagagataaccacggacttggggaaacatcagcatatgcatgaccgagatgacctctatgctgagcagatggaacgagaaatgaggcacaaactgaaaacagcctttaaaaatttcattgagaaagtagaggctctaactaaggaggaactggaatttgaagtgccttttagggacttgggatttaacggagctccctataggagtacctgcctccttcagcccactagtagtgcgctggtaaatgctacggaatggccaccttttgtggtgacattggatgaggtagagctgatccactttgagcgggtccagtttcacctgaagaactttgatatggtaatcgtctacaaggactacagcaagaaagtgaccatgatcaacgccattcctgtagcctctcttgaccccatcaaggaatggttgaattcctgcgacctgaaatacacagaaggagtacagtccctcaactggactaaaatcatgaagaccattgttgatgaccctgagggcttcttcgaacaaggtggctggtctttcctggagcctgagggtgaggggagtgatgctgaagaaggggattcagagtctgaaattgaagatgagacttttaatccttcagaagatgactatgaagaggaagaggaggacagtgatgaagattattcatcagaagcagaagagtcagactattctaaggagtcattgggtagtgaagaagagagtggaaaggattgggatgaactggaggaagaagcccgaaaagcggaccgagaaagtcgttacgaggaagaagaagaacaaagtcgaagtatgagccggaagaggaaggcatctgtgcacagttcgggccgtggctctaaccgtggttccagacacagctctgcaccccccaagaaaaagaggaagtaacttctgaactttggccctgagctccattcttcctccagccaacccctgaaaattttacatgacatagaaactgtatttttcctttcgttttcatttgaagttttgccatttgtgtttatgggtttagggggccatttgtgtggaccaatctactcggggaattccaggcccaccaggacacgtgccaatggccccattcagatggcaagggaggaggtgttcttgaagacaggaggaggctcccgctgttaataaatattgtttcattcttctctcttcctgtcaccttctgccaagacattgatggcttctgacatcttatttggtgtctcaaagctgtatttccaagacagtggtacaaggtgacccttaattacccgtatcatggttcttgaccagcacattcaatcctccaacctaccctactgccatgaccttccgcacatctctaagttttatctttgcaatactcaaggttctcggaaatttgctaatggttgtgataaaccatacagcttgagccagtgaggcagattgggctggtgccttcgtctgagttttcctgctttcctgcctcgtgcagattctgaggtatatctgctgccttggaagacataagaagcagtgatactccctggctcggttattttctccatacaatgcacacatggtacaatgatagaaggcaaaattgccactgtcttcttttttttctcatatatctaaggaagatatatcaggttgtgcctcatgtaccgcttctagtgaaatgtagaggaaggctcaaaggagtcaacatttagatctggaagggacaagtcatgccttgggcctagaataccctgatgagaaaagagaagaggaagggaggccatatctacaacacagcctctcggcactgctgctccttattttaactttgtcttgcattgtcctgtatttatcacagtttctgttgaacagcttttcaagtatttggggagtttatcttgccatcctccccttctggttctctgcacccacctgtcccactgcagttccttccgtgctctgtgactttaagagaagaaggggggaggggtcccggattttatgtttgtttgttttttctccttagcagtaggacttgatattttcaattttggaagaactaaaagatgaataaactgggttttttttgttgtttgttttt

SEQ ID NO: 422090 - DNA, 4662 bp, Homo sapiens
ggcagaccgtcacgtgacgacgtcgattcgcgtgcggcagtggcgaagttgacaaaccccgcgaaaatcgactctttgcatcgcacattttgttgattttccctcgtttttctttctctctttcccccgtccatccgaaagagggttggaaaaaaacaaaacaaacaaacaaacaaaaaaaaaaaacctaacgctgttgggacccggaagcggaaagggcatctttgaggtcgatacttccgggtcattgggagagtgcgggattcctgggccgagagcgggtggctgagccgggacctcgcgtgattctcggaacccgaggagaagcggcgtccggggctatggctgtgactctggacaaagacgcttattatcggcgagtgaagagactgtacagcaattggcggaaaggagaagatgagtatgccaacgttgatgccattgttgtatcagtgggtgttgatgaagaaattgtttatgccaaatcaactgccttacagacatggctctttggttatgaactaactgatactatcatggtcttttgtgatgacaaaatcatctttatggccagcaagaaaaaagtggagttcttgaaacagattgccaacactaagggcaatgagaatgctaatggagcccctgccatcacactgctaatacgagaaaagaatgaaagtaataagagtagctttgacaaaatgattgaagccattaaagaaagcaagaatggcaagaagattggagtgttcagcaaagacaaattccctggagagttcatgaagagctggaatgactgcctcaacaaagaaggctttgacaaaatagatatcagtgcagttgtggcatataccatcgctgtaaaggaggatggggagctcaacctaatgaagaaagcagccagcatcacttctgaagtcttcaacaaattcttcaaggaaagagtcatggaaatagttgatgcagatgagaaagttcgacacagcaaactggctgagtctgtggaaaaggccattgaagagaaaaaataccttgctggggcagacccttctactgtggaaatgtgttaccctcctatcattcagagtggtggcaactataatctcaagttcagtgtggtgagtgacaagaatcatatgcactttggggctatcacttgtgccatgggtattcgcttcaagtcttactgctccaaccttgttcgcactttgatggttgatccttctcaagaagttcaagaaaattataactttttgctccagcttcaagaggagctgctgaaggaattaagacatggtgtgaagatatgtgacgtgtataacgctgtcatggacgtggttaaaaagcagaagccagaactgctgaacaaaattaccaaaaacctagggtttgggatgggaattgaattccgtgaaggctccctagtaatcaatagcaaaaatcaatacaaactgaagaaaggaatggttttcagcatcaatttaggattctcagacctgactaacaaggaggggaaaaagccagaagagaaaacctatgccctgttcattggtgacacagtgcttgtggatgaggatggcccagctactgttctcacttctgtgaagaagaaagtgaagaatgtggggattttcctaaagaatgaagatgaggaagaagaggaggaggagaaagatgaggcagaggaccttttgggaagaggttctcgggcagcattacttacagaaagaacaagaaatgaaatgactgcagaagagaagcgaagagcacatcagaaagaactagcggctcaactcaatgaagaagcaaagaggcgattgactgaacaaaagggagaacagcagattcagaaagctcgcaagtctaatgtgtcctataaaaacccatctctgatgcctaaggaaccgcatattcgggaaatgaagatctacatcgataagaaatatgagactgtaataatgcccgtgtttggcattgcaacaccgtttcacattgccacaatcaagaatataagtatgtccgtggaaggagattatacttacttgcgaatcaacttttattgcccaggcagtgctctgggcaggaatgaaggcaacatctttcctaaccctgaagcgacttttgtcaaggaaattacataccgagcatcaaatattaaggcacccggagaacagacagtaccagccttgaaccttcagaatgctttccgaattattaaagaagtacagaaacgttataaaactcgagaagctgaagagaaagagaaggagggcattgtaaaacaagactcactggtgatcaatctaaaccggagtaatccgaaactgaaagatctatacattcgcccaaatattgcccaaaagaggatgcaaggctcactggaggcccatgtcaatggcttccgcttcacatctgttcgaggagacaaagtggatattttgtacaataatattaagcatgctttgttccagccctgtgatggagaaatgattattgtcttgcactttcacctcaagaatgccatcatgtttgggaagaagcggcacacggatgtgcagttctacacagaagtgggagagataaccacggacttggggaaacatcagcatatgcatgaccgagatgacctctatgctgagcagatggaacgagaaatgaggcacaaactgaaaacagcctttaaaaatttcattgagaaagtagaggctctaactaaggaggaactggaatttgaagtgccttttagggacttgggatttaacggagctccctataggagtacctgcctccttcagcccactagtagtgcgctggtaaatgctacggaatggccaccttttgtggtgacattggatgaggtagagctgatccactttgagcgggtccagtttcacctgaagaactttgatatggtaatcgtctacaaggactacagcaagaaagtgaccatgatcaacgccattcctgtagcctctcttgaccccatcaaggaatggttgaattcctgcgacctgaaatacacagaaggagtacagtccctcaactggactaaaatcatgaagaccattgttgatgaccctgagggcttcttcgaacaaggtggctggtctttcctggagcctgagggtgaggggagtgatgctgaagaaggggattcagagtctgaaattgaagatgagacttttaatccttcagaagatgactatgaagaggaagaggaggacagtgatgaagattattcatcagaagcagaagagtcagactattctaaggagtcattgggtagtgaagaagagagtggaaaggattgggatgaactggaggaagaagcccgaaaagcggaccgagaaagtcgttacgaggaagaagaagaacaaagtcgaagtatgagccggaagaggaaggcatctgtgcacagttcgggccgtggctctaaccgtggttccagacacagctctgcaccccccaagaaaaagaggaagtaacttctgaactttggccctgagctccattcttcctccagccaacccctgaaaattttacatgacatagaaactgtatttttcctttcgttttcatttgaagttttgccatttgtgtttatgggtttagggggccatttgtgtggaccaatctactcggggaattccaggcccaccaggacacgtgccaatggccccattcagatggcaagggaggaggtgttcttgaagacaggaggaggctcccgctgttaataaatattgtttcattcttctctcttcctgtcaccttctgccaagacattgatggcttctgacatcttatttggtgtctcaaagctgtatttccaagacagtggtacaaggtgacccttaattacccgtatcatggttcttgaccagcacattcaatcctccaacctaccctactgccatgaccttccgcacatctctaagttttatctttgcaatactcaaggttctcggaaatttgctaatggttgtgataaaccatacagcttgagccagtgaggcagattgggctggtgccttcgtctgagttttcctgctttcctgcctcgtgcagattctgaggtatatctgctgccttggaagacataagaagcagtgatactccctggctcggttattttctccatacaatgcacacatggtacaatgatagaaggcaaaattgccactgtcttcttttttttctcatatatctaaggaagatatatcaggttgtgcctcatgtaccgcttctagtgaaatgtagaggaaggctcaaaggagtcaacatttagatctggaagggacaagtcatgccttgggcctagaataccctgatgagaaaagagaagaggaagggaggccatatctacaacacagcctctcggcactgctgctccttattttaactttgtcttgcattgtcctgtatttatcacagtttctgttgaacagcttttcaagtatttggggagtttatcttgccatcctccccttctggttctctgcacccacctgtcccactgcagttccttccgtgctctgtgactttaagagaagaaggggggaggggtcccggattttatgtttgtttgttttttctccttagcagtagggttaggtctacctgggcgtgtagagctagactatgcagagatggaacttgttg

SEQ ID NO: 422091 - DNA, 4532 bp, Homo sapiens
ggcagaccgtcacgtgacgacgtcgattcgcgtgcggcagtggcgaagttgacaaaccccgcgaaaatcgactctttgcatcgcacattttgttgattttccctcgtttttctttctctctttcccccgtccatccgaaagagggttggaaaaaaacaaaacaaacaaacaaacaaaaaaaaaaaacctaacgctgttgggacccggaagcggaaagggcatctttgaggtcgatacttccgggtcattgggagagtgcgggattcctgggccgagagcgggtggctgagccgggacctcgcgtgattctcggaacccgaggagaagcggcgtccggggctatggctgtgactctggacaaagacgcttattatcggcgagtgaagagactgtacagcaattggcggaaaggagaagatgagtatgccaacgttgatgccattgttgtatcagtgggtgttgatgaagaaattgtttatgccaaatcaactgccttacagacatggctctttggttatgaactaactgatactatcatggtcttttgtgatgacaaaatcatctttatggccagcaagaaaaaagtggagttcttgaaacagattgccaacactaagggcaatgagaatgctaatggagcccctgccatcacactgctaatacgagaaaagaatgaaagtaataagagtagctttgacaaaatgattgaagccattaaagaaagcaagaatggcaagaagattggagtgttcagcaaagacaaattccctggagagttcatgaagagctggaatgactgcctcaacaaagaaggctttgacaaaatagatatcagtgcagttgtggcatataccatcgctgtaaaggaggatggggagctcaacctaatgaagaaagcagccagcatcacttctgaagtcttcaacaaattcttcaaggaaagagtcatggaaatagttgatgcagatgagaaagttcgacacagcaaactggctgagtctgtggaaaaggccattgaagagaaaaaataccttgctggggcagacccttctactgtggaaatgtgttaccctcctatcattcagagtggtggcaactataatctcaagttcagtgtggtgagtgacaagaatcatatgcactttggggctatcacttgtgccatgggtattcgcttcaagtcttactgctccaaccttgttcgcactttgatggttgatccttctcaagaagttcaagaaaattataactttttgctccagcttcaagaggagctgctgaaggaattaagacatggtgtgaagatatgtgacgtgtataacgctgtcatggacgtggttaaaaagcagaagccagaactgctgaacaaaattaccaaaaacctagggtttgggatgggaattgaattccgtgaaggctccctagtaatcaatagcaaaaatcaatacaaactgaagaaaggaatggttttcagcatcaatttaggattctcagacctgactaacaaggaggggaaaaagccagaagagaaaacctatgccctgttcattggtgacacagtgcttgtggatgaggatggcccagctactgttctcacttctgtgaagaagaaagtgaagaatgtggggattttcctaaagaatgaagatgaggaagaagaggaggaggagaaagatgaggcagaggaccttttgggaagaggttctcgggcagcattacttacagaaagaacaagaaatgaaatgactgcagaagagaagcgaagagcacatcagaaagaactagcggctcaactcaatgaagaagcaaagaggcgattgactgaacaaaagggagaacagcagattcagaaagctcgcaagtctaatgtgtcctataaaaacccatctctgatgcctaaggaaccgcatattcgggaaatgaagatctacatcgataagaaatatgagactgtaataatgcccgtgtttggcattgcaacaccgtttcacattgccacaatcaagaatataagtatgtccgtggaaggagattatacttacttgcgaatcaacttttattgcccaggcagtgctctgggcaggaatgaaggcaacatctttcctaaccctgaagcgacttttgtcaaggaaattacataccgagcatcaaatattaaggcacccggagaacagacagtaccagccttgaaccttcagaatgctttccgaattattaaagaagtacagaaacgttataaaactcgagaagctgaagagaaagagaaggagggcattgtaaaacaagactcactggtgatcaatctaaaccggagtaatccgaaactgaaagatctatacattcgcccaaatattgcccaaaagaggatgcaaggctcactggaggcccatgtcaatggcttccgcttcacatctgttcgaggagacaaagtggatattttgtacaataatattaagcatgctttgttccagccctgtgatggagaaatgattattgtcttgcactttcacctcaagaatgccatcatgtttgggaagaagcggcacacggatgtgcagttctacacagaagtgggagagataaccacggacttggggaaacatcagcatatgcatgaccgagatgacctctatgctgagcagatggaacgagaaatgaggcacaaactgaaaacagcctttaaaaatttcattgagaaagtagaggctctaactaaggaggaactggaatttgaagtgccttttagggacttgggatttaacggagctccctataggagtacctgcctccttcagcccactagtagtgcgctggtaaatgctacggaatggccaccttttgtggtgacattggatgaggtagagctgatccactttgagcgggtccagtttcacctgaagaactttgatatggtaatcgtctacaaggactacagcaagaaagtgaccatgatcaacgccattcctgtagcctctcttgaccccatcaaggaatggttgaattcctgcgacctgaaatacacagaaggagtacagtccctcaactggactaaaatcatgaagaccattgttgatgaccctgagggcttcttcgaacaaggtggctggtctttcctggagcctgagggtgaggggagtgatgctgaagaaggggattcagagtctgaaattgaagatgagacttttaatccttcagaagatgactatgaagaggaagaggaggacagtgatgaagattattcatcagaagcagaagagtcagactattctaaggagtcattgggtagtgaagaagagagtggaaaggattgggatgaactggaggaagaagcccgaaaagcggaccgagaaagtcgttacgaggaagaagaagaacaaagtcgaagtatgagccggaagaggaaggcatctgtgcacagttcgggccgtggctctaaccgtggttccagacacagctctgcaccccccaagaaaaagaggaagtaacttctgaactttggccctgagctccattcttcctccagccaacccctgaaaattttacatgacatagaaactgtatttttcctttcgttttcatttgaagttttgccatttgtgtttatgggtttagggggccatttgtgtggaccaatctactcggggaattccaggcccaccaggacacgtgccaatggccccattcagatggcaagggaggaggtgttcttgaagacaggaggaggctcccgctgttaataaatattgtttcattcttctctcttcctgtcaccttctgccaagacattgatggcttctgacatcttatttggtgtctcaaagctgtatttccaagacagtggtacaaggtgacccttaattacccgtatcatggttcttgaccagcacattcaatcctccaacctaccctactgccatgaccttccgcacatctctaagttttatctttgcaatactcaaggttctcggaaatttgctaatggttgtgataaaccatacagcttgagccagtgaggcagattgggctggtgccttcgtctgagttttcctgctttcctgcctcgtgcagattctgaggtatatctgctgccttggaagacataagaagcagtgatactccctggctcggttattttctccatacaatgcacacatggtacaatgatagaaggcaaaattgccactgtcttcttttttttctcatatatctaaggaagatatatcaggttgtgcctcatgtaccgcttctagtgaaatgtagaggaaggctcaaaggagtcaacatttagatctggaagggacaagtcatgccttgggcctagaataccctgatgagaaaagagaagaggaagggaggccatatctacaacacagcctctcggcactgctgctccttattttaactttgtcttgcattgtcctgtatttatcacagtttctgttgaacagcttttcaagtatttggggagtttatcacgacatccaatcttcgggttctccgcgtcgtctgtttaccctctagagtcagctatg

SEQ ID NO: 422092 - DNA, 4267 bp, Homo sapiens
tggcgttcagaggatccccttattttccttctttatgtcgtatcaggggtgtgatgaagaaatgtttatgccaaatcaacggccttacagacatggctctttggttatgaactaactgatactatcatggtcttttgtgatgacaaaatcatctttatggccagcaagaaaaaagtggagttcttgaaacagattgccaacactaagggcaatgagaatgctaatggagcccctgccatcacactgctaatacgagaaaagaatgaaagtaataagagtagctttgacaaaatgattgaagccattaaagaaagcaagaatggcaagaagattggagtgttcagcaaagacaaattccctggagagttcatgaagagctggaatgactgcctcaacaaagaaggctttgacaaaatagatatcagtgcagttgtggcatataccatcgctgtaaaggaggatggggagctcaacctaatgaagaaagcagccagcatcacttctgaagtcttcaacaaattcttcaaggaaagagtcatggaaatagttgatgcagatgagaaagttcgacacagcaaactggctgagtctgtggaaaaggccattgaagagaaaaaataccttgctggggcagacccttctactgtggaaatgtgttaccctcctatcattcagagtggtggcaactataatctcaagttcagtgtggtgagtgacaagaatcatatgcactttggggctatcacttgtgccatgggtattcgcttcaagtcttactgctccaaccttgttcgcactttgatggttgatccttctcaagaagttcaagaaaattataactttttgctccagcttcaagaggagctgctgaaggaattaagacatggtgtgaagatatgtgacgtgtataacgctgtcatggacgtggttaaaaagcagaagccagaactgctgaacaaaattaccaaaaacctagggtttgggatgggaattgaattccgtgaaggctccctagtaatcaatagcaaaaatcaatacaaactgaagaaaggaatggttttcagcatcaatttaggattctcagacctgactaacaaggaggggaaaaagccagaagagaaaacctatgccctgttcattggtgacacagtgcttgtggatgaggatggcccagctactgttctcacttctgtgaagaagaaagtgaagaatgtggggattttcctaaagaatgaagatgaggaagaagaggaggaggagaaagatgaggcagaggaccttttgggaagaggttctcgggcagcattacttacagaaagaacaagaaatgaaatgactgcagaagagaagcgaagagcacatcagaaagaactagcggctcaactcaatgaagaagcaaagaggcgattgactgaacaaaagggagaacagcagattcagaaagctcgcaagtctaatgtgtcctataaaaacccatctctgatgcctaaggaaccgcatattcgggaaatgaagatctacatcgataagaaatatgagactgtaataatgcccgtgtttggcattgcaacaccgtttcacattgccacaatcaagaatataagtatgtccgtggaaggagattatacttacttgcgaatcaacttttattgcccaggcagtgctctgggcaggaatgaaggcaacatctttcctaaccctgaagcgacttttgtcaaggaaattacataccgagcatcaaatattaaggcacccggagaacagacagtaccagccttgaaccttcagaatgctttccgaattattaaagaagtacagaaacgttataaaactcgagaagctgaagagaaagagaaggagggcattgtaaaacaagactcactggtgatcaatctaaaccggagtaatccgaaactgaaagatctatacattcgcccaaatattgcccaaaagaggatgcaaggctcactggaggcccatgtcaatggcttccgcttcacatctgttcgaggagacaaagtggatattttgtacaataatattaagcatgctttgttccagccctgtgatggagaaatgattattgtcttgcactttcacctcaagaatgccatcatgtttgggaagaagcggcacacggatgtgcagttctacacagaagtgggagagataaccacggacttggggaaacatcagcatatgcatgaccgagatgacctctatgctgagcagatggaacgagaaatgaggcacaaactgaaaacagcctttaaaaatttcattgagaaagtagaggctctaactaaggaggaactggaatttgaagtgccttttagggacttgggatttaacggagctccctataggagtacctgcctccttcagcccactagtagtgcgctggtaaatgctacggaatggccaccttttgtggtgacattggatgaggtagagctgatccactttgagcgggtccagtttcacctgaagaactttgatatggtaatcgtctacaaggactacagcaagaaagtgaccatgatcaacgccattcctgtagcctctcttgaccccatcaaggaatggttgaattcctgcgacctgaaatacacagaaggagtacagtccctcaactggactaaaatcatgaagaccattgttgatgaccctgagggcttcttcgaacaaggtggctggtctttcctggagcctgagggtgaggggagtgatgctgaagaaggggattcagagtctgaaattgaagatgagacttttaatccttcagaagatgactatgaagaggaagaggaggacagtgatgaagattattcatcagaagcagaagagtcagactattctaaggagtcattgggtagtgaagaagagagtggaaaggattgggatgaactggaggaagaagcccgaaaagcggaccgagaaagtcgttacgaggaagaagaagaacaaagtcgaagtatgagccggaagaggaaggcatctgtgcacagttcgggccgtggctctaaccgtggttccagacacagctctgcaccccccaagaaaaagaggaagtaacttctgaactttggccctgagctccattcttcctccagccaacccctgaaaattttacatgacatagaaactgtatttttcctttcgttttcatttgaagttttgccatttgtgtttatgggtttagggggccatttgtgtggaccaatctactcggggaattccaggcccaccaggacacgtgccaatggccccattcagatggcaagggaggaggtgttcttgaagacaggaggaggctcccgctgttaataaatattgtttcattcttctctcttcctgtcaccttctgccaagacattgatggcttctgacatcttatttggtgtctcaaagctgtatttccaagacagtggtacaaggtgacccttaattacccgtatcatggttcttgaccagcacattcaatcctccaacctaccctactgccatgaccttccgcacatctctaagttttatctttgcaatactcaaggttctcggaaatttgctaatggttgtgataaaccatacagcttgagccagtgaggcagattgggctggtgccttcgtctgagttttcctgctttcctgcctcgtgcagattctgaggtatatctgctgccttggaagacataagaagcagtgatactccctggctcggttattttctccatacaatgcacacatggtacaatgatagaaggcaaaattgccactgtcttcttttttttctcatatatctaaggaagatatatcaggttgtgcctcatgtaccgcttctagtgaaatgtagaggaaggctcaaaggagtcaacatttagatctggaagggacaagtcatgccttgggcctagaataccctgatgagaaaagagaagaggaagggaggccatatctacaacacagcctctcggcactgctgctccttattttaactttgtcttgcattgtcctgtatttatcacagtttctgttgaacagcttttcaagtatttggggagtttatcttgccatcctccccttctggttctctgcacccacctgtcccactgcagttccttccgtgctctgtgactttaagagaagaaggggggaggggtcccggattttatgtttgtttgttttttctccttagcagtaggacttgatattttcaattttggaagaactaaaagatgaataaactgggttttttttgttgtttgttttt

SEQ ID NO: 422093 - DNA, 1716 bp, Homo sapiens
acagcgaggcgagaggggaaaaactggctaggtacgaggcttcctgcgacctgaaatacacagaaggagtacagtccctcaactggactaaaatcatgaagaccattgttgatgaccctgagggcttcttcgaacaaggtggctggtctttcctggagcctgagggtgaggggagtgatgctgaagaaggggattcagagtctgaaattgaagatgagacttttaatccttcagaagatgactatgaagaggaagaggaggacagtgatgaagattattcatcagaagcagaagagtcagactattctaaggagtcattgggtagtgaagaagagagtggaaaggattgggatgaactggaggaagaagcccgaaaagcggaccgagaaagtcgttacgaggaagaagaagaacaaagtcgaagtatgagccggaagaggaaggcatctgtgcacagttcgggccgtggctctaaccgtggttccagacacagctctgcaccccccaagaaaaagaggaagtaacttctgaactttggccctgagctccattcttcctccagccaacccctgaaaattttacatgacatagaaactgtatttttcctttcgttttcatttgaagttttgccatttgtgtttatgggtttagggggccatttgtgtggaccaatctactcggggaattccaggcccaccaggacacgtgccaatggccccattcagatggcaagggaggaggtgttcttgaagacaggaggaggctcccgctgttaataaatattgtttcattcttctctcttcctgtcaccttctgccaagacattgatggcttctgacatcttatttggtgtctcaaagctgtatttccaagacagtggtacaaggtgacccttaattacccgtatcatggttcttgaccagcacattcaatcctccaacctaccctactgccatgaccttccgcacatctctaagttttatctttgcaatactcaaggttctcggaaatttgctaatggttgtgataaaccatacagcttgagccagtgaggcagattgggctggtgccttcgtctgagttttcctgctttcctgcctcgtgcagattctgaggtatatctgctgccttggaagacataagaagcagtgatactccctggctcggttattttctccatacaatgcacacatggtacaatgatagaaggcaaaattgccactgtcttcttttttttctcatatatctaaggaagatatatcaggttgtgcctcatgtaccgcttctagtgaaatgtagaggaaggctcaaaggagtcaacatttagatctggaagggacaagtcatgccttgggcctagaataccctgatgagaaaagagaagaggaagggaggccatatctacaacacagcctctcggcactgctgctccttattttaactttgtcttgcattgtcctgtatttatcacagtttctgttgaacagcttttcaagtatttggggagtttatcttgccatcctccccttctggttctctgcacccacctgtcccactgcagttccttccgtgctctgtgactttaagagaagaaggggggaggggtcccggattttatgtttgtttgttttttctccttagcagtaggacttgatattttcaattttggaagaactaaaagatgaataaactgggttttttttgttgtttgttttt

SEQ ID NO: 422094 - DNA, 1745 bp, Homo sapiens
atagccacatattcatgtaatactcaagaattagcctactcagtttccaaacctaaatcctataatactttaattttctaggcttcttccaggttaggcatgtctttataatgctaatctagttactctgaagccaaaccccaaacaaacgttttaaagcttaaaaggaaataaatattaactgctgtgttccaagcattgggaataggtagttttcataggttaccttatttaacccttaaataattctcccttttgtaaataaaccaaggttcagaaagtacttgcccaatattaaaacttgggtctgattccaaagtgtattctctgtactatctcatgctatccagtaatattaggtacctaaagcttacctattgctaactaataatgcctcttctatttagcggaccgagaaagtcgttacgaggaagaagaagaacaaagtcgaagtatgagccggaagaggaaggcatctgtgcacagttcgggccgtggctctaaccgtggttccagacacagctctgcaccccccaagaaaaagaggaagtaacttctgaactttggccctgagctccattcttcctccagccaacccctgaaaattttacatgacatagaaactgtatttttcctttcgttttcatttgaagttttgccatttgtgtttatgggtttagggggccatttgtgtggaccaatctactcggggaattccaggcccaccaggacacgtgccaatggccccattcagatggcaagggaggaggtgttcttgaagacaggaggaggctcccgctgttaataaatattgtttcattcttctctcttcctgtcaccttctgccaagacattgatggcttctgacatcttatttggtgtctcaaagctgtatttccaagacagtggtacaaggtgacccttaattacccgtatcatggttcttgaccagcacattcaatcctccaacctaccctactgccatgaccttccgcacatctctaagttttatctttgcaatactcaaggttctcggaaatttgctaatggttgtgataaaccatacagcttgagccagtgaggcagattgggctggtgccttcgtctgagttttcctgctttcctgcctcgtgcagattctgaggtatatctgctgccttggaagacataagaagcagtgatactccctggctcggttattttctccatacaatgcacacatggtacaatgatagaaggcaaaattgccactgtcttcttttttttctcatatatctaaggaagatatatcaggttgtgcctcatgtaccgcttctagtgaaatgtagaggaaggctcaaaggagtcaacatttagatctggaagggacaagtcatgccttgggcctagaataccctgatgagaaaagagaagaggaagggaggccatatctacaacacagcctctcggcactgctgctccttattttaactttgtcttgcattgtcctgtatttatcacagtttctgttgaacagcttttcaagtatttggggagtttatcttgccatcctccccttctggttctctgcacccacctgtcccactgcagttccttccgtgctctgtgactttaagagaagaaggggggaggggtcccggattttatgtttgtttgttttttctccttagcagtaggacttgatattttcaattttggaagaactaaaagatgaataaactgggttttttttgttgtttgttttt

SEQ ID NO: 422095 - DNA, 1174 bp, Homo sapiens
gaaaattttaaatgaaaacgaaaggaaaaatacagtttctatgtcatgtaaactgtatttttcctttcgttttcatttgaagttttgccatttgtgtttatgggtttagggggccatttgtgtggaccaatctactcggggaattccaggcccaccaggacacgtgccaatggccccattcagatggcaagggaggaggtgttcttgaagacaggaggaggctcccgctgttaataaatattgtttcattcttctctcttcctgtcaccttctgccaagacattgatggcttctgacatcttatttggtgtctcaaagctgtatttccaagacagtggtacaaggtgacccttaattacccgtatcatggttcttgaccagcacattcaatcctccaacctaccctactgccatgaccttccgcacatctctaagttttatctttgcaatactcaaggttctcggaaatttgctaatggttgtgataaaccatacagcttgagccagtgaggcagattgggctggtgccttcgtctgagttttcctgctttcctgcctcgtgcagattctgaggtatatctgctgccttggaagacataagaagcagtgatactccctggctcggttattttctccatacaatgcacacatggtacaatgatagaaggcaaaattgccactgtcttcttttttttctcatatatctaaggaagatatatcaggttgtgcctcatgtaccgcttctagtgaaatgtagaggaaggctcaaaggagtcaacatttagatctggaagggacaagtcatgccttgggcctagaataccctgatgagaaaagagaagaggaagggaggccatatctacaacacagcctctcggcactgctgctccttattttaactttgtcttgcattgtcctgtatttatcacagtttctgttgaacagcttttcaagtatttggggagtttatcttgccatcctccccttctggttctctgcacccacctgtcccactgcagttccttccgtgctctgtgactttaagagaagaaggggggaggggtcccggattttatgtttgtttgttttttctccttagcagtaggacttgatattttcaattttggaagaactaaaagatgaataaactgggttttttttgttgtttgttttt

SEQ ID NO: 422096 - DNA, 3399 bp, Homo sapiens
ggcagaccgtcacgtgacgacgtcgattcgcgtgcggcagtggcgaagttgacaaaccccgcgaaaatcgactctttgcatcgcacattttgttgattttccctcgtttttctttctctctttcccccgtccatccgaaagagggttggaaaaaaacaaaacaaacaaacaaacaaaaaaaaaaaacctaacgctgttgggacccggaagcggaaagggcatctttgaggtcgatacttccgggtcattgggagagtgcgggattcctgggccgagagcgggtggctgagccgggacctcgcgtgattctcggaacccgaggagaagcggcgtccggggctatggctgtgactctggacaaagacgcttattatcggcgagtgaagagactgtacagcaattggcggaaaggagaagatgagtatgccaacgttgatgccattgttgtatcagtgggtgttgatgaagaaattgtttatgccaaatcaactgccttacagacatggctctttggttatgaactaactgatactatcatggtcttttgtgatgacaaaatcatctttatggccagcaagaaaaaagtggagttcttgaaacagattgccaacactaagggcaatgagaatgctaatggagcccctgccatcacactgctaatacgagaaaagaatgaaagtaataagagtagctttgacaaaatgattgaagccattaaagaaagcaagaatggcaagaagattggagtgttcagcaaagacaaattccctggagagttcatgaagagctggaatgactgcctcaacaaagaaggctttgacaaaatagatatcagtgcagttgtggcatataccatcgctgtaaaggaggatggggagctcaacctaatgaagaaagcagccagcatcacttctgaagtcttcaacaaattcttcaaggaaagagtcatggaaatagttgatgcagatgagaaagttcgacacagcaaactggctgagtctgtggaaaaggccattgaagagaaaaaataccttgctggggcagacccttctactgtggaaatgtgttaccctcctatcattcagagtggtggcaactataatctcaagttcagtgtggtgagtgacaagaatcatatgcactttggggctatcacttgtgccatgggtattcgcttcaagtcttactgctccaaccttgttcgcactttgatggttgatccttctcaagaagttcaagaaaattataactttttgctccagcttcaagaggagctgctgaaggaattaagacatggtgtgaagatatgtgacgtgtataacgctgtcatggacgtggttaaaaagcagaagccagaactgctgaacaaaattaccaaaaacctagggtttgggatgggaattgaattccgtgaaggctccctagtaatcaatagcaaaaatcaatacaaactgaagaaaggaatggttttcagcatcaatttaggattctcagacctgactaacaaggaggggaaaaagccagaagagaaaacctatgccctgttcattggtgacacagtgcttgtggatgaggatggcccagctactgttctcacttctgtgaagaagaaagtgaagaatgtggggattttcctaaagaatgaagatgaggaagaagaggaggaggagaaagatgaggcagaggaccttttgggaagaggttctcgggcagcattacttacagaaagaacaagaaatgaaatgactgcagaagagaagcgaagagcacatcagaaagaactagcggctcaactcaatgaagaagcaaagaggcgattgactgaacaaaagggagaacagcagattcagaaagctcgcaagtctaatgtgtcctataaaaacccatctctgatgcctaaggaaccgcatattcgggaaatgaagatctacatcgataagaaatatgagactgtaataatgcccgtgtttggcattgcaacaccgtttcacattgccacaatcaagaatataagtatgtccgtggaaggagattatacttacttgcgaatcaacttttattgcccaggcagtgctctgggcaggaatgaaggcaacatctttcctaaccctgaagcgacttttgtcaaggaaattacataccgagcatcaaatattaaggcacccggagaacagacagtaccagccttgaaccttcagaatgctttccgaattattaaagaagtacagaaacgttataaaactcgagaagctgaagagaaagagaaggagggcattgtaaaacaagactcactggtgatcaatctaaaccggagtaatccgaaactgaaagatctatacattcgcccaaatattgcccaaaagaggatgcaaggctcactggaggcccatgtcaatggcttccgcttcacatctgttcgaggagacaaagtggatattttgtacaataatattaagcatgctttgttccagccctgtgatggagaaatgattattgtcttgcactttcacctcaagaatgccatcatgtttgggaagaagcggcacacggatgtgcagttctacacagaagtgggagagataaccacggacttggggaaacatcagcatatgcatgaccgagatgacctctatgctgagcagatggaacgagaaatgaggcacaaactgaaaacagcctttaaaaatttcattgagaaagtagaggctctaactaaggaggaactggaatttgaagtgccttttagggacttgggatttaacggagctccctataggagtacctgcctccttcagcccactagtagtgcgctggtaaatgctacggaatggccaccttttgtggtgacattggatgaggtagagctgatccactttgagcgggtccagtttcacctgaagaactttgatatggtaatcgtctacaaggactacagcaagaaagtgaccatgatcaacgccattcctgtagcctctcttgaccccatcaaggaatggttgaattcctgcgacctgaaatacacagaaggagtacagtccctcaactggactaaaatcatgaagaccattgttgatgaccctgagggcttcttcgaacaaggtggctggtctttcctggagcctgagggtgaggggagtgatgctgaagaaggggattcagagtctgaaattgaagatgagacttttaatccttcagaagatgactatgaagaggaagaggaggacagtgatgaagattattcatcagaagcagaagagtcagactattctaaggagtcattgggtagtgaagaagagagtggaaaggattgggatgaactggaggaagaagcccgaaaagcggaccgagaaagtcgttacgaggaagacgcaggaactggtttcaagaagcaggaactgg

SEQ ID NO: 422097 - DNA, 2844 bp, Homo sapiens
  misc_feature (2658)..(2658): n is a, c, g, or t
ggcagaccgtcacgtgacgacgtcgattcgcgtgcggcagtggcgaagttgacaaaccccgcgaaaatcgactctttgcatcgcacattttgttgattttccctcgtttttctttctctctttcccccgtccatccgaaagagggttggaaaaaaacaaaacaaacaaacaaacaaaaaaaaaaaacctaacgctgttgggacccggaagcggaaagggcatctttgaggtcgatacttccgggtcattgggagagtgcgggattcctgggccgagagcgggtggctgagccgggacctcgcgtgattctcggaacccgaggagaagcggcgtccggggctatggctgtgactctggacaaagacgcttattatcggcgagtgaagagactgtacagcaattggcggaaaggagaagatgagtatgccaacgttgatgccattgttgtatcagtgggtgttgatgaagaaattgtttatgccaaatcaactgccttacagacatggctctttggttatgaactaactgatactatcatggtcttttgtgatgacaaaatcatctttatggccagcaagaaaaaagtggagttcttgaaacagattgccaacactaagggcaatgagaatgctaatggagcccctgccatcacactgctaatacgagaaaagaatgaaagtaataagagtagctttgacaaaatgattgaagccattaaagaaagcaagaatggcaagaagattggagtgttcagcaaagacaaattccctggagagttcatgaagagctggaatgactgcctcaacaaagaaggctttgacaaaatagatatcagtgcagttgtggcatataccatcgctgtaaaggaggatggggagctcaacctaatgaagaaagcagccagcatcacttctgaagtcttcaacaaattcttcaaggaaagagtcatggaaatagttgatgcagatgagaaagttcgacacagcaaactggctgagtctgtggaaaaggccattgaagagaaaaaataccttgctggggcagacccttctactgtggaaatgtgttaccctcctatcattcagagtggtggcaactataatctcaagttcagtgtggtgagtgacaagaatcatatgcactttggggctatcacttgtgccatgggtattcgcttcaagtcttactgctccaaccttgttcgcactttgatggttgatccttctcaagaagttcaagaaaattataactttttgctccagcttcaagaggagctgctgaaggaattaagacatggtgtgaagatatgtgacgtgtataacgctgtcatggacgtggttaaaaagcagaagccagaactgctgaacaaaattaccaaaaacctagggtttgggatgggaattgaattccgtgaaggctccctagtaatcaatagcaaaaatcaatacaaactgaagaaaggaatggttttcagcatcaatttaggattctcagacctgactaacaaggaggggaaaaagccagaagagaaaacctatgccctgttcattggtgacacagtgcttgtggatgaggatggcccagctactgttctcacttctgtgaagaagaaagtgaagaatgtggggattttcctaaagaatgaagatgaggaagaagaggaggaggagaaagatgaggcagaggaccttttgggaagaggttctcgggcagcattacttacagaaagaacaagaaatgaaatgactgcagaagagaagcgaagagcacatcagaaagaactagcggctcaactcaatgaagaagcaaagaggcgattgactgaacaaaagggagaacagcagattcagaaagctcgcaagtctaatgtgtcctataaaaacccatctctgatgcctaaggaaccgcatattcgggaaatgaagatctacatcgataagaaatatgagactgtaataatgcccgtgtttggcattgcaacaccgtttcacattgccacaatcaagaatataagtatgtccgtggaaggagattatacttacttgcgaatcaacttttattgcccaggcagtgctctgggcaggaatgaaggcaacatctttcctaaccctgaagcgacttttgtcaaggaaattacataccgagcatcaaatattaaggcacccggagaacagacagtaccagccttgaaccttcagaatgctttccgaattattaaagaagtacagaaacgttataaaactcgagaagctgaagagaaagagaaggagggcattgtaaaacaagactcactggtgatcaatctaaaccggagtaatccgaaactgaaagatctatacattcgcccaaatattgcccaaaagaggatgcaaggctcactggaggcccatgtcaatggcttccgcttcacatctgttcgaggagacaaagtggatattttgtacaataatattaagcatgctttgttccagccctgtgatggagaaatgattattgtcttgcactttcacctcaagaaattgcctccttatttatcaacatctttttcctccctttccctgagagctcacagtacaatgtttcagaagccccatttgcacaggttttcagcaactcagaatgctctacttctttttctttgagaaaggattaagatanactcctgctgtgcccccatctttcctccaaactcctgcctgtgtttgtgtggatacccagtcccagaaccacactgttgagttggacacactgtaaacccctgggtaactgtcaagtcatgatggagacttcaggttgttctgtataaaatgcaaaataaatgtttttattaacaaaaaaaaaaaa

SEQ ID NO: 422098 - DNA, 1196 bp, Homo sapiens
ggcagaccgtcacgtgacgacgtcgattcgcgtgcggcagtggcgaagttgacaaaccccgcgaaaatcgactctttgcatcgcacattttgttgattttccctcgtttttctttctctctttcccccgtccatccgaaagagggttggaaaaaaacaaaacaaacaaacaaacaaaaaaaaaaaacctaacgctgttgggacccggaagcggaaagggcatctttgaggtcgatacttccgggtcattgggagagtgcgggattcctgggccgagagcgggtggctgagccgggacctcgcgtgattctcggaacccgaggagaagcggcgtccggggctatggctgtgactctggacaaagacgcttattatcggcgagtgaagagactgtacagcaattggcgggaattcccgggttctgtgcctcacccttttcgttgctcccgaatcattcaccggaggcggccacgaacgctgccccttaacagggaatcccccgcattcaccctgtcctgcggccatcaccatcttccccgcgtgccagccttggtcatgcatagcagcacctctcgcagtctcttcccgccctagaagaggcaacatccttccctcctactccgtggtcacgtcttgctgccctcccctgccgtgttctcacgcactcgctctgtccctccagaaccacaatattccacccctggtcccgccaggattataaccgtcttcgtaaaggagagatggaagggcaaggaggatgtcaatcgggcttttagcgtttatcgtttgcggggcttttgctggagttaaaaaaagaaatactgctcacgcgcaaccgcctcatgttctaggccctgctgtgggttacagagagggacctaacgctgaaagcctgcaggcattagtaataacaaaacaaaacaaaacgatgcctaaaaccttattagttccttggtagcgtatccggggcacgtgttcattaaaagagctgtggcagttcccagttttttaaagattcggcagttttgctgctctaaaaacgtccacagttaaaacttatttttatgatgttaacttactaattgagcaaacatttggttgcattctgtgatgcagtctgagttggctagcttaagtcttgcccctgaaccctgtcatcaagggaagatacagctaataaagatttttttttaacct

SEQ ID NO: 422099 - DNA, 1309 bp, Homo sapiens
ggcagaccgtcacgtgacgacgtcgattcgcgtgcggcagtggcgaagttgacaaaccccgcgaaaatcgactctttgcatcgcacattttgttgattttccctcgtttttctttctctctttcccccgtccatccgaaagagggttggaaaaaaacaaaacaaacaaacaaacaaaaaaaaaaaacctaacgctgttgggacccggaagcggaaagggcatctttgaggtcgatacttccgggtcattgggagagtgcgggattcctgggccgagagcgggtggctgagccgggacctcgcgtgattctcggaacccgaggagaagcggcgtccggggctatggctgtgactctggacaaagacgcttattatcggcgagtgaagagactgtacagcaattggcgggaattcccgggttctgtgcctcacccttttcgttgctcccgaatcattcaccggaggcggccacgaacgctgccccttaacagggaatcccccgcattcaccctgtcctgcggccatcaccatcttccccgcgtgccagccttggtcatgcatagcagcacctctcgcagtctcttcccgccctagaagaggcaacatccttccctcctactccgtggtcacgtcttgctgccctcccctgccgtgttctcacgcactcgctctgtccctccagaaccacaatattccacccctggtcccgccaggattataaccgtcttcgtaaaggagagatggaagggcaaggaggatgtcaatcgggcttttagcgtttatcgtttgcggggcttttgctggagttaaaaaaagaaatactgctcacgcgcaaccgcctcatgttctaggccctgctgtgggttacagagagggacctaacgctgaaagcctgcaggcattagtaataacaaaacaaaacaaaacgatgcctaaaaccttattagttccttggtagcgtatccggggcacgtgttcattaaaagagctgtggcagttcccagttttttaaagattcggcagttttgctgctctaaaaacgtccacagttaaaacttatttttatgatgttaacttactaattgagcaaacatttggttgcattctgtgatgcagtctgagttggctagcttaagtcttgcccctgaaccctgtcatcaagggaagatacagctaataaagatttttttttaacctgaaaaacgttttgagaaaaatgatcagctctcatttcagcattgtaaattatctttcaaactggtcatctactaaaaccaagccattaaaattggtcgtttccttgccattca

SEQ ID NO: 422100 - DNA, 245 bp, Homo sapiens
taaggtaaatgtcaaaaaaaaatcagtattatgctctaactcaccaggggagtgatgctgaagaaggggattcagagtctgaaattgaagatgagacttttaatccttcagaagatgactatgaagaggaagaggaggacagtgatgaagattattcatcagaagcagaagagtcaggttagtcttacagagcaaagttcgtcctggcttcctaatctaatgtcatttctgaaaactactttttt

SEQ ID NO: 422101 - DNA, 660 bp, Homo sapiens
tttattttttattttttaagataatgtctttttaaatagtttattttaaatggttccttcacatagtttccttgagtttattctccttgagggatgatttttgtatcttgcagatcctttttctgtggcttcttagtatgttgtactgcctcagtctttcaaaaaaaaaaccaaaaaacagcttaagttatcttttatgtagtgatttagatcatgaaagttatttgaaatattattgctttgggggaaatacttatatgctaatgattcagtttctccctgacagccaccttttgtggtgacattggatgaggtagagctgatccactttgagcgggtccagtttcacctgaagaactttgatatggtaatcgtctacaaggactacagcaagaaagtgaccatgatcaacgccattcctgtagcctctcttgaccccatcaaggaatggttgaagtaagtaaatctgccatcagtctcccatttagcccatgagccctgttttatagaatttgaatgtggtatgttgtgcataaaatctactgatatacttaaagtgagactgccttttggttgttacagaccaggacttgaaaacttgagatctattagataacggagctgttcactttttcttgaattcccaacaatagcttgtgc

SEQ ID NO: 422102 - DNA, 4627 bp, Homo sapiens
ctgaattgaacaacagtcttcatccaacactccaaaccagttggcagggtaggacccttggtgtggggtgttggatgaagactgttgttcaattcaggggccggtggggctgagggtttctgtgggggaagacctgataccgccaggccccgaagcccttcaggagccagtcggtgggggtcctcacttacagggtaaaaacggggtctctgaggtgggccctgaccaggaaacgctgagccgggacctcgcgtgattctcggaacccgaggagaagcggcgtccggggctatggctgtgactctggacaaagacgcttattatcggcgagtgaagagactgtacagcaattggcggaaaggagaagatgagtatgccaacgttgatgccattgttgtatcagtgggtgttgatgaagaaattgtttatgccaaatcaactgccttacagacatggctctttggttatgaactaactgatactatcatggtcttttgtgatgacaaaatcatctttatggccagcaagaaaaaagtggagttcttgaaacagattgccaacactaagggcaatgagaatgctaatggagcccctgccatcacactgctaatacgagaaaagaatgaaagtaataagagtagctttgacaaaatgattgaagccattaaagaaagcaagaatggcaagaagattggagtgttcagcaaagacaaattccctggagagttcatgaagagctggaatgactgcctcaacaaagaaggctttgacaaaatagatatcagtgcagttgtggcatataccatcgctgtaaaggaggatggggagctcaacctaatgaagaaagcagccagcatcacttctgaagtcttcaacaaattcttcaaggaaagagtcatggaaatagttgatgcagatgagaaagttcgacacagcaaactggctgagtctgtggaaaaggccattgaagagaaaaaataccttgctggggcagacccttctactgtggaaatgtgttaccctcctatcattcagagtggtggcaactataatctcaagttcagtgtggtgagtgacaagaatcatatgcactttggggctatcacttgtgccatgggtattcgcttcaagtcttactgctccaaccttgttcgcactttgatggttgatccttctcaagaagttcaagaaaattataactttttgctccagcttcaagaggagctgctgaaggaattaagacatggtgtgaagatatgtgacgtgtataacgctgtcatggacgtggttaaaaagcagaagccagaactgctgaacaaaattaccaaaaacctagggtttgggatgggaattgaattccgtgaaggctccctagtaatcaatagcaaaaatcaatacaaactgaagaaaggaatggttttcagcatcaatttaggattctcagacctgactaacaaggaggggaaaaagccagaagagaaaacctatgccctgttcattggtgacacagtgcttgtggatgaggatggcccagctactgttctcacttctgtgaagaagaaagtgaagaatgtggggattttcctaaagaatgaagatgaggaagaagaggaggaggagaaagatgaggcagaggaccttttgggaagaggttctcgggcagcattacttacagaaagaacaagaaatgaaatgactgcagaagagaagcgaagagcacatcagaaagaactagcggctcaactcaatgaagaagcaaagaggcgattgactgaacaaaagggagaacagcagattcagaaagctcgcaagtctaatgtgtcctataaaaacccatctctgatgcctaaggaaccgcatattcgggaaatgaagatctacatcgataagaaatatgagactgtaataatgcccgtgtttggcattgcaacaccgtttcacattgccacaatcaagaatataagtatgtccgtggaaggagattatacttacttgcgaatcaacttttattgcccaggcagtgctctgggcaggaatgaaggcaacatctttcctaaccctgaagcgacttttgtcaaggaaattacataccgagcatcaaatattaaggcacccggagaacagacagtaccagccttgaaccttcagaatgctttccgaattattaaagaagtacagaaacgttataaaactcgagaagctgaagagaaagagaaggagggcattgtaaaacaagactcactggtgatcaatctaaaccggagtaatccgaaactgaaagatctatacattcgcccaaatattgcccaaaagaggatgcaaggctcactggaggcccatgtcaatggcttccgcttcacatctgttcgaggagacaaagtggatattttgtacaataatattaagcatgctttgttccagccctgtgatggagaaatgattattgtcttgcactttcacctcaagaatgccatcatgtttgggaagaagcggcacacggatgtgcagttctacacagaagtgggagagataaccacggacttggggaaacatcagcatatgcatgaccgagatgacctctatgctgagcagatggaacgagaaatgaggcacaaactgaaaacagcctttaaaaatttcattgagaaagtagaggctctaactaaggaggaactggaatttgaagtgccttttagggacttgggatttaacggagctccctataggagtacctgcctccttcagcccactagtagtgcgctggtaaatgctacggaatggccaccttttgtggtgacattggatgaggtagagctgatccactttgagcgggtccagtttcacctgaagaactttgatatggtaatcgtctacaaggactacagcaagaaagtgaccatgatcaacgccattcctgtagcctctcttgaccccatcaaggaatggttgaattcctgcgacctgaaatacacagaaggagtacagtccctcaactggactaaaatcatgaagaccattgttgatgaccctgagggcttcttcgaacaaggtggctggtctttcctggagcctgagggtgaggggagtgatgctgaagaaggggattcagagtctgaaattgaagatgagacttttaatccttcagaagatgactatgaagaggaagaggaggacagtgatgaagattattcatcagaagcagaagagtcagactattctaaggagtcattgggtagtgaagaagagagtggaaaggattgggatgaactggaggaagaagcccgaaaagcggaccgagaaagtcgttacgaggaagaagaagaacaaagtcgaagtatgagccggaagaggaaggcatctgtgcacagttcgggccgtggctctaaccgtggttccagacacagctctgcaccccccaagaaaaagaggaagtaacttctgaactttggccctgagctccattcttcctccagccaacccctgaaaattttacatgacatagaaactgtatttttcctttcgttttcatttgaagttttgccatttgtgtttatgggtttagggggccatttgtgtggaccaatctactcggggaattccaggcccaccaggacacgtgccaatggccccattcagatggcaagggaggaggtgttcttgaagacaggaggaggctcccgctgttaataaatattgtttcattcttctctcttcctgtcaccttctgccaagacattgatggcttctgacatcttatttggtgtctcaaagctgtatttccaagacagtggtacaaggtgacccttaattacccgtatcatggttcttgaccagcacattcaatcctccaacctaccctactgccatgaccttccgcacatctctaagttttatctttgcaatactcaaggttctcggaaatttgctaatggttgtgataaaccatacagcttgagccagtgaggcagattgggctggtgccttcgtctgagttttcctgctttcctgcctcgtgcagattctgaggtatatctgctgccttggaagacataagaagcagtgatactccctggctcggttattttctccatacaatgcacacatggtacaatgatagaaggcaaaattgccactgtcttcttttttttctcatatatctaaggaagatatatcaggttgtgcctcatgtaccgcttctagtgaaatgtagaggaaggctcaaaggagtcaacatttagatctggaagggacaagtcatgccttgggcctagaataccctgatgagaaaagagaagaggaagggaggccatatctacaacacagcctctcggcactgctgctccttattttaactttgtcttgcattgtcctgtatttatcacagtttctgttgaacagcttttcaagtatttggggagtttatcttgccatcctccccttctggttctctgcacccacctgtcccactgcagttccttccgtgctctgtgactttaagagaagaaggggggaggggtcccggattttatgtttgtttgttttttctccttagcagtaggacttgatattttcaattttggaagaactaaaagatgaataaactgggttttttttgttgtttgttttt

SEQ ID NO: 422103 - DNA, 4709 bp, Homo sapiens
ggcagaccgtcacgtgacgacgtcgattcgcgtgcggcagtggcgaagttgacaaaccccgcgaaaatcgactctttgcatcgcacattttgttgattttccctcgtttttctttctctctttcccccgtccatccgaaagagggttggaaaaaaacaaaacaaacaaacaaacaaaaaaaaaaaacctaacgctgttgggacccggaagcggaaagggcatctttgaggtcgatacttccgggtcattgggagagtgcgggattcctgggccgagagcgggtggctgagccgggacctcgcgtgattctcggaacccgaggagaagcggcgtccggggctatggctgtgactctggacaaagacgcttattatcggcgagtgaagagactgtacagcaattggcggaaaggagaagatgagtatgccaacgttgatgccattgttgtatcagtgggtgttgatgaagaaattgtttatgccaaatcaactgccttacagacatggctctttggttatgaactaactgatactatcatggtcttttgtgatgacaaaatcatctttatggccagcaagaaaaaagtggagttcttgaaacagattgccaacactaagggcaatgagaatgctaatggagcccctgccatcacactgctaatacgagaaaagaatgaaagtaataagagtagctttgacaaaatgattgaagccattaaagaaagcaagaatggcaagaagattggagtgttcagcaaagacaaattccctggagagttcatgaagagctggaatgactgcctcaacaaagaaggctttgacaaaatagatatcagtgcagttgtggcatataccatcgctgtaaaggaggatggggagctcaacctaatgaagaaagcagccagcatcacttctgaagtcttcaacaaattcttcaaggaaagagtcatggaaatagttgatgcagatgagaaagttcgacacagcaaactggctgagtctgtggaaaaggccattgaagagaaaaaataccttgctggggcagacccttctactgtggaaatgtgttaccctcctatcattcagagtggtggcaactataatctcaagttcagtgtggtgagtgacaagaatcatatgcactttggggctatcacttgtgccatgggtattcgcttcaagtcttactgctccaaccttgttcgcactttgatggttgatccttctcaagaagttcaagaaaattataactttttgctccagcttcaagaggagctgctgaaggaattaagacatggtgtgaagatatgtgacgtgtataacgctgtcatggacgtggttaaaaagcagaagccagaactgctgaacaaaattaccaaaaacctagggtttgggatgggaattgaattccgtgaaggctccctagtaatcaatagcaaaaatcaatacaaactgaagaaaggaatggttttcagcatcaatttaggattctcagacctgactaacaaggaggggaaaaagccagaagagaaaacctatgccctgttcattggtgacacagtgcttgtggatgaggatggcccagctactgttctcacttctgtgaagaagaaagtgaagaatgtggggattttcctaaagaatgaagatgaggaagaagaggaggaggagaaagatgaggcagaggaccttttgggaagaggttctcgggcagcattacttacagaaagaacaagaaatgaaatgactgcagaagagaagcgaagagcacatcagaaagaactagcggctcaactcaatgaagaagcaaagaggcgattgactgaacaaaagggagaacagcagattcagaaagctcgcaagtctaatgtgtcctataaaaacccatctctgatgcctaaggaaccgcatattcgggaaatgaagatctacatcgataagaaatatgagactgtaataatgcccgtgtttggcattgcaacaccgtttcacattgccacaatcaagaatataagtatgtccgtggaaggagattatacttacttgcgaatcaacttttattgcccaggcagtgctctgggcaggaatgaaggcaacatctttcctaaccctgaagcgacttttgtcaaggaaattacataccgagcatcaaatattaaggcacccggagaacagacagtaccagccttgaaccttcagaatgctttccgaattattaaagaagtacagaaacgttataaaactcgagaagctgaagagaaagagaaggagggcattgtaaaacaagactcactggtgatcaatctaaaccggagtaatccgaaactgaaagatctatacattcgcccaaatattgcccaaaagaggatgcaaggctcactggaggcccatgtcaatggcttccgcttcacatctgttcgaggagacaaagtggatattttgtacaataatattaagcatgctttgttccagccctgtgatggagaaatgattattgtcttgcactttcacctcaagaatgccatcatgtttgggaagaagcggcacacggatgtgcagttctacacagaagtgggagagataaccacggacttggggaaacatcagcatatgcatgaccgagatgacctctatgctgagcagatggaacgagaaatgaggcacaaactgaaaacagcctttaaaaatttcattgagaaagtagaggctctaactaaggaggaactggaatttgaagtgccttttagggacttgggatttaacggagctccctataggagtacctgcctccttcagcccactagtagtgcgctggtaaatgctacggaatggccaccttttgtggtgacattggatgaggtagagctgatccactttgagcgggtccagtttcacctgaagaactttgatatggtaatcgtctacaaggactacagcaagaaagtgaccatgatcaacgccattcctgtagcctctcttgaccccatcaaggaatggttgaattcctgcgacctgaaatacacagaaggagtacagtccctcaactggactaaaatcatgaagaccattgttgatgaccctgagggcttcttcgaacaaggtggctggtctttcctggagcctgagggtgaggggagtgatgctgaagaaggggattcagagtctgaaattgaagatgagacttttaatccttcagaagatgactatgaagaggaagaggaggacagtgatgaagattattcatcagaagcagaagagtcagactattctaaggagtcattgggtagtgaagaagagagtggaaaggattgggatgaactggaggaagaagcccgaaaagcggaccgagaaagtcgttacgaggaagaagaagaacaaagtcgaagtatgagccggaagaggaaggcatctgtgcacagttcgggccgtggctctaaccgtggttccagacacagctctgcaccccccaagaaaaagaggaagtaacttctgaactttggccctgagctccattcttcctccagccaacccctgaaaattttacatgacatagaaactgtatttttcctttcgttttcatttgaagttttgccatttgtgtttatgggtttagggggccatttgtgtggaccaatctactcggggaattccaggcccaccaggacacgtgccaatggccccattcagatggcaagggaggaggtgttcttgaagacaggaggaggctcccgctgttaataaatattgtttcattcttctctcttcctgtcaccttctgccaagacattgatggcttctgacatcttatttggtgtctcaaagctgtatttccaagacagtggtacaaggtgacccttaattacccgtatcatggttcttgaccagcacattcaatcctccaacctaccctactgccatgaccttccgcacatctctaagttttatctttgcaatactcaaggttctcggaaatttgctaatggttgtgataaaccatacagcttgagccagtgaggcagattgggctggtgccttcgtctgagttttcctgctttcctgcctcgtgcagattctgaggtatatctgctgccttggaagacataagaagcagtgatactccctggctcggttattttctccatacaatgcacacatggtacaatgatagaaggcaaaattgccactgtcttcttttttttctcatatatctaaggaagatatatcaggttgtgcctcatgtaccgcttctagtgaaatgtagaggaaggctcaaaggagtcaacatttagatctggaagggacaagtcatgccttgggcctagaataccctgatgagaaaagagaagaggaagggaggccatatctacaacacagcctctcggcactgctgctccttattttaactttgtcttgcattgtcctgtatttatcacagtttctgttgaacagcttttcaagtatttggggagtttatcttgccatcctccccttctggttctctgcacccacctgtcccactgcagttccttccgtgctctgtgactttaagagaagaaggggggaggggtcccggattttatgtttgtttgttttttctccttagcagtaggacttgatattttcaattttggaagaactaaaagatgaataaactgggttttttttgttgtttgttttttttttttttttttttttttttttttttatgag

SEQ ID NO: 422104 - DNA, 4506 bp, Homo sapiens
ggcagaccgtcacgtgacgacgtcgattcgcgtgcggcagtggcgaagttgacaaaccccgcgaaaatcgactctttgcatcgcacattttgttgattttccctcgtttttctttctctctttcccccgtccatccgaaagagggttggaaaaaaacaaaacaaacaaacaaacaaaaaaaaaaaacctaacgctgttgggacccggaagcggaaagggcatctttgaggtcgatacttccgggtcattgggagagtgcgggattcctgggccgagagcgggtggctgagccgggacctcgcgtgattctcggaacccgaggagaagcggcgtccggggctatggctgtgactctggacaaagacgcttattatcggcgagtgaagagactgtacagcaattggcggaaaggagaagatgagtatgccaacgttgatgccattgttgtatcagtgggtgttgatgaagaaattgtttatgccaaatcaactgccttacagaatgaaagtaataagagtagctttgacaaaatgattgaagccattaaagaaagcaagaatggcaagaagattggagtgttcagcaaagacaaattccctggagagttcatgaagagctggaatgactgcctcaacaaagaaggctttgacaaaatagatatcagtgcagttgtggcatataccatcgctgtaaaggaggatggggagctcaacctaatgaagaaagcagccagcatcacttctgaagtcttcaacaaattcttcaaggaaagagtcatggaaatagttgatgcagatgagaaagttcgacacagcaaactggctgagtctgtggaaaaggccattgaagagaaaaaataccttgctggggcagacccttctactgtggaaatgtgttaccctcctatcattcagagtggtggcaactataatctcaagttcagtgtggtgagtgacaagaatcatatgcactttggggctatcacttgtgccatgggtattcgcttcaagtcttactgctccaaccttgttcgcactttgatggttgatccttctcaagaagttcaagaaaattataactttttgctccagcttcaagaggagctgctgaaggaattaagacatggtgtgaagatatgtgacgtgtataacgctgtcatggacgtggttaaaaagcagaagccagaactgctgaacaaaattaccaaaaacctagggtttgggatgggaattgaattccgtgaaggctccctagtaatcaatagcaaaaatcaatacaaactgaagaaaggaatggttttcagcatcaatttaggattctcagacctgactaacaaggaggggaaaaagccagaagagaaaacctatgccctgttcattggtgacacagtgcttgtggatgaggatggcccagctactgttctcacttctgtgaagaagaaagtgaagaatgtggggattttcctaaagaatgaagatgaggaagaagaggaggaggagaaagatgaggcagaggaccttttgggaagaggttctcgggcagcattacttacagaaagaacaagaaatgaaatgactgcagaagagaagcgaagagcacatcagaaagaactagcggctcaactcaatgaagaagcaaagaggcgattgactgaacaaaagggagaacagcagattcagaaagctcgcaagtctaatgtgtcctataaaaacccatctctgatgcctaaggaaccgcatattcgggaaatgaagatctacatcgataagaaatatgagactgtaataatgcccgtgtttggcattgcaacaccgtttcacattgccacaatcaagaatataagtatgtccgtggaaggagattatacttacttgcgaatcaacttttattgcccaggcagtgctctgggcaggaatgaaggcaacatctttcctaaccctgaagcgacttttgtcaaggaaattacataccgagcatcaaatattaaggcacccggagaacagacagtaccagccttgaaccttcagaatgctttccgaattattaaagaagtacagaaacgttataaaactcgagaagctgaagagaaagagaaggagggcattgtaaaacaagactcactggtgatcaatctaaaccggagtaatccgaaactgaaagatctatacattcgcccaaatattgcccaaaagaggatgcaaggctcactggaggcccatgtcaatggcttccgcttcacatctgttcgaggagacaaagtggatattttgtacaataatattaagcatgctttgttccagccctgtgatggagaaatgattattgtcttgcactttcacctcaagaatgccatcatgtttgggaagaagcggcacacggatgtgcagttctacacagaagtgggagagataaccacggacttggggaaacatcagcatatgcatgaccgagatgacctctatgctgagcagatggaacgagaaatgaggcacaaactgaaaacagcctttaaaaatttcattgagaaagtagaggctctaactaaggaggaactggaatttgaagtgccttttagggacttgggatttaacggagctccctataggagtacctgcctccttcagcccactagtagtgcgctggtaaatgctacggaatggccaccttttgtggtgacattggatgaggtagagctgatccactttgagcgggtccagtttcacctgaagaactttgatatggtaatcgtctacaaggactacagcaagaaagtgaccatgatcaacgccattcctgtagcctctcttgaccccatcaaggaatggttgaattcctgcgacctgaaatacacagaaggagtacagtccctcaactggactaaaatcatgaagaccattgttgatgaccctgagggcttcttcgaacaaggtggctggtctttcctggagcctgagggtgaggggagtgatgctgaagaaggggattcagagtctgaaattgaagatgagacttttaatccttcagaagatgactatgaagaggaagaggaggacagtgatgaagattattcatcagaagcagaagagtcagactattctaaggagtcattgggtagtgaagaagagagtggaaaggattgggatgaactggaggaagaagcccgaaaagcggaccgagaaagtcgttacgaggaagaagaagaacaaagtcgaagtatgagccggaagaggaaggcatctgtgcacagttcgggccgtggctctaaccgtggttccagacacagctctgcaccccccaagaaaaagaggaagtaacttctgaactttggccctgagctccattcttcctccagccaacccctgaaaattttacatgacatagaaactgtatttttcctttcgttttcatttgaagttttgccatttgtgtttatgggtttagggggccatttgtgtggaccaatctactcggggaattccaggcccaccaggacacgtgccaatggccccattcagatggcaagggaggaggtgttcttgaagacaggaggaggctcccgctgttaataaatattgtttcattcttctctcttcctgtcaccttctgccaagacattgatggcttctgacatcttatttggtgtctcaaagctgtatttccaagacagtggtacaaggtgacccttaattacccgtatcatggttcttgaccagcacattcaatcctccaacctaccctactgccatgaccttccgcacatctctaagttttatctttgcaatactcaaggttctcggaaatttgctaatggttgtgataaaccatacagcttgagccagtgaggcagattgggctggtgccttcgtctgagttttcctgctttcctgcctcgtgcagattctgaggtatatctgctgccttggaagacataagaagcagtgatactccctggctcggttattttctccatacaatgcacacatggtacaatgatagaaggcaaaattgccactgtcttcttttttttctcatatatctaaggaagatatatcaggttgtgcctcatgtaccgcttctagtgaaatgtagaggaaggctcaaaggagtcaacatttagatctggaagggacaagtcatgccttgggcctagaataccctgatgagaaaagagaagaggaagggaggccatatctacaacacagcctctcggcactgctgctccttattttaactttgtcttgcattgtcctgtatttatcacagtttctgttgaacagcttttcaagtatttggggagtttatcttgccatcctccccttctggttctctgcacccacctgtcccactgcagttccttccgtgctctgtgactttaagagaagaaggggggaggggtcccggattttatgtttgtttgttttttctccttagcagtaggacttgatattttcaattttggaagaactaaaagatgaataaactgggttttttttgttgtttgttttt

SEQ ID NO: 422105 - DNA, 3095 bp, Homo sapiens
caggaatgaaggcaacatctttcccaaccctgaagacggatatgggattttcctaaagaatgaagatgaggaagaagaggaggaggagaaagatgaggcagaggaccttttgggaagaggttctcgggcagcattacttacagaaagaacaagaaatgaaatgactgcagaagagaagcgaagagcacatcagaaagaactagcggctcaactcaatgaagaagcaaagaggcgattgactgaacaaaagggagaacagcagattcagaaagctcgcaagtctaatgtgtcctataaaaacccatctctgatgcctaaggaaccgcatattcgggaaatgaagatctacatcgataagaaatatgagactgtaataatgcccgtgtttggcattgcaacaccgtttcacattgccacaatcaagaatataagtatgtccgtggaaggagattatacttacttgcgaatcaacttttattgcccaggcagtgctctgggcaggaatgaaggcaacatctttcctaaccctgaagcgacttttgtcaaggaaattacataccgagcatcaaatattaaggcacccggagaacagacagtaccagccttgaaccttcagaatgctttccgaattattaaagaagtacagaaacgttataaaactcgagaagctgaagagaaagagaaggagggcattgtaaaacaagactcactggtgatcaatctaaaccggagtaatccgaaactgaaagatctatacattcgcccaaatattgcccaaaagaggatgcaaggctcactggaggcccatgtcaatggcttccgcttcacatctgttcgaggagacaaagtggatattttgtacaataatattaagcatgctttgttccagccctgtgatggagaaatgattattgtcttgcactttcacctcaagaatgccatcatgtttgggaagaagcggcacacggatgtgcagttctacacagaagtgggagagataaccacggacttggggaaacatcagcatatgcatgaccgagatgacctctatgctgagcagatggaacgagaaatgaggcacaaactgaaaacagcctttaaaaatttcattgagaaagtagaggctctaactaaggaggaactggaatttgaagtgccttttagggacttgggatttaacggagctccctataggagtacctgcctccttcagcccactagtagtgcgctggtaaatgctacggaatggccaccttttgtggtgacattggatgaggtagagctgatccactttgagcgggtccagtttcacctgaagaactttgatatggtaatcgtctacaaggactacagcaagaaagtgaccatgatcaacgccattcctgtagcctctcttgaccccatcaaggaatggttgaattcctgcgacctgaaatacacagaaggagtacagtccctcaactggactaaaatcatgaagaccattgttgatgaccctgagggcttcttcgaacaaggtggctggtctttcctggagcctgagggtgaggggagtgatgctgaagaaggggattcagagtctgaaattgaagatgagacttttaatccttcagaagatgactatgaagaggaagaggaggacagtgatgaagattattcatcagaagcagaagagtcagactattctaaggagtcattgggtagtgaagaagagagtggaaaggattgggatgaactggaggaagaagcccgaaaagcggaccgagaaagtcgttacgaggaagaagaagaacaaagtcgaagtatgagccggaagaggaaggcatctgtgcacagttcgggccgtggctctaaccgtggttccagacacagctctgcaccccccaagaaaaagaggaagtaacttctgaactttggccctgagctccattcttcctccagccaacccctgaaaattttacatgacatagaaactgtatttttcctttcgttttcatttgaagttttgccatttgtgtttatgggtttagggggccatttgtgtggaccaatctactcggggaattccaggcccaccaggacacgtgccaatggccccattcagatggcaagggaggaggtgttcttgaagacaggaggaggctcccgctgttaataaatattgtttcattcttctctcttcctgtcaccttctgccaagacattgatggcttctgacatcttatttggtgtctcaaagctgtatttccaagacagtggtacaaggtgacccttaattacccgtatcatggttcttgaccagcacattcaatcctccaacctaccctactgccatgaccttccgcacatctctaagttttatctttgcaatactcaaggttctcggaaatttgctaatggttgtgataaaccatacagcttgagccagtgaggcagattgggctggtgccttcgtctgagttttcctgctttcctgcctcgtgcagattctgaggtatatctgctgccttggaagacataagaagcagtgatactccctggctcggttattttctccatacaatgcacacatggtacaatgatagaaggcaaaattgccactgtcttcttttttttctcatatatctaaggaagatatatcaggttgtgcctcatgtaccgcttctagtgaaatgtagaggaaggctcaaaggagtcaacatttagatctggaagggacaagtcatgccttgggcctagaataccctgatgagaaaagagaagaggaagggaggccatatctacaacacagcctctcggcactgctgctccttattttaactttgtcttgcattgtcctgtatttatcacagtttctgttgaacagcttttcaagtatttggggagtttatcttgccatcctccccttctggttctctgcacccacctgtcccactgcagttccttccgtgctctgtgactttaagagaagaaggggggaggggtcccggattttatgtttgtttgttttttctccttagcagtaggacttgatattttcaattttggaagaactaaaagatgaataaactgggttttttttgttgtttgttttt

SEQ ID NO: 422106 - DNA, 2039 bp, Homo sapiens
atgatttttgtatcttgcagatcctttttctgtggcttcttagtatgttgtactgcctcagtctttcaaaaaaaaaaccaaaaaacagcttaagttatcttttatgtagtgatttagatcatgaaagttatttgaaatattattgctttgggggaaatacttatatgctaatgattcagtttctccctgacagccaccttttgtggtgacattggatgaggtagagctgatccactttgagcgggtccagtttcacctgaagaactttgatatggtaatcgtctacaaggactacagcaagaaagtgaccatgatcaacgccattcctgtagcctctcttgaccccatcaaggaatggttgaattcctgcgacctgaaatacacagaaggagtacagtccctcaactggactaaaatcatgaagaccattgttgatgaccctgagggcttcttcgaacaaggtggctggtctttcctggagcctgagggtgaggggagtgatgctgaagaaggggattcagagtctgaaattgaagatgagacttttaatccttcagaagatgactatgaagaggaagaggaggacagtgatgaagattattcatcagaagcagaagagtcagactattctaaggagtcattgggtagtgaagaagagagtggaaaggattgggatgaactggaggaagaagcccgaaaagcggaccgagaaagtcgttacgaggaagaagaagaacaaagtcgaagtatgagccggaagaggaaggcatctgtgcacagttcgggccgtggctctaaccgtggttccagacacagctctgcaccccccaagaaaaagaggaagtaacttctgaactttggccctgagctccattcttcctccagccaacccctgaaaattttacatgacatagaaactgtatttttcctttcgttttcatttgaagttttgccatttgtgtttatgggtttagggggccatttgtgtggaccaatctactcggggaattccaggcccaccaggacacgtgccaatggccccattcagatggcaagggaggaggtgttcttgaagacaggaggaggctcccgctgttaataaatattgtttcattcttctctcttcctgtcaccttctgccaagacattgatggcttctgacatcttatttggtgtctcaaagctgtatttccaagacagtggtacaaggtgacccttaattacccgtatcatggttcttgaccagcacattcaatcctccaacctaccctactgccatgaccttccgcacatctctaagttttatctttgcaatactcaaggttctcggaaatttgctaatggttgtgataaaccatacagcttgagccagtgaggcagattgggctggtgccttcgtctgagttttcctgctttcctgcctcgtgcagattctgaggtatatctgctgccttggaagacataagaagcagtgatactccctggctcggttattttctccatacaatgcacacatggtacaatgatagaaggcaaaattgccactgtcttcttttttttctcatatatctaaggaagatatatcaggttgtgcctcatgtaccgcttctagtgaaatgtagaggaaggctcaaaggagtcaacatttagatctggaagggacaagtcatgccttgggcctagaataccctgatgagaaaagagaagaggaagggaggccatatctacaacacagcctctcggcactgctgctccttattttaactttgtcttgcattgtcctgtatttatcacagtttctgttgaacagcttttcaagtatttggggagtttatcttgccatcctccccttctggttctctgcacccacctgtcccactgcagttccttccgtgctctgtgactttaagagaagaaggggggaggggtcccggattttatgtttgtttgttttttctccttagcagtaggacttgatattttcaattttggaagaactaaaagatgaataaactgggttttttttgttgtttgttttt

SEQ ID NO: 422107 - DNA, 1566 bp, Homo sapiens
ggcagaccgtcacgtgacgacgtcgattcgcgtgcggcagtggcgaagttgacaaaccccgcgaaaatcgactctttgcatcgcacattttgttgattttccctcgtttttctttctctctttcccccgtccatccgaaagagggttggaaaaaaacaaaacaaacaaacaaacaaaaaaaaaaaacctaacgctgttgggacccggaagcggaaagggcatctttgaggtcgatacttccgggtcattgggagagtgcgggattcctgggccgagagcgggtggctgagccgggacctcgcgtgattctcggaacccgaggagaagcggcgtccggggctatggctgtgactctggacaaagacgcttattatcggcgagtgaagagactgtacagcaattggcggaaaggagaagatgagtatgccaacgttgatgccattgttgtatcagtgggtgttgatgaagaaattgtttatgccaaatcaactgccttacagacatggctctttggttatgaactaactgatactatcatggtcttttgtgatgacaaaatcatctttatggccagcaagaaaaaagtggagttcttgaaacagattgccaacactaagggcaatgagaatgctaatggagcccctgccatcacactgctaatacgagaaaagaatgaaagtaataagagtagctttgacaaaatgattgaagccattaaagaaagcaagaatggcaagaagattggagtgttcagcaaagacaaattccctggagagttcatgaagagctggaatgactgcctcaacaaagaaggctttgacaaaatagatatcagtgcagttgtggcatataccatcgctgtaaaggaggatggggagctcaacctaatgaagaaagcagccagcatcacttctgaagtcttcaacaaattcttcaaggaaagagtcatggaaatagttgatgcagatgagaaagttcgacacagcaaactggctgagtctgtggaaaaggccattgaagagaaaaaataccttgctggggcagacccttctactgtggaaatgtgttaccctcctatcattcagagtggtggcaactataatctcaagttcagtgtggtgagtgacaagaatcatatgcactttggggctatcacttgtgccatgggtattcgcttcaagtcttactgctccaaccttgttcgcactttgatggttgatccttctcaagaagttcaagaaaattataactttttgctccagcttcaagaggagctgctgaaggaattaagacatggtgtgaagatatgtgacgtgtataacgctgtcatggacgtggttaaaaagcagaagccagaactgctgaacaaaattaccaaaaacctagggtttgggatgggaattgaattccgtgaaggctccctagtaatcaatagcaaaaatcaatacaaactgaagaaagatggttccgcatcacttaggatctccagactgattacagaggggacaggcgaagaaaactatgccgttcattggcacattgtggttatgccactcgtctctttgg

SEQ ID NO: 422108 - DNA, 14138 bp, Homo sapiens
  misc_feature (1330)..(1330): n is a, c, g, or t
  misc_feature (2427)..(2427): n is a, c, g, or t
  misc_feature (2585)..(2585): n is a, c, g, or t
  misc_feature (3378)..(3378): n is a, c, g, or t
  misc_feature (5381)..(5381): n is a, c, g, or t
  misc_feature (6137)..(6137): n is a, c, g, or t
gcactgcagcgccagcgtccgagcgggcggccgagctcccggagcggcctggccccgagccccgagcgggcgtcgctcagcagcaggtcgcggccgcgcagccccatccagccccgcgcccgccatgccgtccgccggccccgcctgagccgcggcctccgcgcgcgggcgggcctggggacggcggggccatgcgcgcgctgccctaacgatgccgcccgccgcgcccgcccgcctggcgctggccctgggcctgggcctgtggctcggggcgctggcggggggccccgggcgcggctgcgggccctgcgagcccccctgcctctgcggcccagcgcccggcgccgcctgccgcgtcaactgctcgggccgcgggctgcggacgctcggtcccgcgctgcgcatccccgcggacgccacagcgctagacgtctcccacaacctgctccgggcgctggacgttgggctcctggcgaacctctcggcgctggcagagctggatataagcaacaacaagatttctacgttagaagaaggaatatttgctaatttatttaatttaagtgaaataaacctgagtgggaacccgtttgagtgtgactgtggcctggcgtggctgccgcgatgggcggaggagcagcaggtgcgggtggtgcagcccgaggcagccacgtgtgctgggcctggctccctggctggccagcctctgcttggcatccccttgctggacagtggctgtggtgaggagtatgtcgcctgcctccctgacaacagctcaggcaccgtggcagcagtgtccttttcagctgcccacgaaggcctgcttcagccagaggcctgcagcgccttctgcttctccaccggccagggcctcgcagccctctcggagcagggctggtgcctgtgtggggcggcccagccctccagtgcctcctttgcctgcctgtccctctgctccggccccccgccacctcctgcccccacctgtaggggccccaccctcctccagcacgtcttccctgcctccccaggggccaccctggtggggccccacggacctctggcctctggccagctagcagccttccacatcgctgccccgctccctgtcactgccacacgctgggacttcggagacggctccgccgaggtggatgccgctgggccggctgcctcgcatcgctatgtgctgcctgggcgctatcacgtgacggccgtgctggccctgggggccggctcagccctgctggggacagacgtgcaggtggaagcggcacctgccgccctggagctcgtgtgcccgtcctcggtgcagagtgacgagagcctngacctcagcatccagaaccgcggtggttcaggcctggaggccgcctacagcatcgtggccctgggcgaggagccggcccgagcggtgcacccgctctgcccctcggacacggagatcttccctggcaacgggcactgctaccgcctggtggtggagaaggcggcctggctgcaggcgcaggagcagtgtcaggcctgggccggggccgccctggcaatggtggacagtcccgccgtgcagcgcttcctggtctcccgggtcaccaggagcctagacgtgtggatcggcttctcgactgtgcagggggtggaggtgggcccagcgccgcagggcgaggccttcagcctggagagctgccagaactggctgcccggggagccacacccagccacagccgagcactgcgtccggctcgggcccaccgggtggtgtaacaccgacctgtgctcagcgccgcacagctacgtctgcgagctgcagcccggaggcccagtgcaggatgccgagaacctcctcgtgggagcgcccagtggggacctgcagggacccctgacgcctctggcacagcaggacggcctctcagccccgcacgagcccgtggaggtcatggtattcccgggcctgcgtctgagccgtgaagccttcctcaccacggccgaatttgggacccaggagctccggcggcccgcccagctgcggctgcaggtgtaccggctcctcagcacagcagggaccccggagaacggcagcgagcctgagagcaggtccccggacaacaggacccagctggcccccgcgtgcatgccagggggacgctggtgccctggagccaacatctgcttgccgctggacgcctcctgccacccccaggcctgcgccaatggctgcacgtcagggccagggctacccggggccccctatgcgctatggagagagttcctcttctccgttcccgcggggccccccgcgcagtactcggtcaccctccacggccaggatgtcctcatgctccctggtgacctcgttggcttgcagcacgacgctggccctggcgccctcctgcactgctcgccggctcccggccaccctggtccccnggccccgtacctctccgccaacgcctcgtcatggctgccccacttgccagcccagctggagggcacttgggcctgccctgcctgtgccctgcggctgcttgcagccacggaacagctcaccgtgctgctgggcttgaggcccaaccctggactgcggntgcctgggcgctatgaggtccgggcagaggtgggcaatggcgtgtccaggcacaacctctcctgcagctttgacgtggtctccccagtggctgggctgcgggtcatctaccctgccccccgcgacggccgcctctacgtgcccaccaacggctcagccttggtgctccaggtggactctggtgccaacgccacggccacggctcgctggcctgggggcagtgtcagcgcccgctttgagaatgtctgccctgccctggtggccaccttcgtgcccggctgcccctgggagaccaacgataccctgttctcagtggtagcactgccgtggctcagtgagggggagcacgtggtggacgtggtggtggaaaacagcgccagccgggccaacctcagcctgcgggtgacggcggaggagcccatctgtggcctccgcgccacgcccagccccgaggcccgtgtactgcagggagtcctagtgaggtacagccccgtggtggaggccggctcggacatggtcttccggtggaccatcaacgacaagcagtccctgaccttccagaacgtggtcttcaatgtcatttatcagagcgcggcggtcttcaagctctcactgacggcctccaaccacgtgagcaacgtcaccgtgaactacaacgtaaccgtggagcggatgaacaggatgcagggtctgcaggtctccacagtgccggccgtgctgtcccccaatgccacgctagcactgacggcgggcgtgctggtggactcggccgtggaggtggccttcctgtgganctttggggatggggagcaggccctccaccagttccagcctccgtacaacgagtccttcccggttccagacccctcggtggcccaggtgctggtggagcacaatgtcatgcacacctacgctgccccaggtgagtacctcctgaccgtgctggcatctaatgccttcgagaacctgacgcagcaggtgcctgtgagcgtgcgcgcctccctgccctccgtggctgtgggtgtgagtgacggcgtcctggtggccggccggcccgtcaccttctacccgcacccgctgccctcgcctgggggtgttctttacacgtgggacttcggggacggctcccctgtcctgacccagagccagccggctgccaaccacacctatgcctcgaggggcacctaccacgtgcgcctggaggtcaacaacacggtgagcggtgcggcggcccaggcggatgtgcgcgtctttgaggagctccgcggactcagcgtggacatgagcctggccgtggagcagggcgcccccgtggtggtcagcgccgcggtgcagacgggcgacaacatcacgtggaccttcgacatgggggacggcaccgtgctgtcgggcccggaggcaacagtggagcatgtgtacctgcgggcacagaactgcacagtgaccgtgggtgcggccagccccgccggccacctggcccggagcctgcacgtgctggtcttcgtcctggaggtgctgcgcgttgaacccgccgcctgcatccccacgcagcctgacgcgcggctcacggcctacgtcaccgggaacccggcccactacctcttcgactggaccttcggggatggctcctccaacacgaccgtgcgggggtgcccgacggtgacacacaacttcacgcggagcggcacgttccccctggcgctggtgctgtccagccgcgtgaacagggcgcattacttcaccagcatctgcgtggagccagaggtgggcaacgtcaccctgcagccagagaggcagtttgtgcagctcggggacgaggcctggctggtggcatgtgcctggcccccgttcccctaccgctacacctgggactttggcaccgaggaagccgcccccacccgtgccaggggccctgaggtgacgttcatctaccgagacccaggctcctatcttgtgacagtcaccgcgtccaacaacatctctgctgccaatgactcagccctggtggaggtgcaggagcccgtgctggtcaccagcatcaaggtcaatggctcccttgggctggagctgcagcagccgtacctgttctctgctgtgggccgtgggcgccccgccagctacctgtgggatctgggggacggtgggtggctcgagggtccggaggtcacccacgcttacaacagcacaggtgacttcaccgttagggtggccggctggaatgaggtgagccgcagcgaggcctggctcaatgtgacggtgaagcggcgcgtgcgggggctcgtcgtcaatgcaagccgcacggtggtgcccctgaatgggagcgtgagcttcagcacgtcgctggaggccggcagtgatgtgcgctattcctgggtgctctgtgaccgctgcacgcccatccctgggggtcctaccatctcttacaccttccgctccgtgggcaccttcaatatcatcgtcacggctgagaacgaggtgggctccgcccaggacagcatcttcgtctatgtcctgcagctcatagaggggctgcaggtggtgggcggtggccgctacttccccaccaaccacacggtacagctgcaggccgtggttagggatggcaccaacgtctcctacagctggactgcctggagggacaggggcccggccctggccggcagcggcaaaggcttctcgctcaccgtgctcgaggccggcacctaccatgtgcagctgcgggccaccaacatgctgggcagcgcctgggccgactgcaccatggacttcgtggagcctgtggggtggctgatggtgnccgcctccccgaacccagctgccgtcaacacaagcgtcaccctcagtgccgagctggctggtggcagtggtgtcgtatacacttggtccttggaggaggggctgagctgggagacctccgagccatttaccacccatagcttccccacacccggcctgcacttggtcaccatgacggcagggaacccgctgggctcagccaacgccaccgtggaagtggatgtgcaggtgcctgtgagtggcctcagcatcagggccagcgagcccggaggcagcttcgtggcggccgggtcctctgtgcccttttgggggcagctggccacgggcaccaatgtgagctggtgctgggctgtgcccggcggcagcagcaagcgtggccctcatgtcaccatggtcttcccggatgctggcaccttctccatccggctcaatgcctccaacgcagtcagctgggtctcagccacgtacaacctcacggcggaggagcccatcgtgggcctggtgctgtgggccagcagcaaggtggtggcgcccgggcagctggtccattttcagatcctgctggctgccggctcagctgtcaccttccgcctgcaggtcggcggggccaaccccgaggtgctccccgggccccgtttctcccacagcttcccccgcgtcggagaccacgtggtgagcgtgcggggcaaaaaccacgtgagctgggcccaggcgcaggtgcgcatcgtggtgctggaggccgtgagtgggctgcagntgcccaactgctgcgagcctggcatcgccacgggcactgagaggaacttcacagcccgcgtgcagcgcggctctcgggtcgcctacgcctggtacttctcgctgcagaaggtccagggcgactcgctggtcatcctgtcgggccgcgacgtcacctacacgcccgtggccgcggggctgttggagatccaggtgcgcgccttcaacgccctgggcagtgagaaccgcacgctggtgctggaggttcaggacgccgtccagtatgtggccctgcagagcggcccctgcttcaccaaccgctcggcgcagtttgaggccgccaccagccccagcccccggcgtgtggcctaccactgggactttggggatgggtcgccagggcaggacacagatgagcccagggccgagcactcctacctgaggcctggggactaccgcgtgcaggtgaacgcctccaacctggtgagcttcttcgtggcgcaggccacggtgaccgtccaggtgctggcctgccgggagccggaggtggacgtggtcctgcccctgcaggtgctgatgcggcgatcacagcgcaactacttggaggcccacgttgacctgcgcgactgcgtcacctaccagactgagtaccgctgggaggtgtatcgcaccgccagctgccagcggccggggcgcccagcgcgtgtggccctgcccggcgtggacgtgagccggcctcggctggtgctgccgcggctggcgctgcctgtggggcactactgctttgtgtttgtcgtgtcatttggggacacgccactgacacagagcatccaggccaatgtgacggtggcccccgagcgcctggtgcccatcattgagggtggctcataccgcgtgtggtcagacacacgggacctggtgctggatgggagcgagtcctacgaccccaacctggaggacggcgaccagacgccgctcagtttccactgggcctgtgtggcttcgacacagagggaggctggcgggtgtgcgctgaactttgggccccgcgggagcagcacggtcaccattccacgggagcggctggcggctggcgtggagtacaccttcagcctgaccgtgtggaaggccggccgcaaggaggaggccaccaaccagacggtgctgatccggagtggccgggtgcccattgtgtccttggagtgtgtgtcctgcaaggcacaggccgtgtacgaagtgagccgcagctcctacgtgtacttggagggccgctgcctcaattgcagcagcggctccaagcgagggcggtgggctgcacgtacgttcagcaacaagacgctggtgctggatgagaccaccacatccacgggcagtgcaggcatgcgactggtgctgcggcggggcgtgctgcgggacggcgagggatacaccttcacgctcacggtgctgggccgctctggcgaggaggagggctgcgcctccatccgcctgtcccccaaccgcccgccgctggggggctcttgccgcctcttcccactgggcgctgtgcacgccctcaccaccaaggtgcacttcgaatgcacgggctggcatgacgcggaggatgctggcgccccgctggtgtacgccctgctgctgcggcgctgtcgccagggccactgcgaggagttctgtgtctacaagggcagcctctccagctacggagccgtgctgcccccgggtttcaggccacacttcgaggtgggcctggccgtggtggtgcaggaccagctgggagccgctgtggtcgccctcaacaggtctttggccatcaccctcccagagcccaacggcagcgcaacggggctcacagtctggctgcacgggctcaccgctagtgtgctcccagggctgctgcggcaggccgatccccagcacgtcatcgagtactcgttggccctggtcaccgtgctgaacgagtacgagcgggccctggacgtggcggcagagcccaagcacgagcggcagcaccgagcccagatacgcaagaacatcacggagactctggtgtccctgagggtccacactgtggatgacatccagcagatcgctgctgcgctggcccagtgcatggggcccagcagggagctcgtatgccgctcgtgcctgaagcagacgctgcacaagctggaggccatgatgctcatcctgcaggcagagaccaccgcgggcaccgtgacgcccaccgccatcggagacagcatcctcaacatcacaggagacctcatccacctggccagctcggacgtgcgggcaccacagccctcagagctgggagccgagtcaccatctcggatggtggcgtcccaggcctacaacctgacctctgccctcatgcgcatcctcatgcgctcccgcgtgctcaacgaggagcccctgacgctggcgggcgaggagatcgtggcccagggcaagcgctcggacccgcggagcctgctgtgctatggcggcgccccagggcctggctgccacttctccatccccgaggctttcagcggggccctggccaacctcagtgacgtggtgcagctcatctttctggtggactccaatccctttccctttggctatatcagcaactacaccgtctccaccaaggtggcctcgatggcattccagacacaggccggcgcccagatccccatcgagcggctggcctcagagcgcgccatcaccgtgaaggtgcccaacaactcggactgggctgcccggggccaccgcagctccgccaactccgccaactccgttgtggtccagccccaggcctccgtcggtgctgtggtcaccctggacagcagcaaccctgcggccgggctgcatctgcagctcaactatacgctgctggacggccactacctgtctgaggaacctgagccctacctggcagtctacctacactcggagccccggcccaatgagcacaactgctcggctagcaggaggatccgcccagagtcactccagggtgctgaccaccggccctacaccttcttcatttccccggggagcagagacccagcggggagttaccatctgaacctctccagccacttccgctggtcggcgctgcaggtgtccgtgggcctgtacacgtccctgtgccagtacttcagcgaggaggacatggtgtggcggacagaggggctgctgcccctggaggagacctcgccccgccaggccgtctgcctcacccgccacctcaccgccttcggcgccagcctcttcgtgcccccaagccatgtccgctttgtgtttcctgagccgacagcggatgtaaactacatcgtcatgctgacatgtgctgtgtgcctggtgacctacatggtcatggccgccatcctgcacaagctggaccagttggatgccagccggggccgcgccatccctttctgtgggcagcggggccgcttcaagtacgagatcctcgtcaagacaggctggggccggggctcaggtaccacggcccacgtgggcatcatgctgtatggggtggacagccggagcggccaccggcacctggacggcgacagagccttccaccgcaacagcctggacatcttccggatcgccaccccgcacagcctgggtagcgtgtggaagatccgagtgtggcacgacaacaaagggctcagccctgcctggttcctgcagcacgtcatcgtcagggacctgcagacggcacgcagcgccttcttcctggtcaatgactggctttcggtggagacggaggccaacgggggcctggtggagaaggaggtgctggccgcgagcgacgcagcccttttgcgcttccggcgcctgctggtggctgagctgcagcgtggcttctttgacaagcacatctggctctccatatgggaccggccgcctcgtagccgtttcactcgcatccagagggccacctgctgcgttctcctcatctgcctcttcctgggcgccaacgccgtgtggtacggggctgttggcgactctgcctacagcacggggcatgtgtccaggctgagcccgctgagcgtcgacacagtcgctgttggcctggtgtccagcgtggttgtctatcccgtctacctggccatcctttttctcttccggatgtcccggagcaaggtggctgggagcccgagccccacacctgccgggcagcaggtgctggacatcgacagctgcctggactcgtccgtgctggacagctccttcctcacgttctcaggcctccacgctgaggcctttgttggacagatgaagagtgacttgtttctggatgattctaagagtctggtgtgctggccctccggcgagggaacgctcagttggccggacctgctcagtgacccgtccattgtgggtagcaatctgcggcagctggcacggggccaggcgggccatgggctgggcccagaggaggacggcttctccctggccagcccctactcgcctgccaaatccttctcagcatcagatgaagacctgatccagcaggtccttgccgagggggtcagcagcccagcccctacccaagacacccacatggaaacggacctgctcagcagcctgtccagcactcctggggagaagacagagacgctggcgctgcagaggctgggggagctggggccacccagcccaggcctgaactgggaacagccccaggcagcgaggctgtccaggacaggactggtggagggtctgcggaagcgcctgctgccggcctggtgtgcctccctggcccacgggctcagcctgctcctggtggctgtggctgtggctgtctcagggtgggtgggtgcgagcttccccccgggcgtgagtgttgcgtggctcctgtccagcagcgccagcttcctggcctcattcctcggctgggagccactgaaggtcttgctggaagccctgtacttctcactggtggccaagcggctgcacccggatgaagatgacaccctggtagagagcccggctgtgacgcctgtgagcgcacgtgtgccccgcgtacggccaccccacggctttgcactcttcctggccaaggaagaagcccgcaaggtcaagaggctacatggcatgctgcggagcctcctggtgtacatgctttttctgctggtgaccctgctggccagctatggggatgcctcatgccatgggcacgcctaccgtctgcaaagcgccatcaagcaggagctgcacagccgggccttcctggccatcacgcggtctgaggagctctggccatggatggcccacgtgctgctgccctacgtccacgggaaccagtccagcccagagctggggcccccacggctgcggcaggtgcggctgcaggaagcactctacccagaccctcccggccccagggtccacacgtgctcggccgcaggaggcttcagcaccagcgattacgacgttggctgggagagtcctcacaatggctcggggacgtgggcctattcagcgccggatctgctgggggcatggtcctggggctcctgtgccgtgtatgacagcgggggctacgtgcaggagctgggcctgagcctggaggagagccgcgaccggctgcgcttcctgcagctgcacaactggctggacaacaggagccgcgctgtgttcctggagctcacgcgctacagcccggccgtggggctgcacgccgccgtcacgctgcgcctcgagttcccggcggccggccgcgccctggccgccctcagcgtccgcccctttgcgctgcgccgcctcagcgcgggcctctcgctgcctctgctcacctcggtgtgcctgctgctgttcgccgtgcacttcgccgtggccgaggcccgtacttggcacagggaagggcgctggcgcgtgctgcggctcggagcctgggcgcggtggctgctggtggcgctgacggcggccacggcactggtacgcctcgcccagctgggtgccgctgaccgccagtggacccgtttcgtgcgcggccgcccgcgccgcttcactagcttcgaccaggtggcgcagctgagctccgcagcccgtggcctggcggcctcgctgctcttcctgcttttggtcaaggctgcccagcagctacgcttcgtgcgccagtggtccgtctttggcaagacattatgccgagctctgccagagctcctgggggtcaccttgggcctggtggtgctcggggtagcctacgcccagctggccatcctgctcgtgtcttcctgtgtggactccctctggagcgtggcccaggccctgttggtgctgtgccctgggactgggctctctaccctgtgtcctgccgagtcctggcacctgtcacccctgctgtgtgtggggctctgggcactgcggctgtggggcgccctacggctgggggctgttattctccgctggcgctaccacgccttgcgtggagagctgtaccggccggcctgggagccccaggactacgagatggtggagttgttcctgcgcaggctgcgcctctggatgggcctcagcaaggtcaaggagttccgccacaaagtccgctttgaagggatggagccgctgccctctcgctcctccaggggctccaaggtatccccggatgtgcccccacccagcgctggctccgatgcctcgcacccctccacctcctccagccagctggatgggctgagcgtgagcctgggccggctggggacaaggtgtgagcctgagccctcccgcctccaagccgtgttcgaggccctgctcacccagtttgaccgactcaaccaggccacagaggacgtctaccagctggagcagcagctgcacagcctgcaaggccgcaggagcagccgggcgcccgccggatcttcccgtggcccatccccgggcctgcggcagcactgcccagccgccttgcccgggccagtcggggtgtggacctggccactggccccagcaggacaccccttcgggccaagaacaaggtccaccccagcagcacttagtcctccttcctggcgggggtgggccgtggagtcggagtggacaccgctcagtattactttctgccgctgtcaaggccgagggccaggcagaatggctgcacgtaggttccccagagagcaggcaggggcatctgtctgtctgtgggcttcagcactttaaagaggctgtgtggccaaccaggacccagggtcccctccccagctcccttgggaaggacacagcagtattggacggtttctagcctctgagatgctaatttatttccccgagtcctcaggtacagcgggctgtgcccggccccaccccctgggcagatgtcccccactgctaaggctgctggcttcagggagggttagcctgcaccgccgccaccctgcccctaagttattacctctccagttcctaccgtactccctgcaccgtctcactgtgtgtctcgtgtcagtaatttatatggtgttaaaatgtgtatatttttgtatgtcactattttcactagggctgaggggcctgcgcccagagctggcctcccccaacacctgctgcgcttggtaggtgtggtggcgttatggcagcccggctgctgcttggatgcgagcttggccttgggccggtgctgggggcacagctgtctgccaggcactctcatcaccccagaggccttgtcatcctcccttgccccaggccaggtagcaagagagcagcgcccaggcctgctggcatcaggtctgggcaagtagcaggactaggcatgtcagaggaccccagggtggttagaggaaaagactcctcctgggggctggctcccagggtggaggaaggtgactgtgtgtgtgtgtgtgtgcgcgcgcgcacgcgcgagtgtgctgtatggcccaggcagcctcaaggccctcggagctggctgtgcctgcttctgtgtaccacttctgtgggcatggccgcttctagagcctcgacacccccccaacccccgcaccaagcagacaaagtcaataaaagagctgtctgactgcaa

SEQ ID NO: 422109 - DNA, 14221 bp, Homo sapiens
  misc_feature (1330)..(1330): n is a, c, g, or t
  misc_feature (2427)..(2427): n is a, c, g, or t
  misc_feature (2585)..(2585): n is a, c, g, or t
  misc_feature (3378)..(3378): n is a, c, g, or t
  misc_feature (5381)..(5381): n is a, c, g, or t
  misc_feature (6137)..(6137): n is a, c, g, or t
gcactgcagcgccagcgtccgagcgggcggccgagctcccggagcggcctggccccgagccccgagcgggcgtcgctcagcagcaggtcgcggccgcgcagccccatccagccccgcgcccgccatgccgtccgccggccccgcctgagccgcggcctccgcgcgcgggcgggcctggggacggcggggccatgcgcgcgctgccctaacgatgccgcccgccgcgcccgcccgcctggcgctggccctgggcctgggcctgtggctcggggcgctggcggggggccccgggcgcggctgcgggccctgcgagcccccctgcctctgcggcccagcgcccggcgccgcctgccgcgtcaactgctcgggccgcgggctgcggacgctcggtcccgcgctgcgcatccccgcggacgccacagcgctagacgtctcccacaacctgctccgggcgctggacgttgggctcctggcgaacctctcggcgctggcagagctggatataagcaacaacaagatttctacgttagaagaaggaatatttgctaatttatttaatttaagtgaaataaacctgagtgggaacccgtttgagtgtgactgtggcctggcgtggctgccgcgatgggcggaggagcagcaggtgcgggtggtgcagcccgaggcagccacgtgtgctgggcctggctccctggctggccagcctctgcttggcatccccttgctggacagtggctgtggtgaggagtatgtcgcctgcctccctgacaacagctcaggcaccgtggcagcagtgtccttttcagctgcccacgaaggcctgcttcagccagaggcctgcagcgccttctgcttctccaccggccagggcctcgcagccctctcggagcagggctggtgcctgtgtggggcggcccagccctccagtgcctcctttgcctgcctgtccctctgctccggccccccgccacctcctgcccccacctgtaggggccccaccctcctccagcacgtcttccctgcctccccaggggccaccctggtggggccccacggacctctggcctctggccagctagcagccttccacatcgctgccccgctccctgtcactgccacacgctgggacttcggagacggctccgccgaggtggatgccgctgggccggctgcctcgcatcgctatgtgctgcctgggcgctatcacgtgacggccgtgctggccctgggggccggctcagccctgctggggacagacgtgcaggtggaagcggcacctgccgccctggagctcgtgtgcccgtcctcggtgcagagtgacgagagcctngacctcagcatccagaaccgcggtggttcaggcctggaggccgcctacagcatcgtggccctgggcgaggagccggcccgagcggtgcacccgctctgcccctcggacacggagatcttccctggcaacgggcactgctaccgcctggtggtggagaaggcggcctggctgcaggcgcaggagcagtgtcaggcctgggccggggccgccctggcaatggtggacagtcccgccgtgcagcgcttcctggtctcccgggtcaccaggagcctagacgtgtggatcggcttctcgactgtgcagggggtggaggtgggcccagcgccgcagggcgaggccttcagcctggagagctgccagaactggctgcccggggagccacacccagccacagccgagcactgcgtccggctcgggcccaccgggtggtgtaacaccgacctgtgctcagcgccgcacagctacgtctgcgagctgcagcccggaggcccagtgcaggatgccgagaacctcctcgtgggagcgcccagtggggacctgcagggacccctgacgcctctggcacagcaggacggcctctcagccccgcacgagcccgtggaggtcatggtattcccgggcctgcgtctgagccgtgaagccttcctcaccacggccgaatttgggacccaggagctccggcggcccgcccagctgcggctgcaggtgtaccggctcctcagcacagcagggaccccggagaacggcagcgagcctgagagcaggtccccggacaacaggacccagctggcccccgcgtgcatgccagggggacgctggtgccctggagccaacatctgcttgccgctggacgcctcctgccacccccaggcctgcgccaatggctgcacgtcagggccagggctacccggggccccctatgcgctatggagagagttcctcttctccgttcccgcggggccccccgcgcagtactcggtcaccctccacggccaggatgtcctcatgctccctggtgacctcgttggcttgcagcacgacgctggccctggcgccctcctgcactgctcgccggctcccggccaccctggtccccnggccccgtacctctccgccaacgcctcgtcatggctgccccacttgccagcccagctggagggcacttgggcctgccctgcctgtgccctgcggctgcttgcagccacggaacagctcaccgtgctgctgggcttgaggcccaaccctggactgcggntgcctgggcgctatgaggtccgggcagaggtgggcaatggcgtgtccaggcacaacctctcctgcagctttgacgtggtctccccagtggctgggctgcgggtcatctaccctgccccccgcgacggccgcctctacgtgcccaccaacggctcagccttggtgctccaggtggactctggtgccaacgccacggccacggctcgctggcctgggggcagtgtcagcgcccgctttgagaatgtctgccctgccctggtggccaccttcgtgcccggctgcccctgggagaccaacgataccctgttctcagtggtagcactgccgtggctcagtgagggggagcacgtggtggacgtggtggtggaaaacagcgccagccgggccaacctcagcctgcgggtgacggcggaggagcccatctgtggcctccgcgccacgcccagccccgaggcccgtgtactgcagggagtcctagtgaggtacagccccgtggtggaggccggctcggacatggtcttccggtggaccatcaacgacaagcagtccctgaccttccagaacgtggtcttcaatgtcatttatcagagcgcggcggtcttcaagctctcactgacggcctccaaccacgtgagcaacgtcaccgtgaactacaacgtaaccgtggagcggatgaacaggatgcagggtctgcaggtctccacagtgccggccgtgctgtcccccaatgccacgctagcactgacggcgggcgtgctggtggactcggccgtggaggtggccttcctgtgganctttggggatggggagcaggccctccaccagttccagcctccgtacaacgagtccttcccggttccagacccctcggtggcccaggtgctggtggagcacaatgtcatgcacacctacgctgccccaggtgagtacctcctgaccgtgctggcatctaatgccttcgagaacctgacgcagcaggtgcctgtgagcgtgcgcgcctccctgccctccgtggctgtgggtgtgagtgacggcgtcctggtggccggccggcccgtcaccttctacccgcacccgctgccctcgcctgggggtgttctttacacgtgggacttcggggacggctcccctgtcctgacccagagccagccggctgccaaccacacctatgcctcgaggggcacctaccacgtgcgcctggaggtcaacaacacggtgagcggtgcggcggcccaggcggatgtgcgcgtctttgaggagctccgcggactcagcgtggacatgagcctggccgtggagcagggcgcccccgtggtggtcagcgccgcggtgcagacgggcgacaacatcacgtggaccttcgacatgggggacggcaccgtgctgtcgggcccggaggcaacagtggagcatgtgtacctgcgggcacagaactgcacagtgaccgtgggtgcggccagccccgccggccacctggcccggagcctgcacgtgctggtcttcgtcctggaggtgctgcgcgttgaacccgccgcctgcatccccacgcagcctgacgcgcggctcacggcctacgtcaccgggaacccggcccactacctcttcgactggaccttcggggatggctcctccaacacgaccgtgcgggggtgcccgacggtgacacacaacttcacgcggagcggcacgttccccctggcgctggtgctgtccagccgcgtgaacagggcgcattacttcaccagcatctgcgtggagccagaggtgggcaacgtcaccctgcagccagagaggcagtttgtgcagctcggggacgaggcctggctggtggcatgtgcctggcccccgttcccctaccgctacacctgggactttggcaccgaggaagccgcccccacccgtgccaggggccctgaggtgacgttcatctaccgagacccaggctcctatcttgtgacagtcaccgcgtccaacaacatctctgctgccaatgactcagccctggtggaggtgcaggagcccgtgctggtcaccagcatcaaggtcaatggctcccttgggctggagctgcagcagccgtacctgttctctgctgtgggccgtgggcgccccgccagctacctgtgggatctgggggacggtgggtggctcgagggtccggaggtcacccacgcttacaacagcacaggtgacttcaccgttagggtggccggctggaatgaggtgagccgcagcgaggcctggctcaatgtgacggtgaagcggcgcgtgcgggggctcgtcgtcaatgcaagccgcacggtggtgcccctgaatgggagcgtgagcttcagcacgtcgctggaggccggcagtgatgtgcgctattcctgggtgctctgtgaccgctgcacgcccatccctgggggtcctaccatctcttacaccttccgctccgtgggcaccttcaatatcatcgtcacggctgagaacgaggtgggctccgcccaggacagcatcttcgtctatgtcctgcagctcatagaggggctgcaggtggtgggcggtggccgctacttccccaccaaccacacggtacagctgcaggccgtggttagggatggcaccaacgtctcctacagctggactgcctggagggacaggggcccggccctggccggcagcggcaaaggcttctcgctcaccgtgctcgaggccggcacctaccatgtgcagctgcgggccaccaacatgctgggcagcgcctgggccgactgcaccatggacttcgtggagcctgtggggtggctgatggtgnccgcctccccgaacccagctgccgtcaacacaagcgtcaccctcagtgccgagctggctggtggcagtggtgtcgtatacacttggtccttggaggaggggctgagctgggagacctccgagccatttaccacccatagcttccccacacccggcctgcacttggtcaccatgacggcagggaacccgctgggctcagccaacgccaccgtggaagtggatgtgcaggtgcctgtgagtggcctcagcatcagggccagcgagcccggaggcagcttcgtggcggccgggtcctctgtgcccttttgggggcagctggccacgggcaccaatgtgagctggtgctgggctgtgcccggcggcagcagcaagcgtggccctcatgtcaccatggtcttcccggatgctggcaccttctccatccggctcaatgcctccaacgcagtcagctgggtctcagccacgtacaacctcacggcggaggagcccatcgtgggcctggtgctgtgggccagcagcaaggtggtggcgcccgggcagctggtccattttcagatcctgctggctgccggctcagctgtcaccttccgcctgcaggtcggcggggccaaccccgaggtgctccccgggccccgtttctcccacagcttcccccgcgtcggagaccacgtggtgagcgtgcggggcaaaaaccacgtgagctgggcccaggcgcaggtgcgcatcgtggtgctggaggccgtgagtgggctgcagntgcccaactgctgcgagcctggcatcgccacgggcactgagaggaacttcacagcccgcgtgcagcgcggctctcgggtcgcctacgcctggtacttctcgctgcagaaggtccagggcgactcgctggtcatcctgtcgggccgcgacgtcacctacacgcccgtggccgcggggctgttggagatccaggtgcgcgccttcaacgccctgggcagtgagaaccgcacgctggtgctggaggttcaggacgccgtccagtatgtggccctgcagagcggcccctgcttcaccaaccgctcggcgcagtttgaggccgccaccagccccagcccccggcgtgtggcctaccactgggactttggggatgggtcgccagggcaggacacagatgagcccagggccgagcactcctacctgaggcctggggactaccgcgtgcaggtgaacgcctccaacctggtgagcttcttcgtggcgcaggccacggtgaccgtccaggtgctggcctgccgggagccggaggtggacgtggtcctgcccctgcaggtgctgatgcggcgatcacagcgcaactacttggaggcccacgttgacctgcgcgactgcgtcacctaccagactgagtaccgctgggaggtgtatcgcaccgccagctgccagcggccggggcgcccagcgcgtgtggccctgcccggcgtggacgtgagccggcctcggctggtgctgccgcggctggcgctgcctgtggggcactactgctttgtgtttgtcgtgtcatttggggacacgccactgacacagagcatccaggccaatgtgacggtggcccccgagcgcctggtgcccatcattgagggtggctcataccgcgtgtggtcagacacacgggacctggtgctggatgggagcgagtcctacgaccccaacctggaggacggcgaccagacgccgctcagtttccactgggcctgtgtggcttcgacacagagggaggctggcgggtgtgcgctgaactttgggccccgcgggagcagcacggtcaccattccacgggagcggctggcggctggcgtggagtacaccttcagcctgaccgtgtggaaggccggccgcaaggaggaggccaccaaccagacggtgctgatccggagtggccgggtgcccattgtgtccttggagtgtgtgtcctgcaaggcacaggccgtgtacgaagtgagccgcagctcctacgtgtacttggagggccgctgcctcaattgcagcagcggctccaagcgagggcggtgggctgcacgtacgttcagcaacaagacgctggtgctggatgagaccaccacatccacgggcagtgcaggcatgcgactggtgctgcggcggggcgtgctgcgggacggcgagggatacaccttcacgctcacggtgctgggccgctctggcgaggaggagggctgcgcctccatccgcctgtcccccaaccgcccgccgctggggggctcttgccgcctcttcccactgggcgctgtgcacgccctcaccaccaaggtgcacttcgaatgcacgggctggcatgacgcggaggatgctggcgccccgctggtgtacgccctgctgctgcggcgctgtcgccagggccactgcgaggagttctgtgtctacaagggcagcctctccagctacggagccgtgctgcccccgggtttcaggccacacttcgaggtgggcctggccgtggtggtgcaggaccagctgggagccgctgtggtcgccctcaacaggtctttggccatcaccctcccagagcccaacggcagcgcaacggggctcacagtctggctgcacgggctcaccgctagtgtgctcccagggctgctgcggcaggccgatccccagcacgtcatcgagtactcgttggccctggtcaccgtgctgaacgagtacgagcgggccctggacgtggcggcagagcccaagcacgagcggcagcaccgagcccagatacgcaagaacatcacggagactctggtgtccctgagggtccacactgtggatgacatccagcagatcgctgctgcgctggcccagtgcatggggcccagcagggagctcgtatgccgctcgtgcctgaagcagacgctgcacaagctggaggccatgatgctcatcctgcaggcagagaccaccgcgggcaccgtgacgcccaccgccatcggagacagcatcctcaacatcacaggagacctcatccacctggccagctcggacgtgcgggcaccacagccctcagagctgggagccgagtcaccatctcggatggtggcgtcccaggcctacaacctgacctctgccctcatgcgcatcctcatgcgctcccgcgtgctcaacgaggagcccctgacgctggcgggcgaggagatcgtggcccagggcaagcgctcggacccgcggagcctgctgtgctatggcggcgccccagggcctggctgccacttctccatccccgaggctttcagcggggccctggccaacctcagtgacgtggtgcagctcatctttctggtggactccaatccctttccctttggctatatcagcaactacaccgtctccaccaaggtggcctcgatggcattccagacacaggccggcgcccagatccccatcgagcggctggcctcagagcgcgccatcaccgtgaaggtgcccaacaactcggactgggctgcccggggccaccgcagctccgccaactccgccaactccgttgtggtccagccccaggcctccgtcggtgctgtggtcaccctggacagcagcaaccctgcggccgggctgcatctgcagctcaactatacgctgctggacggccactacctgtctgaggaacctgagccctacctggcagtctacctacactcggagccccggcccaatgagcacaactgctcggctagcaggaggatccgcccagagtcactccagggtgctgaccaccggccctacaccttcttcatttccccggggagcagagacccagcggggagttaccatctgaacctctccagccacttccgctggtcggcgctgcaggtgtccgtgggcctgtacacgtccctgtgccagtacttcagcgaggaggacatggtgtggcggacagaggggctgctgcccctggaggagacctcgccccgccaggccgtctgcctcacccgccacctcaccgccttcggcgccagcctcttcgtgcccccaagccatgtccgctttgtgtttcctgagccgacagcggatgtaaactacatcgtcatgctgacatgtgctgtgtgcctggtgacctacatggtcatggccgccatcctgcacaagctggaccagttggatgccagccggggccgcgccatccctttctgtgggcagcggggccgcttcaagtacgagatcctcgtcaagacaggctggggccggggctcaggtaccacggcccacgtgggcatcatgctgtatggggtggacagccggagcggccaccggcacctggacggcgacagagccttccaccgcaacagcctggacatcttccggatcgccaccccgcacagcctgggtagcgtgtggaagatccgagtgtggcacgacaacaaagggctcagccctgcctggttcctgcagcacgtcatcgtcagggacctgcagacggcacgcagcgccttcttcctggtcaatgactggctttcggtggagacggaggccaacgggggcctggtggagaaggaggtgctggccgcgagcgacgcagcccttttgcgcttccggcgcctgctggtggctgagctgcagcgtggcttctttgacaagcacatctggctctccatatgggaccggccgcctcgtagccgtttcactcgcatccagagggccacctgctgcgttctcctcatctgcctcttcctgggcgccaacgccgtgtggtacggggctgttggcgactctgcctacagcacggggcatgtgtccaggctgagcccgctgagcgtcgacacagtcgctgttggcctggtgtccagcgtggttgtctatcccgtctacctggccatcctttttctcttccggatgtcccggagcaaggtggctgggagcccgagccccacacctgccgggcagcaggtgctggacatcgacagctgcctggactcgtccgtgctggacagctccttcctcacgttctcaggcctccacgctgaggcctttgttggacagatgaagagtgacttgtttctggatgattctaagagtctggtgtgctggccctccggcgagggaacgctcagttggccggacctgctcagtgacccgtccattgtgggtagcaatctgcggcagctggcacggggccaggcgggccatgggctgggcccagaggaggacggcttctccctggccagcccctactcgcctgccaaatccttctcagcatcagatgaagacctgatccagcaggtccttgccgagggggtcagcagcccagcccctacccaagacacccacatggaaacggacctgctcagcagcctgtccagcactcctggggagaagacagagacgctggcgctgcagaggctgggggagctggggccacccagcccaggcctgaactgggaacagccccaggcagcgaggctgtccaggacaggactggtggagggtctgcggaagcgcctgctgccggcctggtgtgcctccctggcccacgggctcagcctgctcctggtggctgtggctgtggctgtctcagggtgggtgggtgcgagcttccccccgggcgtgagtgttgcgtggctcctgtccagcagcgccagcttcctggcctcattcctcggctgggagccactgaaggtcttgctggaagccctgtacttctcactggtggccaagcggctgcacccggatgaagatgacaccctggtagagagcccggctgtgacgcctgtgagcgcacgtgtgccccgcgtacggccaccccacggctttgcactcttcctggccaaggaagaagcccgcaaggtcaagaggctacatggcatgctgcggagcctcctggtgtacatgctttttctgctggtgaccctgctggccagctatggggatgcctcatgccatgggcacgcctaccgtctgcaaagcgccatcaagcaggagctgcacagccgggccttcctggccatcacgcggtctgaggagctctggccatggatggcccacgtgctgctgccctacgtccacgggaaccagtccagcccagagctggggcccccacggctgcggcaggtgcggctgcaggaagcactctacccagaccctcccggccccagggtccacacgtgctcggccgcaggaggcttcagcaccagcgattacgacgttggctgggagagtcctcacaatggctcggggacgtgggcctattcagcgccggatctgctgggggcatggtcctggggctcctgtgccgtgtatgacagcgggggctacgtgcaggagctgggcctgagcctggaggagagccgcgaccggctgcgcttcctgcagctgcacaactggctggacaacaggagccgcgctgtgttcctggagctcacgcgctacagcccggccgtggggctgcacgccgccgtcacgctgcgcctcgagttcccggcggccggccgcgccctggccgccctcagcgtccgcccctttgcgctgcgccgcctcagcgcgggcctctcgctgcctctgctcacctcggtgtgcctgctgctgttcgccgtgcacttcgccgtggccgaggcccgtacttggcacagggaagggcgctggcgcgtgctgcggctcggagcctgggcgcggtggctgctggtggcgctgacggcggccacggcactggtacgcctcgcccagctgggtgccgctgaccgccagtggacccgtttcgtgcgcggccgcccgcgccgcttcactagcttcgaccaggtggcgcagctgagctccgcagcccgtggcctggcggcctcgctgctcttcctgcttttggtcaaggctgcccagcagctacgcttcgtgcgccagtggtccgtctttggcaagacattatgccgagctctgccagagctcctgggggtcaccttgggcctggtggtgctcggggtagcctacgcccagctggccatcctgctcgtgtcttcctgtgtggactccctctggagcgtggcccaggccctgttggtgctgtgccctgggactgggctctctaccctgtgtcctgccgagtcctggcacctgtcacccctgctgtgtgtggggctctgggcactgcggctgtggggcgccctacggctgggggctgttattctccgctggcgctaccacgccttgcgtggagagctgtaccggccggcctgggagccccaggactacgagatggtggagttgttcctgcgcaggctgcgcctctggatgggcctcagcaaggtcaaggagttccgccacaaagtccgctttgaagggatggagccgctgccctctcgctcctccaggggctccaaggtatccccggatgtgcccccacccagcgctggctccgatgcctcgcacccctccacctcctccagccagctggatgggctgagcgtgagcctgggccggctggggacaaggtgtgagcctgagccctcccgcctccaagccgtgttcgaggccctgctcacccagtttgaccgactcaaccaggccacagaggacgtctaccagctggagcagcagctgcacagcctgcaaggccgcaggagcagccgggcgcccgccggatcttcccgtggcccatccccgggcctgcggcagcactgcccagccgccttgcccgggccagtcggggtgtggacctggccactggccccagcaggacaccccttcgggccaagaacaaggtccaccccagcagcacttagtcctccttcctggcgggggtgggccgtggagtcggagtggacaccgctcagtattactttctgccgctgtcaaggccgagggccaggcagaatggctgcacgtaggttccccagagagcaggcaggggcatctgtctgtctgtgggcttcagcactttaaagaggctgtgtggccaaccaggacccagggtcccctccccagctcccttgggaaggacacagcagtattggacggtttctagcctctgagatgctaatttatttccccgagtcctcaggtacagcgggctgtgcccggccccaccccctgggcagatgtcccccactgctaaggctgctggcttcagggagggttagcctgcaccgccgccaccctgcccctaagttattacctctccagttcctaccgtactccctgcaccgtctcactgtgtgtctcgtgtcagtaatttatatggtgttaaaatgtgtatatttttgtatgtcactattttcactagggctgaggggcctgcgcccagagctggcctcccccaacacctgctgcgcttggtaggtgtggtggcgttatggcagcccggctgctgcttggatgcgagcttggccttgggccggtgctgggggcacagctgtctgccaggcactctcatcaccccagaggccttgtcatcctcccttgccccaggccaggtagcaagagagcagcgcccaggcctgctggcatcaggtctgggcaagtagcaggactaggcatgtcagaggaccccagggtggttagaggaaaagactcctcctgggggctggctcccagggtggaggaaggtgactgtgtgtgtgtgtgtgtgcgcgcgcgcacgcgcgagtgtgctgtatggcccaggcagcctcaaggccctcggagctggctgtgcctgcttctgtgtaccacttctgtgggcatggccgcttctagagcctcgacacccccccaacccccgcaccaagcagacaaagtcaataaaagagctgtctgactgcaaaaaaaaaaataaaataattatctttagggggggcccggtccccatttccccctttagtgagtcgttttacaataccactggcc

SEQ ID NO: 422110 - DNA, 14285 bp, Homo sapiens
  misc_feature (1330)..(1330): n is a, c, g, or t
  misc_feature (2427)..(2427): n is a, c, g, or t
  misc_feature (2585)..(2585): n is a, c, g, or t
  misc_feature (3378)..(3378): n is a, c, g, or t
  misc_feature (5381)..(5381): n is a, c, g, or t
  misc_feature (6137)..(6137): n is a, c, g, or t
gcactgcagcgccagcgtccgagcgggcggccgagctcccggagcggcctggccccgagccccgagcgggcgtcgctcagcagcaggtcgcggccgcgcagccccatccagccccgcgcccgccatgccgtccgccggccccgcctgagccgcggcctccgcgcgcgggcgggcctggggacggcggggccatgcgcgcgctgccctaacgatgccgcccgccgcgcccgcccgcctggcgctggccctgggcctgggcctgtggctcggggcgctggcggggggccccgggcgcggctgcgggccctgcgagcccccctgcctctgcggcccagcgcccggcgccgcctgccgcgtcaactgctcgggccgcgggctgcggacgctcggtcccgcgctgcgcatccccgcggacgccacagcgctagacgtctcccacaacctgctccgggcgctggacgttgggctcctggcgaacctctcggcgctggcagagctggatataagcaacaacaagatttctacgttagaagaaggaatatttgctaatttatttaatttaagtgaaataaacctgagtgggaacccgtttgagtgtgactgtggcctggcgtggctgccgcgatgggcggaggagcagcaggtgcgggtggtgcagcccgaggcagccacgtgtgctgggcctggctccctggctggccagcctctgcttggcatccccttgctggacagtggctgtggtgaggagtatgtcgcctgcctccctgacaacagctcaggcaccgtggcagcagtgtccttttcagctgcccacgaaggcctgcttcagccagaggcctgcagcgccttctgcttctccaccggccagggcctcgcagccctctcggagcagggctggtgcctgtgtggggcggcccagccctccagtgcctcctttgcctgcctgtccctctgctccggccccccgccacctcctgcccccacctgtaggggccccaccctcctccagcacgtcttccctgcctccccaggggccaccctggtggggccccacggacctctggcctctggccagctagcagccttccacatcgctgccccgctccctgtcactgccacacgctgggacttcggagacggctccgccgaggtggatgccgctgggccggctgcctcgcatcgctatgtgctgcctgggcgctatcacgtgacggccgtgctggccctgggggccggctcagccctgctggggacagacgtgcaggtggaagcggcacctgccgccctggagctcgtgtgcccgtcctcggtgcagagtgacgagagcctngacctcagcatccagaaccgcggtggttcaggcctggaggccgcctacagcatcgtggccctgggcgaggagccggcccgagcggtgcacccgctctgcccctcggacacggagatcttccctggcaacgggcactgctaccgcctggtggtggagaaggcggcctggctgcaggcgcaggagcagtgtcaggcctgggccggggccgccctggcaatggtggacagtcccgccgtgcagcgcttcctggtctcccgggtcaccaggagcctagacgtgtggatcggcttctcgactgtgcagggggtggaggtgggcccagcgccgcagggcgaggccttcagcctggagagctgccagaactggctgcccggggagccacacccagccacagccgagcactgcgtccggctcgggcccaccgggtggtgtaacaccgacctgtgctcagcgccgcacagctacgtctgcgagctgcagcccggaggcccagtgcaggatgccgagaacctcctcgtgggagcgcccagtggggacctgcagggacccctgacgcctctggcacagcaggacggcctctcagccccgcacgagcccgtggaggtcatggtattcccgggcctgcgtctgagccgtgaagccttcctcaccacggccgaatttgggacccaggagctccggcggcccgcccagctgcggctgcaggtgtaccggctcctcagcacagcagggaccccggagaacggcagcgagcctgagagcaggtccccggacaacaggacccagctggcccccgcgtgcatgccagggggacgctggtgccctggagccaacatctgcttgccgctggacgcctcctgccacccccaggcctgcgccaatggctgcacgtcagggccagggctacccggggccccctatgcgctatggagagagttcctcttctccgttcccgcggggccccccgcgcagtactcggtcaccctccacggccaggatgtcctcatgctccctggtgacctcgttggcttgcagcacgacgctggccctggcgccctcctgcactgctcgccggctcccggccaccctggtccccnggccccgtacctctccgccaacgcctcgtcatggctgccccacttgccagcccagctggagggcacttgggcctgccctgcctgtgccctgcggctgcttgcagccacggaacagctcaccgtgctgctgggcttgaggcccaaccctggactgcggntgcctgggcgctatgaggtccgggcagaggtgggcaatggcgtgtccaggcacaacctctcctgcagctttgacgtggtctccccagtggctgggctgcgggtcatctaccctgccccccgcgacggccgcctctacgtgcccaccaacggctcagccttggtgctccaggtggactctggtgccaacgccacggccacggctcgctggcctgggggcagtgtcagcgcccgctttgagaatgtctgccctgccctggtggccaccttcgtgcccggctgcccctgggagaccaacgataccctgttctcagtggtagcactgccgtggctcagtgagggggagcacgtggtggacgtggtggtggaaaacagcgccagccgggccaacctcagcctgcgggtgacggcggaggagcccatctgtggcctccgcgccacgcccagccccgaggcccgtgtactgcagggagtcctagtgaggtacagccccgtggtggaggccggctcggacatggtcttccggtggaccatcaacgacaagcagtccctgaccttccagaacgtggtcttcaatgtcatttatcagagcgcggcggtcttcaagctctcactgacggcctccaaccacgtgagcaacgtcaccgtgaactacaacgtaaccgtggagcggatgaacaggatgcagggtctgcaggtctccacagtgccggccgtgctgtcccccaatgccacgctagcactgacggcgggcgtgctggtggactcggccgtggaggtggccttcctgtgganctttggggatggggagcaggccctccaccagttccagcctccgtacaacgagtccttcccggttccagacccctcggtggcccaggtgctggtggagcacaatgtcatgcacacctacgctgccccaggtgagtacctcctgaccgtgctggcatctaatgccttcgagaacctgacgcagcaggtgcctgtgagcgtgcgcgcctccctgccctccgtggctgtgggtgtgagtgacggcgtcctggtggccggccggcccgtcaccttctacccgcacccgctgccctcgcctgggggtgttctttacacgtgggacttcggggacggctcccctgtcctgacccagagccagccggctgccaaccacacctatgcctcgaggggcacctaccacgtgcgcctggaggtcaacaacacggtgagcggtgcggcggcccaggcggatgtgcgcgtctttgaggagctccgcggactcagcgtggacatgagcctggccgtggagcagggcgcccccgtggtggtcagcgccgcggtgcagacgggcgacaacatcacgtggaccttcgacatgggggacggcaccgtgctgtcgggcccggaggcaacagtggagcatgtgtacctgcgggcacagaactgcacagtgaccgtgggtgcggccagccccgccggccacctggcccggagcctgcacgtgctggtcttcgtcctggaggtgctgcgcgttgaacccgccgcctgcatccccacgcagcctgacgcgcggctcacggcctacgtcaccgggaacccggcccactacctcttcgactggaccttcggggatggctcctccaacacgaccgtgcgggggtgcccgacggtgacacacaacttcacgcggagcggcacgttccccctggcgctggtgctgtccagccgcgtgaacagggcgcattacttcaccagcatctgcgtggagccagaggtgggcaacgtcaccctgcagccagagaggcagtttgtgcagctcggggacgaggcctggctggtggcatgtgcctggcccccgttcccctaccgctacacctgggactttggcaccgaggaagccgcccccacccgtgccaggggccctgaggtgacgttcatctaccgagacccaggctcctatcttgtgacagtcaccgcgtccaacaacatctctgctgccaatgactcagccctggtggaggtgcaggagcccgtgctggtcaccagcatcaaggtcaatggctcccttgggctggagctgcagcagccgtacctgttctctgctgtgggccgtgggcgccccgccagctacctgtgggatctgggggacggtgggtggctcgagggtccggaggtcacccacgcttacaacagcacaggtgacttcaccgttagggtggccggctggaatgaggtgagccgcagcgaggcctggctcaatgtgacggtgaagcggcgcgtgcgggggctcgtcgtcaatgcaagccgcacggtggtgcccctgaatgggagcgtgagcttcagcacgtcgctggaggccggcagtgatgtgcgctattcctgggtgctctgtgaccgctgcacgcccatccctgggggtcctaccatctcttacaccttccgctccgtgggcaccttcaatatcatcgtcacggctgagaacgaggtgggctccgcccaggacagcatcttcgtctatgtcctgcagctcatagaggggctgcaggtggtgggcggtggccgctacttccccaccaaccacacggtacagctgcaggccgtggttagggatggcaccaacgtctcctacagctggactgcctggagggacaggggcccggccctggccggcagcggcaaaggcttctcgctcaccgtgctcgaggccggcacctaccatgtgcagctgcgggccaccaacatgctgggcagcgcctgggccgactgcaccatggacttcgtggagcctgtggggtggctgatggtgnccgcctccccgaacccagctgccgtcaacacaagcgtcaccctcagtgccgagctggctggtggcagtggtgtcgtatacacttggtccttggaggaggggctgagctgggagacctccgagccatttaccacccatagcttccccacacccggcctgcacttggtcaccatgacggcagggaacccgctgggctcagccaacgccaccgtggaagtggatgtgcaggtgcctgtgagtggcctcagcatcagggccagcgagcccggaggcagcttcgtggcggccgggtcctctgtgcccttttgggggcagctggccacgggcaccaatgtgagctggtgctgggctgtgcccggcggcagcagcaagcgtggccctcatgtcaccatggtcttcccggatgctggcaccttctccatccggctcaatgcctccaacgcagtcagctgggtctcagccacgtacaacctcacggcggaggagcccatcgtgggcctggtgctgtgggccagcagcaaggtggtggcgcccgggcagctggtccattttcagatcctgctggctgccggctcagctgtcaccttccgcctgcaggtcggcggggccaaccccgaggtgctccccgggccccgtttctcccacagcttcccccgcgtcggagaccacgtggtgagcgtgcggggcaaaaaccacgtgagctgggcccaggcgcaggtgcgcatcgtggtgctggaggccgtgagtgggctgcagntgcccaactgctgcgagcctggcatcgccacgggcactgagaggaacttcacagcccgcgtgcagcgcggctctcgggtcgcctacgcctggtacttctcgctgcagaaggtccagggcgactcgctggtcatcctgtcgggccgcgacgtcacctacacgcccgtggccgcggggctgttggagatccaggtgcgcgccttcaacgccctgggcagtgagaaccgcacgctggtgctggaggttcaggacgccgtccagtatgtggccctgcagagcggcccctgcttcaccaaccgctcggcgcagtttgaggccgccaccagccccagcccccggcgtgtggcctaccactgggactttggggatgggtcgccagggcaggacacagatgagcccagggccgagcactcctacctgaggcctggggactaccgcgtgcaggtgaacgcctccaacctggtgagcttcttcgtggcgcaggccacggtgaccgtccaggtgctggcctgccgggagccggaggtggacgtggtcctgcccctgcaggtgctgatgcggcgatcacagcgcaactacttggaggcccacgttgacctgcgcgactgcgtcacctaccagactgagtaccgctgggaggtgtatcgcaccgccagctgccagcggccggggcgcccagcgcgtgtggccctgcccggcgtggacgtgagccggcctcggctggtgctgccgcggctggcgctgcctgtggggcactactgctttgtgtttgtcgtgtcatttggggacacgccactgacacagagcatccaggccaatgtgacggtggcccccgagcgcctggtgcccatcattgagggtggctcataccgcgtgtggtcagacacacgggacctggtgctggatgggagcgagtcctacgaccccaacctggaggacggcgaccagacgccgctcagtttccactgggcctgtgtggcttcgacacagagggaggctggcgggtgtgcgctgaactttgggccccgcgggagcagcacggtcaccattccacgggagcggctggcggctggcgtggagtacaccttcagcctgaccgtgtggaaggccggccgcaaggaggaggccaccaaccagacggtgctgatccggagtggccgggtgcccattgtgtccttggagtgtgtgtcctgcaaggcacaggccgtgtacgaagtgagccgcagctcctacgtgtacttggagggccgctgcctcaattgcagcagcggctccaagcgagggcggtgggctgcacgtacgttcagcaacaagacgctggtgctggatgagaccaccacatccacgggcagtgcaggcatgcgactggtgctgcggcggggcgtgctgcgggacggcgagggatacaccttcacgctcacggtgctgggccgctctggcgaggaggagggctgcgcctccatccgcctgtcccccaaccgcccgccgctggggggctcttgccgcctcttcccactgggcgctgtgcacgccctcaccaccaaggtgcacttcgaatgcacgggctggcatgacgcggaggatgctggcgccccgctggtgtacgccctgctgctgcggcgctgtcgccagggccactgcgaggagttctgtgtctacaagggcagcctctccagctacggagccgtgctgcccccgggtttcaggccacacttcgaggtgggcctggccgtggtggtgcaggaccagctgggagccgctgtggtcgccctcaacaggtctttggccatcaccctcccagagcccaacggcagcgcaacggggctcacagtctggctgcacgggctcaccgctagtgtgctcccagggctgctgcggcaggccgatccccagcacgtcatcgagtactcgttggccctggtcaccgtgctgaacgagtacgagcgggccctggacgtggcggcagagcccaagcacgagcggcagcaccgagcccagatacgcaagaacatcacggagactctggtgtccctgagggtccacactgtggatgacatccagcagatcgctgctgcgctggcccagtgcatggggcccagcagggagctcgtatgccgctcgtgcctgaagcagacgctgcacaagctggaggccatgatgctcatcctgcaggcagagaccaccgcgggcaccgtgacgcccaccgccatcggagacagcatcctcaacatcacaggagacctcatccacctggccagctcggacgtgcgggcaccacagccctcagagctgggagccgagtcaccatctcggatggtggcgtcccaggcctacaacctgacctctgccctcatgcgcatcctcatgcgctcccgcgtgctcaacgaggagcccctgacgctggcgggcgaggagatcgtggcccagggcaagcgctcggacccgcggagcctgctgtgctatggcggcgccccagggcctggctgccacttctccatccccgaggctttcagcggggccctggccaacctcagtgacgtggtgcagctcatctttctggtggactccaatccctttccctttggctatatcagcaactacaccgtctccaccaaggtggcctcgatggcattccagacacaggccggcgcccagatccccatcgagcggctggcctcagagcgcgccatcaccgtgaaggtgcccaacaactcggactgggctgcccggggccaccgcagctccgccaactccgccaactccgttgtggtccagccccaggcctccgtcggtgctgtggtcaccctggacagcagcaaccctgcggccgggctgcatctgcagctcaactatacgctgctggacggccactacctgtctgaggaacctgagccctacctggcagtctacctacactcggagccccggcccaatgagcacaactgctcggctagcaggaggatccgcccagagtcactccagggtgctgaccaccggccctacaccttcttcatttccccggggagcagagacccagcggggagttaccatctgaacctctccagccacttccgctggtcggcgctgcaggtgtccgtgggcctgtacacgtccctgtgccagtacttcagcgaggaggacatggtgtggcggacagaggggctgctgcccctggaggagacctcgccccgccaggccgtctgcctcacccgccacctcaccgccttcggcgccagcctcttcgtgcccccaagccatgtccgctttgtgtttcctgagccgacagcggatgtaaactacatcgtcatgctgacatgtgctgtgtgcctggtgacctacatggtcatggccgccatcctgcacaagctggaccagttggatgccagccggggccgcgccatccctttctgtgggcagcggggccgcttcaagtacgagatcctcgtcaagacaggctggggccggggctcaggtaccacggcccacgtgggcatcatgctgtatggggtggacagccggagcggccaccggcacctggacggcgacagagccttccaccgcaacagcctggacatcttccggatcgccaccccgcacagcctgggtagcgtgtggaagatccgagtgtggcacgacaacaaagggctcagccctgcctggttcctgcagcacgtcatcgtcagggacctgcagacggcacgcagcgccttcttcctggtcaatgactggctttcggtggagacggaggccaacgggggcctggtggagaaggaggtgctggccgcgagcgacgcagcccttttgcgcttccggcgcctgctggtggctgagctgcagcgtggcttctttgacaagcacatctggctctccatatgggaccggccgcctcgtagccgtttcactcgcatccagagggccacctgctgcgttctcctcatctgcctcttcctgggcgccaacgccgtgtggtacggggctgttggcgactctgcctacagcacggggcatgtgtccaggctgagcccgctgagcgtcgacacagtcgctgttggcctggtgtccagcgtggttgtctatcccgtctacctggccatcctttttctcttccggatgtcccggagcaaggtggctgggagcccgagccccacacctgccgggcagcaggtgctggacatcgacagctgcctggactcgtccgtgctggacagctccttcctcacgttctcaggcctccacgctgaggcctttgttggacagatgaagagtgacttgtttctggatgattctaagagtctggtgtgctggccctccggcgagggaacgctcagttggccggacctgctcagtgacccgtccattgtgggtagcaatctgcggcagctggcacggggccaggcgggccatgggctgggcccagaggaggacggcttctccctggccagcccctactcgcctgccaaatccttctcagcatcagatgaagacctgatccagcaggtccttgccgagggggtcagcagcccagcccctacccaagacacccacatggaaacggacctgctcagcagcctgtccagcactcctggggagaagacagagacgctggcgctgcagaggctgggggagctggggccacccagcccaggcctgaactgggaacagccccaggcagcgaggctgtccaggacaggactggtggagggtctgcggaagcgcctgctgccggcctggtgtgcctccctggcccacgggctcagcctgctcctggtggctgtggctgtggctgtctcagggtgggtgggtgcgagcttccccccgggcgtgagtgttgcgtggctcctgtccagcagcgccagcttcctggcctcattcctcggctgggagccactgaaggtcttgctggaagccctgtacttctcactggtggccaagcggctgcacccggatgaagatgacaccctggtagagagcccggctgtgacgcctgtgagcgcacgtgtgccccgcgtacggccaccccacggctttgcactcttcctggccaaggaagaagcccgcaaggtcaagaggctacatggcatgctgcggagcctcctggtgtacatgctttttctgctggtgaccctgctggccagctatggggatgcctcatgccatgggcacgcctaccgtctgcaaagcgccatcaagcaggagctgcacagccgggccttcctggccatcacgcggtctgaggagctctggccatggatggcccacgtgctgctgccctacgtccacgggaaccagtccagcccagagctggggcccccacggctgcggcaggtgcggctgcaggaagcactctacccagaccctcccggccccagggtccacacgtgctcggccgcaggaggcttcagcaccagcgattacgacgttggctgggagagtcctcacaatggctcggggacgtgggcctattcagcgccggatctgctgggggcatggtcctggggctcctgtgccgtgtatgacagcgggggctacgtgcaggagctgggcctgagcctggaggagagccgcgaccggctgcgcttcctgcagctgcacaactggctggacaacaggagccgcgctgtgttcctggagctcacgcgctacagcccggccgtggggctgcacgccgccgtcacgctgcgcctcgagttcccggcggccggccgcgccctggccgccctcagcgtccgcccctttgcgctgcgccgcctcagcgcgggcctctcgctgcctctgctcacctcggtacgcccgtccccggccagaccccgcgcctcccaccggcagcgtcccgccccctcgcggggccccgccccggcagcgtctcacccctcgcagcgccccgccccctcgcagccgtccctcccgccctcctgaccgcgccccccacaggtgtgcctgctgctgttcgccgtgcacttcgccgtggccgaggcccgtacttggcacagggaagggcgctggcgcgtgctgcggctcggagcctgggcgcggtggctgctggtggcgctgacggcggccacggcactggtacgcctcgcccagctgggtgccgctgaccgccagtggacccgtttcgtgcgcggccgcccgcgccgcttcactagcttcgaccaggtggcgcagctgagctccgcagcccgtggcctggcggcctcgctgctcttcctgcttttggtcaaggctgcccagcagctacgcttcgtgcgccagtggtccgtctttggcaagacattatgccgagctctgccagagctcctgggggtcaccttgggcctggtggtgctcggggtagcctacgcccagctggccatcctgctcgtgtcttcctgtgtggactccctctggagcgtggcccaggccctgttggtgctgtgccctgggactgggctctctaccctgtgtcctgccgagtcctggcacctgtcacccctgctgtgtgtggggctctgggcactgcggctgtggggcgccctacggctgggggctgttattctccgctggcgctaccacgccttgcgtggagagctgtaccggccggcctgggagccccaggactacgagatggtggagttgttcctgcgcaggctgcgcctctggatgggcctcagcaaggtcaaggagttccgccacaaagtccgctttgaagggatggagccgctgccctctcgctcctccaggggctccaaggtatccccggatgtgcccccacccagcgctggctccgatgcctcgcacccctccacctcctccagccagctggatgggctgagcgtgagcctgggccggctggggacaaggtgtgagcctgagccctcccgcctccaagccgtgttcgaggccctgctcacccagtttgaccgactcaaccaggccacagaggacgtctaccagctggagcagcagctgcacagcctgcaaggccgcaggagcagccgggcgcccgccggatcttcccgtggcccatccccgggcctgcggcagcactgcccagccgccttgcccgggccagtcggggtgtggacctggccactggccccagcaggacaccccttcgggccaagaacaaggtccaccccagcagcacttagtcctccttcctggcgggggtgggccgtggagtcggagtggacaccgctcagtattactttctgccgctgtcaaggccgagggccaggcagaatggctgcacgtaggttccccagagagcaggcaggggcatctgtctgtctgtgggcttcagcactttaaagaggctgtgtggccaaccaggacccagggtcccctccccagctcccttgggaaggacacagcagtattggacggtttctagcctctgagatgctaatttatttccccgagtcctcaggtacagcgggctgtgcccggccccaccccctgggcagatgtcccccactgctaaggctgctggcttcagggagggttagcctgcaccgccgccaccctgcccctaagttattacctctccagttcctaccgtactccctgcaccgtctcactgtgtgtctcgtgtcagtaatttatatggtgttaaaatgtgtatatttttgtatgtcactattttcactagggctgaggggcctgcgcccagagctggcctcccccaacacctgctgcgcttggtaggtgtggtggcgttatggcagcccggctgctgcttggatgcgagcttggccttgggccggtgctgggggcacagctgtctgccaggcactctcatcaccccagaggccttgtcatcctcccttgccccaggccaggtagcaagagagcagcgcccaggcctgctggcatcaggtctgggcaagtagcaggactaggcatgtcagaggaccccagggtggttagaggaaaagactcctcctgggggctggctcccagggtggaggaaggtgactgtgtgtgtgtgtgtgtgcgcgcgcgcacgcgcgagtgtgctgtatggcccaggcagcctcaaggccctcggagctggctgtgcctgcttctgtgtaccacttctgtgggcatggccgcttctagagcctcgacacccccccaacccccgcaccaagcagacaaagtcaataaaagagctgtctgactgcaa

SEQ ID NO: 422111 - DNA, 13572 bp, Homo sapiens
  misc_feature (1330)..(1330): n is a, c, g, or t
  misc_feature (2427)..(2427): n is a, c, g, or t
  misc_feature (2585)..(2585): n is a, c, g, or t
  misc_feature (3378)..(3378): n is a, c, g, or t
  misc_feature (5381)..(5381): n is a, c, g, or t
  misc_feature (6137)..(6137): n is a, c, g, or t
gcactgcagcgccagcgtccgagcgggcggccgagctcccggagcggcctggccccgagccccgagcgggcgtcgctcagcagcaggtcgcggccgcgcagccccatccagccccgcgcccgccatgccgtccgccggccccgcctgagccgcggcctccgcgcgcgggcgggcctggggacggcggggccatgcgcgcgctgccctaacgatgccgcccgccgcgcccgcccgcctggcgctggccctgggcctgggcctgtggctcggggcgctggcggggggccccgggcgcggctgcgggccctgcgagcccccctgcctctgcggcccagcgcccggcgccgcctgccgcgtcaactgctcgggccgcgggctgcggacgctcggtcccgcgctgcgcatccccgcggacgccacagcgctagacgtctcccacaacctgctccgggcgctggacgttgggctcctggcgaacctctcggcgctggcagagctggatataagcaacaacaagatttctacgttagaagaaggaatatttgctaatttatttaatttaagtgaaataaacctgagtgggaacccgtttgagtgtgactgtggcctggcgtggctgccgcgatgggcggaggagcagcaggtgcgggtggtgcagcccgaggcagccacgtgtgctgggcctggctccctggctggccagcctctgcttggcatccccttgctggacagtggctgtggtgaggagtatgtcgcctgcctccctgacaacagctcaggcaccgtggcagcagtgtccttttcagctgcccacgaaggcctgcttcagccagaggcctgcagcgccttctgcttctccaccggccagggcctcgcagccctctcggagcagggctggtgcctgtgtggggcggcccagccctccagtgcctcctttgcctgcctgtccctctgctccggccccccgccacctcctgcccccacctgtaggggccccaccctcctccagcacgtcttccctgcctccccaggggccaccctggtggggccccacggacctctggcctctggccagctagcagccttccacatcgctgccccgctccctgtcactgccacacgctgggacttcggagacggctccgccgaggtggatgccgctgggccggctgcctcgcatcgctatgtgctgcctgggcgctatcacgtgacggccgtgctggccctgggggccggctcagccctgctggggacagacgtgcaggtggaagcggcacctgccgccctggagctcgtgtgcccgtcctcggtgcagagtgacgagagcctngacctcagcatccagaaccgcggtggttcaggcctggaggccgcctacagcatcgtggccctgggcgaggagccggcccgagcggtgcacccgctctgcccctcggacacggagatcttccctggcaacgggcactgctaccgcctggtggtggagaaggcggcctggctgcaggcgcaggagcagtgtcaggcctgggccggggccgccctggcaatggtggacagtcccgccgtgcagcgcttcctggtctcccgggtcaccaggagcctagacgtgtggatcggcttctcgactgtgcagggggtggaggtgggcccagcgccgcagggcgaggccttcagcctggagagctgccagaactggctgcccggggagccacacccagccacagccgagcactgcgtccggctcgggcccaccgggtggtgtaacaccgacctgtgctcagcgccgcacagctacgtctgcgagctgcagcccggaggcccagtgcaggatgccgagaacctcctcgtgggagcgcccagtggggacctgcagggacccctgacgcctctggcacagcaggacggcctctcagccccgcacgagcccgtggaggtcatggtattcccgggcctgcgtctgagccgtgaagccttcctcaccacggccgaatttgggacccaggagctccggcggcccgcccagctgcggctgcaggtgtaccggctcctcagcacagcagggaccccggagaacggcagcgagcctgagagcaggtccccggacaacaggacccagctggcccccgcgtgcatgccagggggacgctggtgccctggagccaacatctgcttgccgctggacgcctcctgccacccccaggcctgcgccaatggctgcacgtcagggccagggctacccggggccccctatgcgctatggagagagttcctcttctccgttcccgcggggccccccgcgcagtactcggtcaccctccacggccaggatgtcctcatgctccctggtgacctcgttggcttgcagcacgacgctggccctggcgccctcctgcactgctcgccggctcccggccaccctggtccccnggccccgtacctctccgccaacgcctcgtcatggctgccccacttgccagcccagctggagggcacttgggcctgccctgcctgtgccctgcggctgcttgcagccacggaacagctcaccgtgctgctgggcttgaggcccaaccctggactgcggntgcctgggcgctatgaggtccgggcagaggtgggcaatggcgtgtccaggcacaacctctcctgcagctttgacgtggtctccccagtggctgggctgcgggtcatctaccctgccccccgcgacggccgcctctacgtgcccaccaacggctcagccttggtgctccaggtggactctggtgccaacgccacggccacggctcgctggcctgggggcagtgtcagcgcccgctttgagaatgtctgccctgccctggtggccaccttcgtgcccggctgcccctgggagaccaacgataccctgttctcagtggtagcactgccgtggctcagtgagggggagcacgtggtggacgtggtggtggaaaacagcgccagccgggccaacctcagcctgcgggtgacggcggaggagcccatctgtggcctccgcgccacgcccagccccgaggcccgtgtactgcagggagtcctagtgaggtacagccccgtggtggaggccggctcggacatggtcttccggtggaccatcaacgacaagcagtccctgaccttccagaacgtggtcttcaatgtcatttatcagagcgcggcggtcttcaagctctcactgacggcctccaaccacgtgagcaacgtcaccgtgaactacaacgtaaccgtggagcggatgaacaggatgcagggtctgcaggtctccacagtgccggccgtgctgtcccccaatgccacgctagcactgacggcgggcgtgctggtggactcggccgtggaggtggccttcctgtgganctttggggatggggagcaggccctccaccagttccagcctccgtacaacgagtccttcccggttccagacccctcggtggcccaggtgctggtggagcacaatgtcatgcacacctacgctgccccaggtgagtacctcctgaccgtgctggcatctaatgccttcgagaacctgacgcagcaggtgcctgtgagcgtgcgcgcctccctgccctccgtggctgtgggtgtgagtgacggcgtcctggtggccggccggcccgtcaccttctacccgcacccgctgccctcgcctgggggtgttctttacacgtgggacttcggggacggctcccctgtcctgacccagagccagccggctgccaaccacacctatgcctcgaggggcacctaccacgtgcgcctggaggtcaacaacacggtgagcggtgcggcggcccaggcggatgtgcgcgtctttgaggagctccgcggactcagcgtggacatgagcctggccgtggagcagggcgcccccgtggtggtcagcgccgcggtgcagacgggcgacaacatcacgtggaccttcgacatgggggacggcaccgtgctgtcgggcccggaggcaacagtggagcatgtgtacctgcgggcacagaactgcacagtgaccgtgggtgcggccagccccgccggccacctggcccggagcctgcacgtgctggtcttcgtcctggaggtgctgcgcgttgaacccgccgcctgcatccccacgcagcctgacgcgcggctcacggcctacgtcaccgggaacccggcccactacctcttcgactggaccttcggggatggctcctccaacacgaccgtgcgggggtgcccgacggtgacacacaacttcacgcggagcggcacgttccccctggcgctggtgctgtccagccgcgtgaacagggcgcattacttcaccagcatctgcgtggagccagaggtgggcaacgtcaccctgcagccagagaggcagtttgtgcagctcggggacgaggcctggctggtggcatgtgcctggcccccgttcccctaccgctacacctgggactttggcaccgaggaagccgcccccacccgtgccaggggccctgaggtgacgttcatctaccgagacccaggctcctatcttgtgacagtcaccgcgtccaacaacatctctgctgccaatgactcagccctggtggaggtgcaggagcccgtgctggtcaccagcatcaaggtcaatggctcccttgggctggagctgcagcagccgtacctgttctctgctgtgggccgtgggcgccccgccagctacctgtgggatctgggggacggtgggtggctcgagggtccggaggtcacccacgcttacaacagcacaggtgacttcaccgttagggtggccggctggaatgaggtgagccgcagcgaggcctggctcaatgtgacggtgaagcggcgcgtgcgggggctcgtcgtcaatgcaagccgcacggtggtgcccctgaatgggagcgtgagcttcagcacgtcgctggaggccggcagtgatgtgcgctattcctgggtgctctgtgaccgctgcacgcccatccctgggggtcctaccatctcttacaccttccgctccgtgggcaccttcaatatcatcgtcacggctgagaacgaggtgggctccgcccaggacagcatcttcgtctatgtcctgcagctcatagaggggctgcaggtggtgggcggtggccgctacttccccaccaaccacacggtacagctgcaggccgtggttagggatggcaccaacgtctcctacagctggactgcctggagggacaggggcccggccctggccggcagcggcaaaggcttctcgctcaccgtgctcgaggccggcacctaccatgtgcagctgcgggccaccaacatgctgggcagcgcctgggccgactgcaccatggacttcgtggagcctgtggggtggctgatggtgnccgcctccccgaacccagctgccgtcaacacaagcgtcaccctcagtgccgagctggctggtggcagtggtgtcgtatacacttggtccttggaggaggggctgagctgggagacctccgagccatttaccacccatagcttccccacacccggcctgcacttggtcaccatgacggcagggaacccgctgggctcagccaacgccaccgtggaagtggatgtgcaggtgcctgtgagtggcctcagcatcagggccagcgagcccggaggcagcttcgtggcggccgggtcctctgtgcccttttgggggcagctggccacgggcaccaatgtgagctggtgctgggctgtgcccggcggcagcagcaagcgtggccctcatgtcaccatggtcttcccggatgctggcaccttctccatccggctcaatgcctccaacgcagtcagctgggtctcagccacgtacaacctcacggcggaggagcccatcgtgggcctggtgctgtgggccagcagcaaggtggtggcgcccgggcagctggtccattttcagatcctgctggctgccggctcagctgtcaccttccgcctgcaggtcggcggggccaaccccgaggtgctccccgggccccgtttctcccacagcttcccccgcgtcggagaccacgtggtgagcgtgcggggcaaaaaccacgtgagctgggcccaggcgcaggtgcgcatcgtggtgctggaggccgtgagtgggctgcagntgcccaactgctgcgagcctggcatcgccacgggcactgagaggaacttcacagcccgcgtgcagcgcggctctcgggtcgcctacgcctggtacttctcgctgcagaaggtccagggcgactcgctggtcatcctgtcgggccgcgacgtcacctacacgcccgtggccgcggggctgttggagatccaggtgcgcgccttcaacgccctgggcagtgagaaccgcacgctggtgctggaggttcaggacgccgtccagtatgtggccctgcagagcggcccctgcttcaccaaccgctcggcgcagtttgaggccgccaccagccccagcccccggcgtgtggcctaccactgggactttggggatgggtcgccagggcaggacacagatgagcccagggccgagcactcctacctgaggcctggggactaccgcgtgcaggtgaacgcctccaacctggtgagcttcttcgtggcgcaggccacggtgaccgtccaggtgctggcctgccgggagccggaggtggacgtggtcctgcccctgcaggtgctgatgcggcgatcacagcgcaactacttggaggcccacgttgacctgcgcgactgcgtcacctaccagactgagtaccgctgggaggtgtatcgcaccgccagctgccagcggccggggcgcccagcgcgtgtggccctgcccggcgtggacgtgagccggcctcggctggtgctgccgcggctggcgctgcctgtggggcactactgctttgtgtttgtcgtgtcatttggggacacgccactgacacagagcatccaggccaatgtgacggtggcccccgagcgcctggtgcccatcattgagggtggctcataccgcgtgtggtcagacacacgggacctggtgctggatgggagcgagtcctacgaccccaacctggaggacggcgaccagacgccgctcagtttccactgggcctgtgtggcttcgacacagagggaggctggcgggtgtgcgctgaactttgggccccgcgggagcagcacggtcaccattccacgggagcggctggcggctggcgtggagtacaccttcagcctgaccgtgtggaaggccggccgcaaggaggaggccaccaaccagacggtgctgatccggagtggccgggtgcccattgtgtccttggagtgtgtgtcctgcaaggcacaggccgtgtacgaagtgagccgcagctcctacgtgtacttggagggccgctgcctcaattgcagcagcggctccaagcgagggcggtgggctgcacgtacgttcagcaacaagacgctggtgctggatgagaccaccacatccacgggcagtgcaggcatgcgactggtgctgcggcggggcgtgctgcgggacggcgagggatacaccttcacgctcacggtgctgggccgctctggcgaggaggagggctgcgcctccatccgcctgtcccccaaccgcccgccgctggggggctcttgccgcctcttcccactgggcgctgtgcacgccctcaccaccaaggtgcacttcgaatgcacgggctggcatgacgcggaggatgctggcgccccgctggtgtacgccctgctgctgcggcgctgtcgccagggccactgcgaggagttctgtgtctacaagggcagcctctccagctacggagccgtgctgcccccgggtttcaggccacacttcgaggtgggcctggccgtggtggtgcaggaccagctgggagccgctgtggtcgccctcaacaggtctttggccatcaccctcccagagcccaacggcagcgcaacggggctcacagtctggctgcacgggctcaccgctagtgtgctcccagggctgctgcggcaggccgatccccagcacgtcatcgagtactcgttggccctggtcaccgtgctgaacgagtacgagcgggccctggacgtggcggcagagcccaagcacgagcggcagcaccgagcccagatacgcaagaacatcacggagactctggtgtccctgagggtccacactgtggatgacatccagcagatcgctgctgcgctggcccagtgcatggggcccagcagggagctcgtatgccgctcgtgcctgaagcagacgctgcacaagctggaggccatgatgctcatcctgcaggcagagaccaccgcgggcaccgtgacgcccaccgccatcggagacagcatcctcaacatcacaggagacctcatccacctggccagctcggacgtgcgggcaccacagccctcagagctgggagccgagtcaccatctcggatggtggcgtcccaggcctacaacctgacctctgccctcatgcgcatcctcatgcgctcccgcgtgctcaacgaggagcccctgacgctggcgggcgaggagatcgtggcccagggcaagcgctcggacccgcggagcctgctgtgctatggcggcgccccagggcctggctgccacttctccatccccgaggctttcagcggggccctggccaacctcagtgacgtggtgcagctcatctttctggtggactccaatccctttccctttggctatatcagcaactacaccgtctccaccaaggtggcctcgatggcattccagacacaggccggcgcccagatccccatcgagcggctggcctcagagcgcgccatcaccgtgaaggtgcccaacaactcggactgggctgcccggggccaccgcagctccgccaactccgccaactccgttgtggtccagccccaggcctccgtcggtgctgtggtcaccctggacagcagcaaccctgcggccgggctgcatctgcagctcaactatacgctgctggacggccactacctgtctgaggaacctgagccctacctggcagtctacctacactcggagccccggcccaatgagcacaactgctcggctagcaggaggatccgcccagagtcactccagggtgctgaccaccggccctacaccttcttcatttccccggggagcagagacccagcggggagttaccatctgaacctctccagccacttccgctggtcggcgctgcaggtgtccgtgggcctgtacacgtccctgtgccagtacttcagcgaggaggacatggtgtggcggacagaggggctgctgcccctggaggagacctcgccccgccaggccgtctgcctcacccgccacctcaccgccttcggcgccagcctcttcgtgcccccaagccatgtccgctttgtgtttcctgagccgacagcggatgtaaactacatcgtcatgctgacatgtgctgtgtgcctggtgacctacatggtcatggccgccatcctgcacaagctggaccagttggatgccagccggggccgcgccatccctttctgtgggcagcggggccgcttcaagtacgagatcctcgtcaagacaggctggggccggggctcaggtaccacggcccacgtgggcatcatgctgtatggggtggacagccggagcggccaccggcacctggacggcgacagagccttccaccgcaacagcctggacatcttccggatcgccaccccgcacagcctgggtagcgtgtggaagatccgagtgtggcacgacaacaaagggctcagccctgcctggttcctgcagcacgtcatcgtcagggacctgcagacggcacgcagcgccttcttcctggtcaatgactggctttcggtggagacggaggccaacgggggcctggtggagaaggaggtgctggccgcgagcgacgcagcccttttgcgcttccggcgcctgctggtggctgagctgcagcgtggcttctttgacaagcacatctggctctccatatgggaccggccgcctcgtagccgtttcactcgcatccagagggccacctgctgcgttctcctcatctgcctcttcctgggcgccaacgccgtgtggtacggggctgttggcgactctgcctacagcacggggcatgtgtccaggctgagcccgctgagcgtcgacacagtcgctgttggcctggtgtccagcgtggttgtctatcccgtctacctggccatcctttttctcttccggatgtcccggagcaaggtggctgggagcccgagccccacacctgccgggcagcaggtgctggacatcgacagctgcctggactcgtccgtgctggacagctccttcctcacgttctcaggcctccacgctgaggcctttgttggacagatgaagagtgacttgtttctggatgattctaagagtctggtgtgctggccctccggcgagggaacgctcagttggccggacctgctcagtgacccgtccattgtgggtagcaatctgcggcagctggcacggggccaggcgggccatgggctgggcccagaggaggacggcttctccctggccagcccctactcgcctgccaaatccttctcagcatcagatgaagacctgatccagcaggtccttgccgagggggtcagcagcccagcccctacccaagacacccacatggaaacggacctgctcagcagcctgtccagcactcctggggagaagacagagacgctggcgctgcagaggctgggggagctggggccacccagcccaggcctgaactgggaacagccccaggcagcgaggctgtccaggacaggactggtggagggtctgcggaagcgcctgctgccggcctggtgtgcctccctggcccacgggctcagcctgctcctggtggctgtggctgtggctgtctcagggtgggtgggtgcgagcttccccccgggcgtgagtgttgcgtggctcctgtccagcagcgccagcttcctggcctcattcctcggctgggagccactgaaggtcttgctggaagccctgtacttctcactggtggccaagcggctgcacccggatgaagatgacaccctggtagagagcccggctgtgacgcctgtgagcgcacgtgtgccccgcgtacggccaccccacggctttgcactcttcctggccaaggaagaagcccgcaaggtcaagaggctacatggcatgctgcggagcctcctggtgtacatgctttttctgctggtgaccctgctggccagctatggggatgcctcatgccatgggcacgcctaccgtctgcaaagcgccatcaagcaggagctgcacagccgggccttcctggccatcacgcggtctgaggagctctggccatggatggcccacgtgctgctgccctacgtccacgggaaccagtccagcccagagctggggcccccacggctgcggcaggtgcggctgcaggaagcactctacccagaccctcccggccccagggtccacacgtgctcggccgcaggaggcttcagcaccagcgattacgacgttggctgggagagtcctcacaatggctcggggacgtgggcctattcagcgccggatctgctgggggcatggtcctggggctcctgtgccgtgtatgacagcgggggctacgtgcaggagctgggcctgagcctggaggagagccgcgaccggctgcgcttcctgcagctgcacaactggctggacaacaggagccgcgctgtgttcctggagctcacgcgctacagcccggccgtggggctgcacgccgccgtcacgctgcgcctcgagttcccggcggccggccgcgccctggccgccctcagcgtccgcccctttgcgctgcgccgcctcagcgcgggcctctcgctgcctctgctcacctcggtgtgcctgctgctgttcgccgtgcacttcgccgtggccgaggcccgtacttggcacagggaagggcgctggcgcgtgctgcggctcggagcctgggcgcggtggctgctggtggcgctgacggcggccacggcactggtacgcctcgcccagctgggtgccgctgaccgccagtggacccgtttcgtgcgcggccgcccgcgccgcttcactagcttcgaccaggtggcgcagctgagctccgcagcccgtggcctggcggcctcgctgctcttcctgcttttggtcaaggctgcccagcagctacgcttcgtgcgccagtggtccgtctttggcaagacattatgccgagctctgccagagctcctgggggtcaccttgggcctggtggtgctcggggtagcctacgcccagctggccatcctgctcgtgtcttcctgtgtggactccctctggagcgtggcccaggccctgttggtgctgtgccctgggactgggctctctaccctgtgtcctgccgagtcctggcacctgtcacccctgctgtgtgtggggctctgggcactgcggctgtggggcgccctacggctgggggctgttattctccgctggcgctaccacgccttgcgtggagagctgtaccggccggcctgggagccccaggactacgagatggtggagttgttcctgcgcaggctgcgcctctggatgggcctcagcaaggtcaaggagttccgccacaaagtccgctttgaagggatggagccgctgccctctcgctcctccaggggctccaaggtatccccggatgtgcccccacccagcgctggctccgatgcctcgcacccctccacctcctccagccagctggatgggctgagcgtgagcctgggccggctggggacaaggtgtgagcctgagccctcccgcctccaagccgtgttcgaggccctgctcacccagtttgaccgactcaaccaggccacagaggacgtctaccagctggagcagcagctgcacagcctgcaaggccgcaggagcagccgggcgcccgccggatcttcccgtggcccatccccgggcctgcggcagcactgcccagccgccttgcccgggccagtcggggtgtggacctggccactggccccagcaggacaccccttcgggccaagaacaaggtccaccccagcagcacttagtcctccttcctggcgggggtgggccgtggagtcggagtggacaccgctcagtattactttctgccgctgtcaaggccgagggccaggcagaatggctgcacgtaggttccccagagagcaggcaggggcatctgtctgtctgtgggcttcagcactttaaagaggctgtgtggccaaccaggacccagggtcccctccccagctcccttgggaaggacacagcagtattggacggtttctagcctctgagatgctaatttatttccccgagtcctcaggtacagcgggctgtgcccggccccaccccctgggcagatgtcccccactgctaaggctgctggcttcagggagggaatagctagtcaccaccaagccagcgtagaacgcgtggatgtatacctactgccgagttcagttatcggtaatgcccagcctgtttccacgtttatgtct

SEQ ID NO: 422112 - DNA, 934 bp, Homo sapiens
gctgaccacagggcccccccgtccaccagagcctcctggtgtacatgctttttctgctggtgaccctgctggccagctatggggatgcctcatgccatgggcacgcctaccgtctgcaaagcgccatcaagcaggagctgcacagccgggccttcctggccatcacgcggtacgggcatccggtgcactggtctgtcttctgggctttagttttgcctttagtccagccagaccctaggggacatgtggacatgtgtagatacctttgtggctgctagaactggaggtaggtgctgctggcatcagtaggcagaggggagggacacaggtccgtgtcttgcagtgcacaggacgggcccatgacagacaactgtctgccccagaacatccccaggataaggctgagaagcccaggtctagccgtggccagcagggcagtgggagccatgttccctgggtctctggtggccgctcactcgaggcgggcatggggcagtaggggctggagcgtgtgactgatgctgtggcaggtctgaggagctctggccatggatggcccacgtgctgctgccctacgtccacgggaaccagtccagcccagagctggggcccccacggctgcggcaggtgcggctgcaggaaggtgagctggcagggcgtgccccaagacttaaatcgttcctcttgttgagagagcagcctttagcggagctctggcatcagccctgctccctagctgtgtgacctttgccctcttaacaccgccgtttccttctctgtatatgagagatggtaacgttgtctaattgatggctgctgggagggttccctggggtggcgccgaaccagagctcaggcgagctggccagcaggaaacactcctgttgggttttgatgaggccctggccccggcctggggctctgtgtgtttcag

SEQ ID NO: 422113 - DNA, 284 bp, Homo sapiens
gtttgctcggaagcccagggtgtccgtgcgtgactggacgggggtgggctgtgtgtgtgacacatcccctggtaccttgctgacccgcgccacctgcagtctggtgtgctggccctccggcgagggaacgctcagttggccggacctgctcagtgacccgtccattgtgggtagcaatctgcggcagctggcacggggccaggcgggccatgggctgggcccagaggaggacggcttctccctggccagcccctactcgcctgccaaatccttctcagcatcag

SEQ ID NO: 422114 - DNA, 426 bp, Homo sapiens
ttttagctggtactaggtttgctttacagatggggaaactgaggcacagagaggttgaggcattagtagtactacatggctggctggagagccggacagtgagtgtcccagcccgggcttggctcccatggcatgcagagccccgggcacctcctctcctctgtgccccgcgtgggactctccagcccgacgggaggtgtgtccaggaggcgacaggctaagggcagagtcctccacagagcccaggctgacaccattccccccgcagaggtacagccccgtggtggaggccggctcggacatggtcttccggtggaccatcaacgacaagcagtccctgaccttccagaacgtggtcttcaatgtcatttatcagagcgcggcggtcttcaagctctcagtaggtgggcgggggtggggagggga

SEQ ID NO: 422115 - DNA, 14086 bp, Homo sapiens
  misc_feature (1330)..(1330): n is a, c, g, or t
  misc_feature (2427)..(2427): n is a, c, g, or t
  misc_feature (2585)..(2585): n is a, c, g, or t
  misc_feature (3378)..(3378): n is a, c, g, or t
  misc_feature (5381)..(5381): n is a, c, g, or t
  misc_feature (6137)..(6137): n is a, c, g, or t
gcactgcagcgccagcgtccgagcgggcggccgagctcccggagcggcctggccccgagccccgagcgggcgtcgctcagcagcaggtcgcggccgcgcagccccatccagccccgcgcccgccatgccgtccgccggccccgcctgagccgcggcctccgcgcgcgggcgggcctggggacggcggggccatgcgcgcgctgccctaacgatgccgcccgccgcgcccgcccgcctggcgctggccctgggcctgggcctgtggctcggggcgctggcggggggccccgggcgcggctgcgggccctgcgagcccccctgcctctgcggcccagcgcccggcgccgcctgccgcgtcaactgctcgggccgcgggctgcggacgctcggtcccgcgctgcgcatccccgcggacgccacagcgctagacgtctcccacaacctgctccgggcgctggacgttgggctcctggcgaacctctcggcgctggcagagctggatataagcaacaacaagatttctacgttagaagaaggaatatttgctaatttatttaatttaagtgaaataaacctgagtgggaacccgtttgagtgtgactgtggcctggcgtggctgccgcgatgggcggaggagcagcaggtgcgggtggtgcagcccgaggcagccacgtgtgctgggcctggctccctggctggccagcctctgcttggcatccccttgctggacagtggctgtggtgaggagtatgtcgcctgcctccctgacaacagctcaggcaccgtggcagcagtgtccttttcagctgcccacgaaggcctgcttcagccagaggcctgcagcgccttctgcttctccaccggccagggcctcgcagccctctcggagcagggctggtgcctgtgtggggcggcccagccctccagtgcctcctttgcctgcctgtccctctgctccggccccccgccacctcctgcccccacctgtaggggccccaccctcctccagcacgtcttccctgcctccccaggggccaccctggtggggccccacggacctctggcctctggccagctagcagccttccacatcgctgccccgctccctgtcactgccacacgctgggacttcggagacggctccgccgaggtggatgccgctgggccggctgcctcgcatcgctatgtgctgcctgggcgctatcacgtgacggccgtgctggccctgggggccggctcagccctgctggggacagacgtgcaggtggaagcggcacctgccgccctggagctcgtgtgcccgtcctcggtgcagagtgacgagagcctngacctcagcatccagaaccgcggtggttcaggcctggaggccgcctacagcatcgtggccctgggcgaggagccggcccgagcggtgcacccgctctgcccctcggacacggagatcttccctggcaacgggcactgctaccgcctggtggtggagaaggcggcctggctgcaggcgcaggagcagtgtcaggcctgggccggggccgccctggcaatggtggacagtcccgccgtgcagcgcttcctggtctcccgggtcaccaggagcctagacgtgtggatcggcttctcgactgtgcagggggtggaggtgggcccagcgccgcagggcgaggccttcagcctggagagctgccagaactggctgcccggggagccacacccagccacagccgagcactgcgtccggctcgggcccaccgggtggtgtaacaccgacctgtgctcagcgccgcacagctacgtctgcgagctgcagcccggaggcccagtgcaggatgccgagaacctcctcgtgggagcgcccagtggggacctgcagggacccctgacgcctctggcacagcaggacggcctctcagccccgcacgagcccgtggaggtcatggtattcccgggcctgcgtctgagccgtgaagccttcctcaccacggccgaatttgggacccaggagctccggcggcccgcccagctgcggctgcaggtgtaccggctcctcagcacagcagggaccccggagaacggcagcgagcctgagagcaggtccccggacaacaggacccagctggcccccgcgtgcatgccagggggacgctggtgccctggagccaacatctgcttgccgctggacgcctcctgccacccccaggcctgcgccaatggctgcacgtcagggccagggctacccggggccccctatgcgctatggagagagttcctcttctccgttcccgcggggccccccgcgcagtactcggtcaccctccacggccaggatgtcctcatgctccctggtgacctcgttggcttgcagcacgacgctggccctggcgccctcctgcactgctcgccggctcccggccaccctggtccccnggccccgtacctctccgccaacgcctcgtcatggctgccccacttgccagcccagctggagggcacttgggcctgccctgcctgtgccctgcggctgcttgcagccacggaacagctcaccgtgctgctgggcttgaggcccaaccctggactgcggntgcctgggcgctatgaggtccgggcagaggtgggcaatggcgtgtccaggcacaacctctcctgcagctttgacgtggtctccccagtggctgggctgcgggtcatctaccctgccccccgcgacggccgcctctacgtgcccaccaacggctcagccttggtgctccaggtggactctggtgccaacgccacggccacggctcgctggcctgggggcagtgtcagcgcccgctttgagaatgtctgccctgccctggtggccaccttcgtgcccggctgcccctgggagaccaacgataccctgttctcagtggtagcactgccgtggctcagtgagggggagcacgtggtggacgtggtggtggaaaacagcgccagccgggccaacctcagcctgcgggtgacggcggaggagcccatctgtggcctccgcgccacgcccagccccgaggcccgtgtactgcagggagtcctagtgaggtacagccccgtggtggaggccggctcggacatggtcttccggtggaccatcaacgacaagcagtccctgaccttccagaacgtggtcttcaatgtcatttatcagagcgcggcggtcttcaagctctcactgacggcctccaaccacgtgagcaacgtcaccgtgaactacaacgtaaccgtggagcggatgaacaggatgcagggtctgcaggtctccacagtgccggccgtgctgtcccccaatgccacgctagcactgacggcgggcgtgctggtggactcggccgtggaggtggccttcctgtgganctttggggatggggagcaggccctccaccagttccagcctccgtacaacgagtccttcccggttccagacccctcggtggcccaggtgctggtggagcacaatgtcatgcacacctacgctgccccaggtgagtacctcctgaccgtgctggcatctaatgccttcgagaacctgacgcagcaggtgcctgtgagcgtgcgcgcctccctgccctccgtggctgtgggtgtgagtgacggcgtcctggtggccggccggcccgtcaccttctacccgcacccgctgccctcgcctgggggtgttctttacacgtgggacttcggggacggctcccctgtcctgacccagagccagccggctgccaaccacacctatgcctcgaggggcacctaccacgtgcgcctggaggtcaacaacacggtgagcggtgcggcggcccaggcggatgtgcgcgtctttgaggagctccgcggactcagcgtggacatgagcctggccgtggagcagggcgcccccgtggtggtcagcgccgcggtgcagacgggcgacaacatcacgtggaccttcgacatgggggacggcaccgtgctgtcgggcccggaggcaacagtggagcatgtgtacctgcgggcacagaactgcacagtgaccgtgggtgcggccagccccgccggccacctggcccggagcctgcacgtgctggtcttcgtcctggaggtgctgcgcgttgaacccgccgcctgcatccccacgcagcctgacgcgcggctcacggcctacgtcaccgggaacccggcccactacctcttcgactggaccttcggggatggctcctccaacacgaccgtgcgggggtgcccgacggtgacacacaacttcacgcggagcggcacgttccccctggcgctggtgctgtccagccgcgtgaacagggcgcattacttcaccagcatctgcgtggagccagaggtgggcaacgtcaccctgcagccagagaggcagtttgtgcagctcggggacgaggcctggctggtggcatgtgcctggcccccgttcccctaccgctacacctgggactttggcaccgaggaagccgcccccacccgtgccaggggccctgaggtgacgttcatctaccgagacccaggctcctatcttgtgacagtcaccgcgtccaacaacatctctgctgccaatgactcagccctggtggaggtgcaggagcccgtgctggtcaccagcatcaaggtcaatggctcccttgggctggagctgcagcagccgtacctgttctctgctgtgggccgtgggcgccccgccagctacctgtgggatctgggggacggtgggtggctcgagggtccggaggtcacccacgcttacaacagcacaggtgacttcaccgttagggtggccggctggaatgaggtgagccgcagcgaggcctggctcaatgtgacggtgaagcggcgcgtgcgggggctcgtcgtcaatgcaagccgcacggtggtgcccctgaatgggagcgtgagcttcagcacgtcgctggaggccggcagtgatgtgcgctattcctgggtgctctgtgaccgctgcacgcccatccctgggggtcctaccatctcttacaccttccgctccgtgggcaccttcaatatcatcgtcacggctgagaacgaggtgggctccgcccaggacagcatcttcgtctatgtcctgcagctcatagaggggctgcaggtggtgggcggtggccgctacttccccaccaaccacacggtacagctgcaggccgtggttagggatggcaccaacgtctcctacagctggactgcctggagggacaggggcccggccctggccggcagcggcaaaggcttctcgctcaccgtgctcgaggccggcacctaccatgtgcagctgcgggccaccaacatgctgggcagcgcctgggccgactgcaccatggacttcgtggagcctgtggggtggctgatggtgnccgcctccccgaacccagctgccgtcaacacaagcgtcaccctcagtgccgagctggctggtggcagtggtgtcgtatacacttggtccttggaggaggggctgagctgggagacctccgagccatttaccacccatagcttccccacacccggcctgcacttggtcaccatgacggcagggaacccgctgggctcagccaacgccaccgtggaagtggatgtgcaggtgcctgtgagtggcctcagcatcagggccagcgagcccggaggcagcttcgtggcggccgggtcctctgtgcccttttgggggcagctggccacgggcaccaatgtgagctggtgctgggctgtgcccggcggcagcagcaagcgtggccctcatgtcaccatggtcttcccggatgctggcaccttctccatccggctcaatgcctccaacgcagtcagctgggtctcagccacgtacaacctcacggcggaggagcccatcgtgggcctggtgctgtgggccagcagcaaggtggtggcgcccgggcagctggtccattttcagatcctgctggctgccggctcagctgtcaccttccgcctgcaggtcggcggggccaaccccgaggtgctccccgggccccgtttctcccacagcttcccccgcgtcggagaccacgtggtgagcgtgcggggcaaaaaccacgtgagctgggcccaggcgcaggtgcgcatcgtggtgctggaggccgtgagtgggctgcagntgcccaactgctgcgagcctggcatcgccacgggcactgagaggaacttcacagcccgcgtgcagcgcggctctcgggtcgcctacgcctggtacttctcgctgcagaaggtccagggcgactcgctggtcatcctgtcgggccgcgacgtcacctacacgcccgtggccgcggggctgttggagatccaggtgcgcgccttcaacgccctgggcagtgagaaccgcacgctggtgctggaggttcaggacgccgtccagtatgtggccctgcagagcggcccctgcttcaccaaccgctcggcgcagtttgaggccgccaccagccccagcccccggcgtgtggcctaccactgggactttggggatgggtcgccagggcaggacacagatgagcccagggccgagcactcctacctgaggcctggggactaccgcgtgcaggtgaacgcctccaacctggtgagcttcttcgtggcgcaggccacggtgaccgtccaggtgctggcctgccgggagccggaggtggacgtggtcctgcccctgcaggtgctgatgcggcgatcacagcgcaactacttggaggcccacgttgacctgcgcgactgcgtcacctaccagactgagtaccgctgggaggtgtatcgcaccgccagctgccagcggccggggcgcccagcgcgtgtggccctgcccggcgtggacgtgagccggcctcggctggtgctgccgcggctggcgctgcctgtggggcactactgctttgtgtttgtcgtgtcatttggggacacgccactgacacagagcatccaggccaatgtgacggtggcccccgagcgcctggtgcccatcattgagggtggctcataccgcgtgtggtcagacacacgggacctggtgctggatgggagcgagtcctacgaccccaacctggaggacggcgaccagacgccgctcagtttccactgggcctgtgtggcttcgacacagagggaggctggcgggtgtgcgctgaactttgggccccgcgggagcagcacggtcaccattccacgggagcggctggcggctggcgtggagtacaccttcagcctgaccgtgtggaaggccggccgcaaggaggaggccaccaaccagacggtgctgatccggagtggccgggtgcccattgtgtccttggagtgtgtgtcctgcaaggcacaggccgtgtacgaagtgagccgcagctcctacgtgtacttggagggccgctgcctcaattgcagcagcggctccaagcgagggcggtgggctgcacgtacgttcagcaacaagacgctggtgctggatgagaccaccacatccacgggcagtgcaggcatgcgactggtgctgcggcggggcgtgctgcgggacggcgagggatacaccttcacgctcacggtgctgggccgctctggcgaggaggagggctgcgcctccatccgcctgtcccccaaccgcccgccgctggggggctcttgccgcctcttcccactgggcgctgtgcacgccctcaccaccaaggtgcacttcgaatgcacgggctggcatgacgcggaggatgctggcgccccgctggtgtacgccctgctgctgcggcgctgtcgccagggccactgcgaggagttctgtgtctacaagggcagcctctccagctacggagccgtgctgcccccgggtttcaggccacacttcgaggtgggcctggccgtggtggtgcaggaccagctgggagccgctgtggtcgccctcaacaggtctttggccatcaccctcccagagcccaacggcagcgcaacggggctcacagtctggctgcacgggctcaccgctagtgtgctcccagggctgctgcggcaggccgatccccagcacgtcatcgagtactcgttggccctggtcaccgtgctgaacgagtacgagcgggccctggacgtggcggcagagcccaagcacgagcggcagcaccgagcccagatacgcaagaacatcacggagactctggtgtccctgagggtccacactgtggatgacatccagcagatcgctgctgcgctggcccagtgcatggggcccagcagggagctcgtatgccgctcgtgcctgaagcagacgctgcacaagctggaggccatgatgctcatcctgcaggcagagaccaccgcgggcaccgtgacgcccaccgccatcggagacagcatcctcaacatcacaggagacctcatccacctggccagctcggacgtgcgggcaccacagccctcagagctgggagccgagtcaccatctcggatggtggcgtcccaggcctacaacctgacctctgccctcatgcgcatcctcatgcgctcccgcgtgctcaacgaggagcccctgacgctggcgggcgaggagatcgtggcccagggcaagcgctcggacccgcggagcctgctgtgctatggcggcgccccagggcctggctgccacttctccatccccgaggctttcagcggggccctggccaacctcagtgacgtggtgcagctcatctttctggtggactccaatccctttccctttggctatatcagcaactacaccgtctccaccaaggtggcctcgatggcattccagacacaggccggcgcccagatccccatcgagcggctggcctcagagcgcgccatcaccgtgaaggtgcccaacaactcggactgggctgcccggggccaccgcagctccgccaactccgccaactccgttgtggtccagccccaggcctccgtcggtgctgtggtcaccctggacagcagcaaccctgcggccgggctgcatctgcagctcaactatacgctgctggacggccactacctgtctgaggaacctgagccctacctggcagtctacctacactcggagccccggcccaatgagcacaactgctcggctagcaggaggatccgcccagagtcactccagggtgctgaccaccggccctacaccttcttcatttccccggggagcagagacccagcggggagttaccatctgaacctctccagccacttccgctggtcggcgctgcaggtgtccgtgggcctgtacacgtccctgtgccagtacttcagcgaggaggacatggtgtggcggacagaggggctgctgcccctggaggagacctcgccccgccaggccgtctgcctcacccgccacctcaccgccttcggcgccagcctcttcgtgcccccaagccatgtccgctttgtgtttcctgagccgacagcggatgtaaactacatcgtcatgctgacatgtgctgtgtgcctggtgacctacatggtcatggccgccatcctgcacaagctggaccagttggatgccagccggggccgcgccatccctttctgtgggcagcggggccgcttcaagtacgagatcctcgtcaagacaggctggggccggggctcaggtaccacggcccacgtgggcatcatgctgtatggggtggacagccggagcggccaccggcacctggacggcgacagagccttccaccgcaacagcctggacatcttccggatcgccaccccgcacagcctgggtagcgtgtggaagatccgagtgtggcacgacaacaaagggctcagccctgcctggttcctgcagcacgtcatcgtcagggacctgcagacggcacgcagcgccttcttcctggtcaatgactggctttcggtggagacggaggccaacgggggcctggtggagaaggaggtgctggccgcgagcgacgcagcccttttgcgcttccggcgcctgctggtggctgagctgcagcgtggcttctttgacaagcacatctggctctccatatgggaccggccgcctcgtagccgtttcactcgcatccagagggccacctgctgcgttctcctcatctgcctcttcctgggcgccaacgccgtgtggtacggggctgttggcgactctgcctacagcacggggcatgtgtccaggctgagcccgctgagcgtcgacacagtcgctgttggcctggtgtccagcgtggttgtctatcccgtctacctggccatcctttttctcttccggatgtcccggagcaaggtggctgggagcccgagccccacacctgccgggcagcaggtgctggacatcgacagctgcctggactcgtccgtgctggacagctccttcctcacgttctcaggcctccacgctgaggcctttgttggacagatgaagagtgacttgtttctggatgattctaagagtctggtgtgctggccctccggcgagggaacgctcagttggccggacctgctcagtgacccgtccattgtgggtagcaatctgcggcagctggcacggggccaggcgggccatgggctgggcccagaggaggacggcttctccctggccagcccctactcgcctgccaaatccttctcagcatcagatgaagacctgatccagcaggtccttgccgagggggtcagcagcccagcccctacccaagacacccacatggaaacggacctgctcagcagcctgtccagcactcctggggagaagacagagacgctggcgctgcagaggctgggggagctggggccacccagcccaggcctgaactgggaacagccccaggcagcgaggctgtccaggacaggactggtggagggtctgcggaagcgcctgctgccggcctggtgtgcctccctggcccacgggctcagcctgctcctggtggctgtggctgtggctgtctcagggtgggtgggtgcgagcttccccccgggcgtgagtgttgcgtggctcctgtccagcagcgccagcttcctggcctcattcctcggctgggagccactgaaggtcttgctggaagccctgtacttctcactggtggccaagcggctgcacccggatgaagatgacaccctggtagagagcccggctgtgacgcctgtgagcgcacgtgtgccccgcgtacggccaccccacggctttgcactcttcctggccaaggaagaagcccgcaaggtcaagaggctacatggcatgctgcggagcctcctggtgtacatgctttttctgctggtgaccctgctggccagctatggggatgcctcatgccatgggcacgcctaccgtctgcaaagcgccatcaagcaggagctgcacagccgggccttcctggccatcacgcggtctgaggagctctggccatggatggcccacgtgctgctgccctacgtccacgggaaccagtccagcccagagctggggcccccacggctgcggcaggtgcggctgcaggaagcactctacccagaccctcccggccccagggtccacacgtgctcggccgcaggaggcttcagcaccagcgattacgacgttggctgggagagtcctcacaatggctcggggacgtgggcctattcagcgccggatctgctggggagctgggcctgagcctggaggagagccgcgaccggctgcgcttcctgcagctgcacaactggctggacaacaggagccgcgctgtgttcctggagctcacgcgctacagcccggccgtggggctgcacgccgccgtcacgctgcgcctcgagttcccggcggccggccgcgccctggccgccctcagcgtccgcccctttgcgctgcgccgcctcagcgcgggcctctcgctgcctctgctcacctcggtgtgcctgctgctgttcgccgtgcacttcgccgtggccgaggcccgtacttggcacagggaagggcgctggcgcgtgctgcggctcggagcctgggcgcggtggctgctggtggcgctgacggcggccacggcactggtacgcctcgcccagctgggtgccgctgaccgccagtggacccgtttcgtgcgcggccgcccgcgccgcttcactagcttcgaccaggtggcgcagctgagctccgcagcccgtggcctggcggcctcgctgctcttcctgcttttggtcaaggctgcccagcagctacgcttcgtgcgccagtggtccgtctttggcaagacattatgccgagctctgccagagctcctgggggtcaccttgggcctggtggtgctcggggtagcctacgcccagctggccatcctgctcgtgtcttcctgtgtggactccctctggagcgtggcccaggccctgttggtgctgtgccctgggactgggctctctaccctgtgtcctgccgagtcctggcacctgtcacccctgctgtgtgtggggctctgggcactgcggctgtggggcgccctacggctgggggctgttattctccgctggcgctaccacgccttgcgtggagagctgtaccggccggcctgggagccccaggactacgagatggtggagttgttcctgcgcaggctgcgcctctggatgggcctcagcaaggtcaaggagttccgccacaaagtccgctttgaagggatggagccgctgccctctcgctcctccaggggctccaaggtatccccggatgtgcccccacccagcgctggctccgatgcctcgcacccctccacctcctccagccagctggatgggctgagcgtgagcctgggccggctggggacaaggtgtgagcctgagccctcccgcctccaagccgtgttcgaggccctgctcacccagtttgaccgactcaaccaggccacagaggacgtctaccagctggagcagcagctgcacagcctgcaaggccgcaggagcagccgggcgcccgccggatcttcccgtggcccatccccgggcctgcggcagcactgcccagccgccttgcccgggccagtcggggtgtggacctggccactggccccagcaggacaccccttcgggccaagaacaaggtccaccccagcagcacttagtcctccttcctggcgggggtgggccgtggagtcggagtggacaccgctcagtattactttctgccgctgtcaaggccgagggccaggcagaatggctgcacgtaggttccccagagagcaggcaggggcatctgtctgtctgtgggcttcagcactttaaagaggctgtgtggccaaccaggacccagggtcccctccccagctcccttgggaaggacacagcagtattggacggtttctagcctctgagatgctaatttatttccccgagtcctcaggtacagcgggctgtgcccggccccaccccctgggcagatgtcccccactgctaaggctgctggcttcagggagggttagcctgcaccgccgccaccctgcccctaagttattacctctccagttcctaccgtactccctgcaccgtctcactgtgtgtctcgtgtcagtaatttatatggtgttaaaatgtgtatatttttgtatgtcactattttcactagggctgaggggcctgcgcccagagctggcctcccccaacacctgctgcgcttggtaggtgtggtggcgttatggcagcccggctgctgcttggatgcgagcttggccttgggccggtgctgggggcacagctgtctgccaggcactctcatcaccccagaggccttgtcatcctcccttgccccaggccaggtagcaagagagcagcgcccaggcctgctggcatcaggtctgggcaagtagcaggactaggcatgtcagaggaccccagggtggttagaggaaaagactcctcctgggggctggctcccagggtggaggaaggtgactgtgtgtgtgtgtgtgtgcgcgcgcgcacgcgcgagtgtgctgtatggcccaggcagcctcaaggccctcggagctggctgtgcctgcttctgtgtaccacttctgtgggcatggccgcttctagagcctcgacacccccccaacccccgcaccaagcagacaaagtcaataaaagagctgtctgactgcaa

SEQ ID NO: 422116 - DNA, 11413 bp, Homo sapiens
  misc_feature (1330)..(1330): n is a, c, g, or t
  misc_feature (2427)..(2427): n is a, c, g, or t
  misc_feature (2585)..(2585): n is a, c, g, or t
  misc_feature (3378)..(3378): n is a, c, g, or t
  misc_feature (5381)..(5381): n is a, c, g, or t
  misc_feature (6137)..(6137): n is a, c, g, or t
gcactgcagcgccagcgtccgagcgggcggccgagctcccggagcggcctggccccgagccccgagcgggcgtcgctcagcagcaggtcgcggccgcgcagccccatccagccccgcgcccgccatgccgtccgccggccccgcctgagccgcggcctccgcgcgcgggcgggcctggggacggcggggccatgcgcgcgctgccctaacgatgccgcccgccgcgcccgcccgcctggcgctggccctgggcctgggcctgtggctcggggcgctggcggggggccccgggcgcggctgcgggccctgcgagcccccctgcctctgcggcccagcgcccggcgccgcctgccgcgtcaactgctcgggccgcgggctgcggacgctcggtcccgcgctgcgcatccccgcggacgccacagcgctagacgtctcccacaacctgctccgggcgctggacgttgggctcctggcgaacctctcggcgctggcagagctggatataagcaacaacaagatttctacgttagaagaaggaatatttgctaatttatttaatttaagtgaaataaacctgagtgggaacccgtttgagtgtgactgtggcctggcgtggctgccgcgatgggcggaggagcagcaggtgcgggtggtgcagcccgaggcagccacgtgtgctgggcctggctccctggctggccagcctctgcttggcatccccttgctggacagtggctgtggtgaggagtatgtcgcctgcctccctgacaacagctcaggcaccgtggcagcagtgtccttttcagctgcccacgaaggcctgcttcagccagaggcctgcagcgccttctgcttctccaccggccagggcctcgcagccctctcggagcagggctggtgcctgtgtggggcggcccagccctccagtgcctcctttgcctgcctgtccctctgctccggccccccgccacctcctgcccccacctgtaggggccccaccctcctccagcacgtcttccctgcctccccaggggccaccctggtggggccccacggacctctggcctctggccagctagcagccttccacatcgctgccccgctccctgtcactgccacacgctgggacttcggagacggctccgccgaggtggatgccgctgggccggctgcctcgcatcgctatgtgctgcctgggcgctatcacgtgacggccgtgctggccctgggggccggctcagccctgctggggacagacgtgcaggtggaagcggcacctgccgccctggagctcgtgtgcccgtcctcggtgcagagtgacgagagcctngacctcagcatccagaaccgcggtggttcaggcctggaggccgcctacagcatcgtggccctgggcgaggagccggcccgagcggtgcacccgctctgcccctcggacacggagatcttccctggcaacgggcactgctaccgcctggtggtggagaaggcggcctggctgcaggcgcaggagcagtgtcaggcctgggccggggccgccctggcaatggtggacagtcccgccgtgcagcgcttcctggtctcccgggtcaccaggagcctagacgtgtggatcggcttctcgactgtgcagggggtggaggtgggcccagcgccgcagggcgaggccttcagcctggagagctgccagaactggctgcccggggagccacacccagccacagccgagcactgcgtccggctcgggcccaccgggtggtgtaacaccgacctgtgctcagcgccgcacagctacgtctgcgagctgcagcccggaggcccagtgcaggatgccgagaacctcctcgtgggagcgcccagtggggacctgcagggacccctgacgcctctggcacagcaggacggcctctcagccccgcacgagcccgtggaggtcatggtattcccgggcctgcgtctgagccgtgaagccttcctcaccacggccgaatttgggacccaggagctccggcggcccgcccagctgcggctgcaggtgtaccggctcctcagcacagcagggaccccggagaacggcagcgagcctgagagcaggtccccggacaacaggacccagctggcccccgcgtgcatgccagggggacgctggtgccctggagccaacatctgcttgccgctggacgcctcctgccacccccaggcctgcgccaatggctgcacgtcagggccagggctacccggggccccctatgcgctatggagagagttcctcttctccgttcccgcggggccccccgcgcagtactcggtcaccctccacggccaggatgtcctcatgctccctggtgacctcgttggcttgcagcacgacgctggccctggcgccctcctgcactgctcgccggctcccggccaccctggtccccnggccccgtacctctccgccaacgcctcgtcatggctgccccacttgccagcccagctggagggcacttgggcctgccctgcctgtgccctgcggctgcttgcagccacggaacagctcaccgtgctgctgggcttgaggcccaaccctggactgcggntgcctgggcgctatgaggtccgggcagaggtgggcaatggcgtgtccaggcacaacctctcctgcagctttgacgtggtctccccagtggctgggctgcgggtcatctaccctgccccccgcgacggccgcctctacgtgcccaccaacggctcagccttggtgctccaggtggactctggtgccaacgccacggccacggctcgctggcctgggggcagtgtcagcgcccgctttgagaatgtctgccctgccctggtggccaccttcgtgcccggctgcccctgggagaccaacgataccctgttctcagtggtagcactgccgtggctcagtgagggggagcacgtggtggacgtggtggtggaaaacagcgccagccgggccaacctcagcctgcgggtgacggcggaggagcccatctgtggcctccgcgccacgcccagccccgaggcccgtgtactgcagggagtcctagtgaggtacagccccgtggtggaggccggctcggacatggtcttccggtggaccatcaacgacaagcagtccctgaccttccagaacgtggtcttcaatgtcatttatcagagcgcggcggtcttcaagctctcactgacggcctccaaccacgtgagcaacgtcaccgtgaactacaacgtaaccgtggagcggatgaacaggatgcagggtctgcaggtctccacagtgccggccgtgctgtcccccaatgccacgctagcactgacggcgggcgtgctggtggactcggccgtggaggtggccttcctgtgganctttggggatggggagcaggccctccaccagttccagcctccgtacaacgagtccttcccggttccagacccctcggtggcccaggtgctggtggagcacaatgtcatgcacacctacgctgccccaggtgagtacctcctgaccgtgctggcatctaatgccttcgagaacctgacgcagcaggtgcctgtgagcgtgcgcgcctccctgccctccgtggctgtgggtgtgagtgacggcgtcctggtggccggccggcccgtcaccttctacccgcacccgctgccctcgcctgggggtgttctttacacgtgggacttcggggacggctcccctgtcctgacccagagccagccggctgccaaccacacctatgcctcgaggggcacctaccacgtgcgcctggaggtcaacaacacggtgagcggtgcggcggcccaggcggatgtgcgcgtctttgaggagctccgcggactcagcgtggacatgagcctggccgtggagcagggcgcccccgtggtggtcagcgccgcggtgcagacgggcgacaacatcacgtggaccttcgacatgggggacggcaccgtgctgtcgggcccggaggcaacagtggagcatgtgtacctgcgggcacagaactgcacagtgaccgtgggtgcggccagccccgccggccacctggcccggagcctgcacgtgctggtcttcgtcctggaggtgctgcgcgttgaacccgccgcctgcatccccacgcagcctgacgcgcggctcacggcctacgtcaccgggaacccggcccactacctcttcgactggaccttcggggatggctcctccaacacgaccgtgcgggggtgcccgacggtgacacacaacttcacgcggagcggcacgttccccctggcgctggtgctgtccagccgcgtgaacagggcgcattacttcaccagcatctgcgtggagccagaggtgggcaacgtcaccctgcagccagagaggcagtttgtgcagctcggggacgaggcctggctggtggcatgtgcctggcccccgttcccctaccgctacacctgggactttggcaccgaggaagccgcccccacccgtgccaggggccctgaggtgacgttcatctaccgagacccaggctcctatcttgtgacagtcaccgcgtccaacaacatctctgctgccaatgactcagccctggtggaggtgcaggagcccgtgctggtcaccagcatcaaggtcaatggctcccttgggctggagctgcagcagccgtacctgttctctgctgtgggccgtgggcgccccgccagctacctgtgggatctgggggacggtgggtggctcgagggtccggaggtcacccacgcttacaacagcacaggtgacttcaccgttagggtggccggctggaatgaggtgagccgcagcgaggcctggctcaatgtgacggtgaagcggcgcgtgcgggggctcgtcgtcaatgcaagccgcacggtggtgcccctgaatgggagcgtgagcttcagcacgtcgctggaggccggcagtgatgtgcgctattcctgggtgctctgtgaccgctgcacgcccatccctgggggtcctaccatctcttacaccttccgctccgtgggcaccttcaatatcatcgtcacggctgagaacgaggtgggctccgcccaggacagcatcttcgtctatgtcctgcagctcatagaggggctgcaggtggtgggcggtggccgctacttccccaccaaccacacggtacagctgcaggccgtggttagggatggcaccaacgtctcctacagctggactgcctggagggacaggggcccggccctggccggcagcggcaaaggcttctcgctcaccgtgctcgaggccggcacctaccatgtgcagctgcgggccaccaacatgctgggcagcgcctgggccgactgcaccatggacttcgtggagcctgtggggtggctgatggtgnccgcctccccgaacccagctgccgtcaacacaagcgtcaccctcagtgccgagctggctggtggcagtggtgtcgtatacacttggtccttggaggaggggctgagctgggagacctccgagccatttaccacccatagcttccccacacccggcctgcacttggtcaccatgacggcagggaacccgctgggctcagccaacgccaccgtggaagtggatgtgcaggtgcctgtgagtggcctcagcatcagggccagcgagcccggaggcagcttcgtggcggccgggtcctctgtgcccttttgggggcagctggccacgggcaccaatgtgagctggtgctgggctgtgcccggcggcagcagcaagcgtggccctcatgtcaccatggtcttcccggatgctggcaccttctccatccggctcaatgcctccaacgcagtcagctgggtctcagccacgtacaacctcacggcggaggagcccatcgtgggcctggtgctgtgggccagcagcaaggtggtggcgcccgggcagctggtccattttcagatcctgctggctgccggctcagctgtcaccttccgcctgcaggtcggcggggccaaccccgaggtgctccccgggccccgtttctcccacagcttcccccgcgtcggagaccacgtggtgagcgtgcggggcaaaaaccacgtgagctgggcccaggcgcaggtgcgcatcgtggtgctggaggccgtgagtgggctgcagntgcccaactgctgcgagcctggcatcgccacgggcactgagaggaacttcacagcccgcgtgcagcgcggctctcgggtcgcctacgcctggtacttctcgctgcagaaggtccagggcgactcgctggtcatcctgtcgggccgcgacgtcacctacacgcccgtggccgcggggctgttggagatccaggtgcgcgccttcaacgccctgggcagtgagaaccgcacgctggtgctggaggttcaggacgccgtccagtatgtggccctgcagagcggcccctgcttcaccaaccgctcggcgcagtttgaggccgccaccagccccagcccccggcgtgtggcctaccactgggactttggggatgggtcgccagggcaggacacagatgagcccagggccgagcactcctacctgaggcctggggactaccgcgtgcaggtgaacgcctccaacctggtgagcttcttcgtggcgcaggccacggtgaccgtccaggtgctggcctgccgggagccggaggtggacgtggtcctgcccctgcaggtgctgatgcggcgatcacagcgcaactacttggaggcccacgttgacctgcgcgactgcgtcacctaccagactgagtaccgctgggaggtgtatcgcaccgccagctgccagcggccggggcgcccagcgcgtgtggccctgcccggcgtggacgtgagccggcctcggctggtgctgccgcggctggcgctgcctgtggggcactactgctttgtgtttgtcgtgtcatttggggacacgccactgacacagagcatccaggccaatgtgacggtggcccccgagcgcctggtgcccatcattgagggtggctcataccgcgtgtggtcagacacacgggacctggtgctggatgggagcgagtcctacgaccccaacctggaggacggcgaccagacgccgctcagtttccactgggcctgtgtggcttcgacacagagggaggctggcgggtgtgcgctgaactttgggccccgcgggagcagcacggtcaccattccacgggagcggctggcggctggcgtggagtacaccttcagcctgaccgtgtggaaggccggccgcaaggaggaggccaccaaccagacggtgctgatccggagtggccgggtgcccattgtgtccttggagtgtgtgtcctgcaaggcacaggccgtgtacgaagtgagccgcagctcctacgtgtacttggagggccgctgcctcaattgcagcagcggctccaagcgagggcggtgggctgcacgtacgttcagcaacaagacgctggtgctggatgagaccaccacatccacgggcagtgcaggcatgcgactggtgctgcggcggggcgtgctgcgggacggcgagggatacaccttcacgctcacggtgctgggccgctctggcgaggaggagggctgcgcctccatccgcctgtcccccaaccgcccgccgctggggggctcttgccgcctcttcccactgggcgctgtgcacgccctcaccaccaaggtgcacttcgaatgcacgggctggcatgacgcggaggatgctggcgccccgctggtgtacgccctgctgctgcggcgctgtcgccagggccactgcgaggagttctgtgtctacaagggcagcctctccagctacggagccgtgctgcccccgggtttcaggccacacttcgaggtgggcctggccgtggtggtgcaggaccagctgggagccgctgtggtcgccctcaacaggtctttggccatcaccctcccagagcccaacggcagcgcaacggggctcacagtctggctgcacgggctcaccgctagtgtgctcccagggctgctgcggcaggccgatccccagcacgtcatcgagtactcgttggccctggtcaccgtgctgaacgagtacgagcgggccctggacgtggcggcagagcccaagcacgagcggcagcaccgagcccagatacgcaagaacatcacggagactctggtgtccctgagggtccacactgtggatgacatccagcagatcgctgctgcgctggcccagtgcatggggcccagcagggagctcgtatgccgctcgtgcctgaagcagacgctgcacaagctggaggccatgatgctcatcctgcaggcagagaccaccgcgggcaccgtgacgcccaccgccatcggagacagcatcctcaacatcacaggagacctcatccacctggccagctcggacgtgcgggcaccacagccctcagagctgggagccgagtcaccatctcggatggtggcgtcccaggcctacaacctgacctctgccctcatgcgcatcctcatgcgctcccgcgtgctcaacgaggagcccctgacgctggcgggcgaggagatcgtggcccagggcaagcgctcggacccgcggagcctgctgtgctatggcggcgccccagggcctggctgccacttctccatccccgaggctttcagcggggccctggccaacctcagtgacgtggtgcagctcatctttctggtggactccaatccctttccctttggctatatcagcaactacaccgtctccaccaaggtggcctcgatggcattccagacacaggccggcgcccagatccccatcgagcggctggcctcagagcgcgccatcaccgtgaaggtgcccaacaactcggactgggctgcccggggccaccgcagctccgccaactccgccaactccgttgtggtccagccccaggcctccgtcggtgctgtggtcaccctggacagcagcaaccctgcggccgggctgcatctgcagctcaactatacgctgctggacggccactacctgtctgaggaacctgagccctacctggcagtctacctacactcggagccccggcccaatgagcacaactgctcggctagcaggaggatccgcccagagtcactccagggtgctgaccaccggccctacaccttcttcatttccccggggagcagagacccagcggggagttaccatctgaacctctccagccacttccgctggtcggcgctgcaggtgtccgtgggcctgtacacgtccctgtgccagtacttcagcgaggaggacatggtgtggcggacagaggggctgctgcccctggaggagacctcgccccgccaggccgtctgcctcacccgccacctcaccgccttcggcgccagcctcttcgtgcccccaagccatgtccgctttgtgtttcctgagccgacagcggatgtaaactacatcgtcatgctgacatgtgctgtgtgcctggtgacctacatggtcatggccgccatcctgcacaagctggaccagttggatgccagccggggccgcgccatccctttctgtgggcagcggggccgcttcaagtacgagatcctcgtcaagacaggctggggccggggctcaggtaccacggcccacgtgggcatcatgctgtatggggtggacagccggagcggccaccggcacctggacggcgacagagccttccaccgcaacagcctggacatcttccggatcgccaccccgcacagcctgggtagcgtgtggaagatccgagtgtggcacgacaacaaagggctcagccctgcctggttcctgcagcacgtcatcgtcagggacctgcagacggcacgcagcgccttcttcctggtcaatgactggctttcggtggagacggaggccaacgggggcctggtggagaaggaggtgctggccgcgagcgacgcagcccttttgcgcttccggcgcctgctggtggctgagctgcagcgtggcttctttgacaagcacatctggctctccatatgggaccggccgcctcgtagccgtttcactcgcatccagagggccacctgctgcgttctcctcatctgcctcttcctgggcgccaacgccgtgtggtacggggctgttggcgactctgcctacagcacggggcatgtgtccaggctgagcccgctgagcgtcgacacagtcgctgttggcctggtgtccagcgtggttgtctatcccgtctacctggccatcctttttctcttccggatgtcccggagcaaggtggctgggagcccgagccccacacctgccgggcagcaggtgctggacatcgacagctgcctggactcgtccgtgctggacagctccttcctcacgttctcaggcctccacgctgaggcctttgttggacagatgaagagtgacttgtttctggatgattctaagagtctggtgtgctggccctccggcgagggaacgctcagttggccggacctgctcagtgacccgtccattgtgggtagcaatctgcggcagctggcacggggccaggcgggccatgggctgggcccagaggaggacggcttctccctggccagcccctactcgcctgccaaatccttctcagcatcagatgaagacctgatccagcaggtccttgccgagggggtcagcagcccagcccctacccaagacacccacatggaaacggacctgctcagcagcctgtccagcactcctggggagaagacagagacgctggcgctgcagaggctgggggagctggggccacccagcccaggcctgaactgggaacagccccaggcagcgaggctgtccaggacaggactggtggagggtctgcggaagcgcctgctgccggcctggtgtgcctccctggcccacgggctcagcctgctcctggtggctgtggctgtggctgtctcagggtgggtgggtgcgagcttccccccgggcgtgagtgttgcgtggctcctgtccagcagcgccagcttcctggcctcattcctcggctgggagccactgaaggtcttgctggaagccctgtacttctcactggtggccaagcggctgcacccggatgaagatgacaccctggtagagagcccggctgtgacgcctgtgagcgcacgtgtgccccgcgtacggccaccccacggctttgcactcttcctggccaaggaagaagcccgcaaggtcaagaggctacatggcatgctgcgggtgagcctgggtgcggcctgtgcccctgccacctccgtctcttgtctcccacctcccacccatgcacgcaggacactcctgtccccctttcctcacctcagaaggcccttaggggttcaatgctctgcagcctttgcccggtctccctcctaccccacgccccccacttgctgccccagtccctgccag

SEQ ID NO: 422117 - DNA, 456 bp, Homo sapiens
gacggtggcctgtgggcaaatcagggccccaacaccctcccctcctcacagggaccccggagaacggcagcgagcctgagagcaggtccccggacaacaggacccagctggcccccgcgtgcatgccagggggacgctggtgccctggagccaacatctgcttgccgctggacgcctcctgccacccccaggcctgcgccaatggctgcacgtcagggccagggctacccggggccccctatgcgctatggagagagttcctcttctccgttcccgcggggccccccgcgcagtactcggtgtgtggccctgacctgggtctgttccctgcatctcctcaggccaccttcctgtctgctgcccagggtctgggtctgtgcaccagacacacccagcctgcaggcccctcccacgtccttgccacctctgacctccgacctctgcagtgccctcggc

SEQ ID NO: 422118 - DNA, 6635 bp, Homo sapiens
  misc_feature (319)..(319): n is a, c, g, or t
  misc_feature (4401)..(4401): n is a, c, g, or t
acagataggatcttgctgttgcctaggctggagtgcagtggcacaatcatagctcactgcagcttcgaactcctgggctcaagcaatcctcctgcctcagcctcctgagtagctgagactacaggcacgtgtcaccaagcccagctaagttttttattttttgtagagatgaggtctcactatcttgcccaggttggtctccaactcctggcctcactcaatcctcctgcctcagcctcccaaaacgctggagttacaggtgtgagccactgcacctggcctttgtattttagtataaaatgtgctttggatagaatcnttgctttttctagcttgtggcctttttttttttaagtatctgtataaggcagttggaaaacaagttcaagctggacactcttgagtccagtcctcatgttttcagcccactgttgcacccagttcgtgtgggtcaggcctgggcccatggaatgagtgtatctcccagtaaggaagtctgctatctgacaaaaacagcagaagctgagagctcaagggatacaaaatagattgcagttgagggttaggaaggaggctgcatctgtgtgcctatttcccctggcaagcctctacatcgaagagcagcagagcagccctgtcgtgccattgagctgacagtgccacatatgcaaagataaagccatagaggcaggacacttgaggggcacctctcagtctgccctgaaccatctgccatcttgaacagggagacaccatggctctggggcagttttcctccataagaactcacttggagatattgcccttctgtttaataccatcctctagccaaataattcaagaaggtggcattcagtcatatactgttttcagttctaaagaaaagttgaagtgatggtagtaaattgtggactaaagacagcttaatagcatactgatgtggcctgtcttctctttcaagctttgtcatttctaattaaggtttaaatggagaaactatcattttgtagttacctgagatttttcagttctaaagtaaaaacaaaaaaacaaacaaaaaccaacacgtttaaaaatccctccccaagtaaccagcagtcagtttgatcattatggaagagaattcagatggcaatgtatttgcaattgaggagagagtagccaatcacacttaatgaaacagaccgtttacacttggaatggcctggagtaagttgatattcagcgtctacactcaaatatcaatcttggatttggaaatttggcttgaccactgtaaagtctgggaagatgaaatgcctaaattctgggttccataacttttcatctgacagctggtggtgccgaaccccgtccccaattacctaggtcatctttaaggtcaatgtcagcattggtaggattgattatggcctccacctcaaagccggctaaattactgatttcactgtgaataaggttcagctgcaaagaaaagcatgaggtgggaaataacaggagagctgggaagtctcagagaaggagccttgggatacaggtaaaggacagtggacactccaagtgcacgaggcacaaaagggaagcagggagttgctggctcaaatgaacccatttcaaacataagactcaaatgctgctcgggatgcgggagcaagcaaactaggatgaatgttcagagcccgtgggtggcacctgggacaaaaggaagcacaagccacagtggacgaggagatcagctttcctttaaagggacttgtgatctgggggccaaagtaaggcagctatcaggacctagaatgagtactcattgctgagggttgggggctggtggatgtgactgtcctcatccttgagcactaggctggtgctaacatcctacctggcttgggcaaacccctaagggctctgccattgtcttccaagtgactatgggcctttaaggctgtccccatcactgtgactgctggctggcttccctgccctgctcagggtggcaagaagtgagaatagtctcttgcttagtaacatttaatttacgtgcccattagtcatgtaatgctgaagttccatggtgaaacccaggggaggaaggttctccagcaagacaatgtgtcttttaaatggttttcaccttgttggtcaggttgctctgagactcaatgggtggcttattgagcattttccttaagtgttatatccacccagtgaatttgttctttctgaagagccactgaatgggtgtcccccagccactgttattctgttacaatggcaaccctggcatctgagtattcgaagaatactgagttcgaaattctgtcagaggggcaaggggaattaatgggcctaggactgctgtcccaggtcctactattccccttgcttttctttaggtattgcaggaaagcttgctcttgcacatgctctcacaatgacattgctcactcttcagtaacataaattcctaacacctgcagacaagtgcaatgcctgagtagccctagcagagctggtgctcaagactatgacctaggccagaatagtggctgcagtctgcagggtttaccagggcatgaggctttgtccaggagctcacccaggagagggctgtgcacaagacacttggcagggaagctcctggcaacagagcaagttgctgcatttctagggccaaacattttgttgaaaacaaaaccaaacaacctggcactccagaagtatcggaaatataaacccacatttttgattcccagaaacagtcagattctcaaagagggatgtgcttacactaagagtcatcctctgggaggaaacagttgtggaattaagttttgtcaaacagccaaggaagaattctggccagggcagtggacttcatttttggttaaagactcagagaagaggaccaagtattattcatatggactttctgggttattgctcctcgcactatagagtgatttagaggccacccacacccttgaagctgaaggaagccatgggggtgatctcacaaagcgaagctctcagcagctcagagccctggcaccaggacagaggcacagaaaagagacagcatgggggctggggcctgactgctgccactggggagtaggggtgtgggtgggcacagagtcgggggccttagggtaaggcaagtgaactctcaggatttagaacaaggcaaaggattttactctattatttagttctgcatttggctccaagcaaatgctatttacaaaaactcaaattaagccaatactccccaccacacaccaccaaaacacaccccacacagtgtgaagaggcaggaggttggtgaggaaggcaggcaaaggagaaaaagactcgatctactcagtgtaatgtggatgtgtatgcttttaaggcacctataaattcctatgtttaaaacaatacatgttcaatccttaaaattcacgcaattttttccaattgtatagatgcttctggtgttatattcagaaatgtttcattggaaaagaagctattttggcgggctctgcttcagctagccaggaagaccccctcagtggcctgtatctgactctcttcgcgggagaaccacctgctctgtctaggggaatgggattctctgggggaaacttggatttgctgaaggaagggagcagttgcgaacagaactcaagctcatggagaattctcagcttcctttggactcactaccttcccttctgaccagaggcatccccactcttggaagtgcagactacagtacctcagggagccactactactcagcattgaggatttcctgccaaccaagtgctgtttcactcttcacatctgtggatgaggctagagctgtgattttccaactatgctctgctatgcactggggctcagcagaagtcctcagggtatgcagctgagccacaaaagtttttttgctgtaaaatgtgtacaaatatgtatttttaaacaatcttgactagaaagtgtgtgcttgggatgtgtgcatcaggggaagagaatgggaaggggagaagacaaattaattcaagtactttggaaggacaaatgggtaatcagcttggcaggtgggccagtgggcagaagctgacagtgagatgatcatgaacgaagacagtagctccactatacagaagaaagcccatgagcatagcgtgcaaatggaccaggtacacatgtgtctggacaggctcccactgtccagtcacaaatgaataagcgagatagagccaagacagaggtccagtcctaggaggccccagggtcccctcccaccagccagggtcagatccagtggggtttatcagccagaggggtgtgtgtccatctgaagtacatggcagagaagtggtccttgtgggttaggaaatcagatttctgggnactgtaaaaattcccaaaattagtctgattttctgggaggaataaggatcattaatggtttcagaatttgaataaggtgactgcttctttgtaccgtcgttaggaaagatggaaaactaagttttaaaccacagcatgaggaatttaaagcagctatgaagactgttagccactgaggaaagtaatcatagggcactgccagttatagagcagaagggggtccccgcgtggctgcacagttggcagaaagggtcgtagccaagggaccttcaagatcccttccagcactgggatccgataatcctaacctcactggctctgctgggccagcttctgatacaagcagtacccgagtcttccctgtggtgaggatgtccgtggaaacccttgttctttactcatggtatatgctcatcagagtataatctctttgaaggcaggagtgggtgtggccccctaaccctgagtgctgcacagtgcctaagccagtgctggggttcccctgggcatgtagagttagaactgaacatcaaacatccttagatataactcataaaatgactgcccctgcttgctttcctttaaggcattgttaatggaaatgccagagctcagaaattgagccctgggcctggcttgtatctgaggtggctcagagccaagctgtcctcgcctggatgggaggctggcccccaccatttagggcagggcaggaggcggtctgtcgatgatgacagggaaggagtgtctggatggacatgcagactgcctgacctgacctacttggctacaggaaatagtacattccttcttggttcttttaaaaaaatatgattagaaacccaattttagttaatgaaagtggctgttaaagatagtgcctgagtagtatgttaaatctagcctgtaactgtcagattttggtgtctctcattttctcataacagataaggaaggaagcctggctgaccacctaaaatgcagttattttcctgtccccaaagttcacttcaacgaggggaatgggaagggcaatgtcttccataggaccctttccagtctcctcctgagagctgtgtcttccctggggcacactccagggctggctcctgccctcacagctgtgctgtgtggctctccctgcatgcatgcatgcccaagctggatttctccagaggccttgggccgggcagaatctagtgtgtccagctagaaagagccccacaaagataaggacatggatagatactgctggatgtccagatggtcgatagctgagccattccttcatggctttgtcagtttcctaaactgtctcagaagccagtcctcagccatagtggggggaaggggtgaatggtttttctcctcactgatgcttcaacttcaagagctccctttctcctcacagttcttccagctcccgggagaagggtatgtggatcaaagggagaaaacccatggtacgttatgcccgccttgaatggcttgcgagctggggttgccatcttgatcatttgggaggtaaggagactcatcacagcctcagactgccttcctaactccttcaaataatactgactctgacaaggaaacttaaatcatttaccatttaccattaagtcagtgttaccactgacacattagacacattagaaatgttttttctgaaaattttaaaacctctgaaaaaaggctgcaaatcttggctgaacacaaagcaaaagcatttagttgactcagattcacagcactgatttcttttttaaaacaattcaacaatgtgtgtgaacattgggcaaaatcagagagtaatggctatgatgactcctgagacttcagtatgtgaaatacatcattaacatcaatggtcaggctcctaagcctgggccatgcttcctgagtagcttagcaaccatgccttacagggctgtagcatgcacaatatcacctttctccaccccagcttgcttgcaatcttcaagcactggtttcagtgtcacagatagaaaaatgagattcataggacacagggtaccatatagtcaccattctaaagtaccccttttgaaacatttcctaaaatccaagtcaaaattaatgtctataatattttaaatgtgctttttgtaaaaactgtgtgttagtttcatgatttttgccttttttacactatatgccatgattttcacctgacagtaatagccaataaaaagccagaaagtaatgcttca

SEQ ID NO: 422119 - DNA, 2867 bp, Homo sapiens
  misc_feature (319)..(319): n is a, c, g, or t
acagataggatcttgctgttgcctaggctggagtgcagtggcacaatcatagctcactgcagcttcgaactcctgggctcaagcaatcctcctgcctcagcctcctgagtagctgagactacaggcacgtgtcaccaagcccagctaagttttttattttttgtagagatgaggtctcactatcttgcccaggttggtctccaactcctggcctcactcaatcctcctgcctcagcctcccaaaacgctggagttacaggtgtgagccactgcacctggcctttgtattttagtataaaatgtgctttggatagaatcnttgctttttctagcttgtggcctttttttttttaagtatctgtataaggcagttggaaaacaagttcaagctggacactcttgagtccagtcctcatgttttcagcccactgttgcacccagttcgtgtgggtcaggcctgggcccatggaatgagtgtatctcccagtaaggaagtctgctatctgacaaaaacagcagaagctgagagctcaagggatacaaaatagattgcagttgagggttaggaaggaggctgcatctgtgtgcctatttcccctggcaagcctctacatcgaagagcagcagagcagccctgtcgtgccattgagctgacagtgccacatatgcaaagataaagccatagaggcaggacacttgaggggcacctctcagtctgccctgaaccatctgccatcttgaacagggagacaccatggctctggggcagttttcctccataagaactcacttggagatattgcccttctgtttaataccatcctctagccaaataattcaagaaggtggcattcagtcatatactgttttcagttctaaagaaaagttgaagtgatggtagtaaattgtggactaaagacagcttaatagcatactgatgtggcctgtcttctctttcaagctttgtcatttctaattaaggtttaaatggagaaactatcattttgtagttacctgagatttttcagttctaaagtaaaaacaaaaaaacaaacaaaaaccaacacgtttaaaaatccctccccaagtaaccagcagtcagtttgatcattatggaagagaattcagatggcaatgtatttgcaattgaggagagagtagccaatcacacttaatgaaacagaccgtttacacttggaatggcctggagtaagttgatattcagcgtctacactcaaatatcaatcttggatttggaaatttggcttgaccactgtaaagtctgggaagatgaaatgcctaaattctgggttccataacttttcatctgacagctggtggtgccgaaccccgtccccaattacctaggtcatctttaaggtcaatgtcagcattggtaggattgattatggcctccacctcaaagccggctaaattactgatttcactgtgaataaggttcagctgcaaagaaaagcatgaggtgggaaataacaggagagctgggaagtctcagagaaggagccttgggatacaggtaaaggacagtggacactccaagtgcacgaggcacaaaagggaagcagggagttgctggctcaaatgaacccatttcaaacataagactcaaatgctgctcgggatgcgggagcaagcaaactaggatgaatgttcagagcccgtgggtggcacctgggacaaaaggaagcacaagccacagtggacgaggagatcagctttcctttaaagggacttgtgatctgggggccaaagtaaggcagctatcaggacctagaatgagtactcattgctgagggttgggggctggtggatgtgactgtcctcatccttgagcactaggctggtgctaacatcctacctggcttgggcaaacccctaagggctctgccattgtcttccaagtgactatgggcctttaaggctgtccccatcactgtgactgctggctggcttccctgccctgctcagggtggcaagaagtgagaatagtctcttgcttagtaacatttaatttacgtgcccattagtcatgtaatgctgaagttccatggtgaaacccaggggaggaaggttctccagcaagacaatgtgtcttttaaatggttttcaccttgttggtcaggttgctctgagactcaatgggtggcttattgagcattttccttaagtgttatatccacccagtgaatttgttctttctgaagagccactgaatgggtgtcccccagccactgttattctgttacaatggcaaccctggcatctgagtattcgaagaatactgagttcgaaattctgtcagaggggcaaggggaattaatgggcctaggactgctgtcccaggtcctactattccccttgcttttctttaggtattgcaggaaagcttgctcttgcacatgctctcacaatgacattgctcactcttcagtaacataaattcctaacacctgcagacaagtgcaatgcctgagtagccctagcagagctggtgctcaagactatgacctaggccagaatagtggctgcagtctgcagggtttaccagggcatgaggctttgtccaggagctcacccaggagagggctgtgcacaagacacttggcagggaagctcctggcaacagagcaagttgctgcatttctagggccaaacattttgttgaaaacaaaaccaaacaacctggctctagacattaaaggacctgagatccgaactgggctcatcaagggcagcggcactgcagaggtggagctgaagatagcgcccactctcttaatcacgctggataacgcctacatggaaaagtgtgacgagacatcctgtggcatggactacaagataat

SEQ ID NO: 422120 - DNA, 2503 bp, Homo sapiens
ttttcctctttctttctttcaagagacggaaagagtcttctgtgtattttaggcaaatttaggttaaggtgtaagtgccctttgaagcaaaaagtgtccatgttttgctaacatatattttagctactctggcttggctgaggtcttcctagataatcaacatccctcaacagccttggcggtgagaaggcacgtgaaagctgccagcacatcccaggagccttggctgtggcggcttctccttggaaagctccacgcacccttctgccagggatcctgtcctgcagggatgacagacccagcagcctcggcagagggaatgaggctccagcagcttcatcagcaagtggccaggcccagccctaagtcacagactgtcagaaggggacaatggtaggagagagctgggctcagggtctggagcctgccacatgccacctgcacggctttggatacactccctccttcatctgtggaacggggaatggggataacaccctggcccaagggtcacacagaaccaaaaggaagctacagcctaaggaagaaaccctgctatgggactgtggctgctctggactgcgcaggctgccaggaaggaatggcggaggcagcctccgtgggccttgcacagagtgagagcaccacaattatgggccatgtgtgcgcagagagacacacccatgaccgatacgtaacaagcatgtgcccctacctgccgctgccgatggatggaaatgcaatggatttcagcttcttatcatcagccagggccaagcagtttttcactgtcttttccagaagttcttcacacttgtctgcaccccaaactggactattacagtggatcacaaacttggcaggcaggccatggcctgcgctgacagcagctagtggtgcggggatgaaacagaaacagtgagctctggttcactgcaaagcacaagatgccaaacacagacccactcccctgccacggtatatcttcctgggccctccaatgccctgtgtctgaggagttccacagctgtctgctgcgttgtgattccaacgtgagctggagccaagccacacccttggaaagttggcattatgatgtgtcaccaccaggaattttgaccaagttcgtagtaagcctctctccactctcagaaagcatacacggttctcccagaggcagagccttatccatcaaaactcaactgaacgcaaactcaacgtgtcagaacatttgcagcctcaaaataattgttttgggtttccaacccttcttcttcaagtcgactggtgtgctaattatcgacttgcacaccaatatgatatatttgtctctactatgatgtattctctaaatctcccaaacccaattcaggacaaagctactaggaaagcaactgctttaaatgatctgctaagcaacctgaccagcatctccactctgccattgtcttctccctgctgaggatggcctcactgtgtgaataacggatcctgtttatttgtggcagaattagattagtttttaaggaactgtgtttttcttttcctagaagaggggcccctttctagctatacatctccaccaaagacttgcctttcccttgccagatctaaggacacaggcctggggtctgccacaaactgcaaagtaccatgtctcccagagcatgttccagaacccctgtccacagatgctctgcaaagaaggtttccagggcactgggtttagctgcatgctacgcttctatacaagagcacaccagagtctccacaccactgctaaagtaaaacatccaaactttttgcatttggttggctatttctgaaactttttttttttttaaggaatatctgtccaaggggtatggtttgttatggtcgtgtcatagatactggagaaggagcgatttgtgggtagtgtctcatggtacagtggaaacagctcagtcacagggtgtgaatttgagtcctggctctgctttgtgactgggcttgagaactctgggctgacctataaaaacctgacattgggggttgaattaaaccagtgggtttgtccccatgagaagtcatggctaaactatgcatagaaaacgactggaaagaaacattaacagtgactatctttgcacagtggaacaggagtatgttttattcacctctttatactttcaaaaatattttaaagcagtttctaaaatagcccttaaaatcaagaacaaaagtgttattgaaacaagcaaaaatatcttgaaccatgctatacctaatgggtttgcatctgctgtggctgaggtttccccagcagagtttggtacatggcagcaccaggctgcctaccaggccttgtgccaagggctaccagcaggactcaagctggaaccccgatgggaaaggacccacaggctggtcaaacaggtgttttaaagggcctggggaaaggccagctgcccctggctaggtagttaaaactgtgtatgccttcccttgtacaatgtgggac

SEQ ID NO: 422121 - DNA, 3778 bp, Homo sapiens
  misc_feature (1544)..(1544): n is a, c, g, or t
ttttcctctttctttctttcaagagacggaaagagtcttctgtgtattttaggcaaatttaggttaaggtgtaagtgccctttgaagcaaaaagtgtccatgttttgctaacatatattttagctactctggcttggctgaggtcttcctagataatcaacatccctcaacagccttggcggtgagaaggcacgtgaaagctgccagcacatcccaggagccttggctgtggcggcttctccttggaaagctccacgcacccttctgccagggatcctgtcctgcagggatgacagacccagcagcctcggcagagggaatgaggctccagcagcttcatcagcaagtggccaggcccagccctaagtcacagactgtcagaaggggacaatggtaggagagagctgggctcagggtctggagcctgccacatgccacctgcacggctttggatacactccctccttcatctgtggaacggggaatggggataacaccctggcccaagggtcacacagaaccaaaaggaagctacagcctaaggaagaaaccctgctatgggactgtggctgctctggactgcgcaggctgccaggaaggaatggcggagatgcttctggtgttatattcagaaatgtttcattggaaaagaagctattttggcgggctctgcttcagctagccaggaagaccccctcagtggcctgtatctgactctcttcgcgggagaaccacctgctctgtctaggggaatgggattctctgggggaaacttggatttgctgaaggaagggagcagttgcgaacagaactcaagctcatggagaattctcagcttcctttggactcactaccttcccttctgaccagaggcatccccactcttggaagtgcagactacagtacctcagggagccactactactcagcattgaggatttcctgccaaccaagtgctgtttcactcttcacatctgtggatgaggctagagctgtgattttccaactatgctctgctatgcactggggctcagcagaagtcctcagggtatgcagctgagccacaaaagtttttttgctgtaaaatgtgtacaaatatgtatttttaaacaatcttgactagaaagtgtgtgcttgggatgtgtgcatcaggggaagagaatgggaaggggagaagacaaattaattcaagtactttggaaggacaaatgggtaatcagcttggcaggtgggccagtgggcagaagctgacagtgagatgatcatgaacgaagacagtagctccactatacagaagaaagcccatgagcatagcgtgcaaatggaccaggtacacatgtgtctggacaggctcccactgtccagtcacaaatgaataagcgagatagagccaagacagaggtccagtcctaggaggccccagggtcccctcccaccagccagggtcagatccagtggggtttatcagccagaggggtgtgtgtccatctgaagtacatggcagagaagtggtccttgtgggttaggaaatcagatttctgggnactgtaaaaattcccaaaattagtctgattttctgggaggaataaggatcattaatggtttcagaatttgaataaggtgactgcttctttgtaccgtcgttaggaaagatggaaaactaagttttaaaccacagcatgaggaatttaaagcagctatgaagactgttagccactgaggaaagtaatcatagggcactgccagttatagagcagaagggggtccccgcgtggctgcacagttggcagaaagggtcgtagccaagggaccttcaagatcccttccagcactgggatccgataatcctaacctcactggctctgctgggccagcttctgatacaagcagtacccgagtcttccctgtggtgaggatgtccgtggaaacccttgttctttactcatggtatatgctcatcagagtataatctctttgaaggcaggagtgggtgtggccccctaaccctgagtgctgcacagtgcctaagccagtgctggggttcccctgggcatgtagagttagaactgaacatcaaacatccttagatataactcataaaatgactgcccctgcttgctttcctttaaggcattgttaatggaaatgccagagctcagaaattgagccctgggcctggcttgtatctgaggtggctcagagccaagctgtcctcgcctggatgggaggctggcccccaccatttagggcagggcaggaggcggtctgtcgatgatgacagggaaggagtgtctggatggacatgcagactgcctgacctgacctacttggctacaggaaatagtacattccttcttggttcttttaaaaaaatatgattagaaacccaattttagttaatgaaagtggctgttaaagatagtgcctgagtagtatgttaaatctagcctgtaactgtcagattttggtgtctctcattttctcataacagataaggaaggaagcctggctgaccacctaaaatgcagttattttcctgtccccaaagttcacttcaacgaggggaatgggaagggcaatgtcttccataggaccctttccagtctcctcctgagagctgtgtcttccctggggcacactccagggctggctcctgccctcacagctgtgctgtgtggctctccctgcatgcatgcatgcccaagctggatttctccagaggccttgggccgggcagaatctagtgtgtccagctagaaagagccccacaaagataaggacatggatagatactgctggatgtccagatggtcgatagctgagccattccttcatggctttgtcagtttcctaaactgtctcagaagccagtcctcagccatagtggggggaaggggtgaatggtttttctcctcactgatgcttcaacttcaagagctccctttctcctcacagttcttccagctcccgggagaagggtatgtggatcaaagggagaaaacccatggtacgttatgcccgccttgaatggcttgcgagctggggttgccatcttgatcatttgggaggtaaggagactcatcacagcctcagactgccttcctaactccttcaaataatactgactctgacaaggaaacttaaatcatttaccatttaccattaagtcagtgttaccactgacacattagacacattagaaatgttttttctgaaaattttaaaacctctgaaaaaaggctgcaaatcttggctgaacacaaagcaaaagcatttagttgactcagattcacagcactgatttcttttttaaaacaattcaacaatgtgtgtgaacattgggcaaaatcagagagtaatggctatgatgactcctgagacttcagtatgtgaaatacatcattaacatcaatggtcaggctcctaagcctgggccatgcttcctgagtagcttagcaaccatgccttacagggctgtagcatgcacaatatcacctttctccaccccagcttgcttgcaatcttcaagcactggtttcagtgtcacagatagaaaaatgagattcataggacacagggtaccatatagtcaccattctaaagtaccccttttgaaacatttcctaaaatccaagtcaaaattaatgtctataatattttaaatgtgctttttgtaaaaactgtgtgttagtttcatgatttttgccttttttacactatatgccatgattttcacctgacagtaatagccaataaaaagccagaaagtaatgcttca

SEQ ID NO: 422122 - DNA, 2841 bp, Homo sapiens
gtcgcctactgtcacggtgttaacctccctctctgtctctctgagtgcgttctctcgcccgtcacccctcttcctttctcggtctcctcctctcccttcgtccgagccgctccttagcgcccagttgcgcaaatcaaattctttcccgttctatttactcctgatcaagaggggctgtcagtccaaccctccagctgtaggctcgtgcatctgccagtctcttggcgcgtggggaccgcgtggaagtgccctcgcgtgtgcgtgccagctgagatgagacgtggaagctggaggggtccggcatcccagagaggcgtgaggctcccaaaccaccacctgctcaggtccaccctaataacatcagccaaggcctctacagcagcccccaagctgcctctggatagttcagacaaggcctctgtgctgtgatggaaccaggtgacccgcagcctccgggccagctactctggcttggctgaggtcttcctagataatcaacatccctcaacagccttggcggtgagaaggcacgtgaaagctgccagcacatcccaggagccttggctgtggcggcttctccttggaaagctccacgcacccttctgccagggatcctgtcctgcagggatgacagacccagcagcctcggcagagggaatgaggctccagcagcttcatcagcaagtggccaggcccagccctaagtcacagactgtcagaaggggacaatggtaggagagagctgggctcagggtctggagcctgccacatgccacctgcacggctttggatacactccctccttcatctgtggaacggggaatggggataacaccctggcccaagggtcacacagaaccaaaaggaagctacagcctaaggaagaaaccctgctatgggactgtggctgctctggactgcgcaggctgccaggaaggaatggcggaggcagcctccgtgggccttgcacagagtgagagcaccacaattatgggccatgtgtgcgcagagagacacacccatgaccgatacgtaacaagcatgtgcccctacctgccgctgccgatggatggaaatgcaatggatttcagcttcttatcatcagccagggccaagcagtttttcactgtcttttccagaagttcttcacacttgtctgcaccccaaactggactattacagtggatcacaaacttggcaggcaggccatggcctgcgctgacagcagctagtggtgcggggatgaaacagaaacagtgagctctggttcactgcaaagcacaagatgccaaacacagacccactcccctgccacggtatatcttcctgggccctccaatgccctgtgtctgaggagttccacagctgtctgctgcgttgtgattccaacgtgagctggagccaagccacacccttggaaagttggcattatgatgtgtcaccaccaggaattttgaccaagttcgtagtaagcctctctccactctcagaaagcatacacggttctcccagaggcagagccttatccatcaaaactcaactgaacgcaaactcaacgtgtcagaacatttgcagcctcaaaataattgttttgggtttccaacccttcttcttcaagtcgactggtgtgctaattatcgacttgcacaccaatatgatatatttgtctctactatgatgtattctctaaatctcccaaacccaattcaggacaaagctactaggaaagcaactgctttaaatgatctgctaagcaacctgaccagcatctccactctgccattgtcttctccctgctgaggatggcctcactgtgtgaataacggatcctgtttatttgtggcagaattagattagtttttaaggaactgtgtttttcttttcctagaagaggggcccctttctagctatacatctccaccaaagacttgcctttcccttgccagatctaaggacacaggcctggggtctgccacaaactgcaaagtaccatgtctcccagagcatgttccagaacccctgtccacagatgctctgcaaagaaggtttccagggcactgggtttagctgcatgctacgcttctatacaagagcacaccagagtctccacaccactgctaaagtaaaacatccaaactttttgcatttggttggctatttctgaaactttttttttttttaaggaatatctgtccaaggggtatggtttgttatggtcgtgtcatagatactggagaaggagcgatttgtgggtagtgtctcatggtacagtggaaacagctcagtcacagggtgtgaatttgagtcctggctctgctttgtgactgggcttgagaactctgggctgacctataaaaacctgacattgggggttgaattaaaccagtgggtttgtccccatgagaagtcatggctaaactatgcatagaaaacgactggaaagaaacattaacagtgactatctttgcacagtggaacaggagtatgttttattcacctctttatactttcaaaaatattttaaagcagtttctaaaatagcccttaaaatcaagaacaaaagtgttattgaaacaagcaaaaatatcttgaaccatgctatacctaatgggtttgcatctgctgtggctgaggtttccccagcagagtttggtacatggcagcaccaggctgcctaccaggccttgtgccaagggctaccagcaggactcaagctggaaccccgatgggaaaggacccacaggctggtcaaacaggtgttttaaagggcctggggaaaggccagctgcccctggctaggtagttaaaactgtgtatgccttcccttgtacaatgtgggac

SEQ ID NO: 422123 - DNA, 6561 bp, Homo sapiens
  misc_feature (319)..(319): n is a, c, g, or t
  misc_feature (4327)..(4327): n is a, c, g, or t
acagataggatcttgctgttgcctaggctggagtgcagtggcacaatcatagctcactgcagcttcgaactcctgggctcaagcaatcctcctgcctcagcctcctgagtagctgagactacaggcacgtgtcaccaagcccagctaagttttttattttttgtagagatgaggtctcactatcttgcccaggttggtctccaactcctggcctcactcaatcctcctgcctcagcctcccaaaacgctggagttacaggtgtgagccactgcacctggcctttgtattttagtataaaatgtgctttggatagaatcnttgctttttctagcttgtggcctttttttttttaagtatctgtataaggcagttggaaaacaagttcaagctggacactcttgagtccagtcctcatgttttcagcccactgttgcacccagttcgtgtgggtcaggcctgggcccatggaatgagtgtatctcccagtaaggaagtctgctatctgacaaaaacagcagaagctgagagctcaagggatacaaaatagattgcagttgagggttaggaaggaggctgcatctgtgtgcctatttcccctggcaagcctctacatcgaagagcagcagagcagccctgtcgtgccattgagctgacagtgccacatatgcaaagataaagccatagaggcaggacacttgaggggcacctctcagtctgccctgaaccatctgccatcttgaacagggagacaccatggctctggggcagttttcctccataagaactcacttggagatattgcccttctgtttaataccatcctctagccaaataattcaagaaggtggcattcagtcatatactgttttcagttctaaagaaaagttgaagtgatggtagtaaattgtggactaaagacagcttaatagcatactgatgtggcctgtcttctctttcaagctttgtcatttctaattaaggtttaaatggagaaactatcattttgtagttacctgagatttttcagttctaaagtaaaaacaaaaaaacaaacaaaaaccaacacgtttaaaaatccctccccaagtaaccagcagtcagtttgatcattatggaagagaattcagatggcaatgtatttgcaattgaggagagagtagccaatcacacttaatgaaacagaccgtttacacttggaatggcctggagtaagttgatattcagcgtctacactcaaatatcaatcttggatttggaaatttggcttgaccactgtaaagtctgggaagatgaaatgcctaaattctgggttccataacttttcatctgacagctggtggtgccgaaccccgtccccaattacctaggtcatctttaaggtcaatgtcagcattggtaggattgattatggcctccacctcaaagccggctaaattactgatttcactgtgaataaggttcagctgcaaagaaaagcatgaggtgggaaataacaggagagctgggaagtctcagagaaggagccttgggatacaggtaaaggacagtggacactccaagtgcacgaggcacaaaagggaagcagggagttgctggctcaaatgaacccatttcaaacataagactcaaatgctgctcgggatgcgggagcaagcaaactaggatgaatgttcagagcccgtgggtggcacctgggacaaaaggaagcacaagccacagtggacgaggagatcagctttcctttaaagggacttgtgatctgggggccaaagtaaggcagctatcaggacctagaatgagtactcattgctgagggttgggggctggtggatgtgactgtcctcatccttgagcactaggctggtgctaacatcctacctggcttgggcaaacccctaagggctctgccattgtcttccaagtgactatgggcctttaaggctgtccccatcactgtgactgctggctggcttccctgccctgctcagggtggcaagaagtgagaatagtctcttgcttagtaacatttaatttacgtgcccattagtcatgtaatgctgaagttccatggtgaaacccaggggaggaaggttctccagcaagacaatgtgtcttttaaatggttttcaccttgttggtcaggttgctctgagactcaatgggtggcttattgagcattttccttaagtgttatatccacccagtgaatttgttctttctgaagagccactgaatgggtgtcccccagccactgttattctgttacaatggcaaccctggcatctgagtattcgaagaatactgagttcgaaattctgtcagaggggcaaggggaattaatgggcctaggactgctgtcccaggtcctactattccccttgcttttctttaggtattgcaggaaagcttgctcttgcacatgctctcacaatgacattgctcactcttcagtaacataaattcctaacacctgcagacaagtgcaatgcctgagtagccctagcagagctggtgctcaagactatgacctaggccagaatagtggctgcagtctgcagggtttaccagggcatgaggctttgtccaggagctcacccaggagagggctgtgcacaagacacttggcagggaagctcctggcaacagagcaagttgctgcatttctagggccaaacattttgttgaaaacaaaaccaaacaacctggcactccagaagtatcggaaatataaacccacatttttgattcccagaaacagtcagattctcaaagagggatgtgcttacactaagagtcatcctctgggaggaaacagttgtggaattaagttttgtcaaacagccaaggaagaattctgggttattgctcctcgcactatagagtgatttagaggccacccacacccttgaagctgaaggaagccatgggggtgatctcacaaagcgaagctctcagcagctcagagccctggcaccaggacagaggcacagaaaagagacagcatgggggctggggcctgactgctgccactggggagtaggggtgtgggtgggcacagagtcgggggccttagggtaaggcaagtgaactctcaggatttagaacaaggcaaaggattttactctattatttagttctgcatttggctccaagcaaatgctatttacaaaaactcaaattaagccaatactccccaccacacaccaccaaaacacaccccacacagtgtgaagaggcaggaggttggtgaggaaggcaggcaaaggagaaaaagactcgatctactcagtgtaatgtggatgtgtatgcttttaaggcacctataaattcctatgtttaaaacaatacatgttcaatccttaaaattcacgcaattttttccaattgtatagatgcttctggtgttatattcagaaatgtttcattggaaaagaagctattttggcgggctctgcttcagctagccaggaagaccccctcagtggcctgtatctgactctcttcgcgggagaaccacctgctctgtctaggggaatgggattctctgggggaaacttggatttgctgaaggaagggagcagttgcgaacagaactcaagctcatggagaattctcagcttcctttggactcactaccttcccttctgaccagaggcatccccactcttggaagtgcagactacagtacctcagggagccactactactcagcattgaggatttcctgccaaccaagtgctgtttcactcttcacatctgtggatgaggctagagctgtgattttccaactatgctctgctatgcactggggctcagcagaagtcctcagggtatgcagctgagccacaaaagtttttttgctgtaaaatgtgtacaaatatgtatttttaaacaatcttgactagaaagtgtgtgcttgggatgtgtgcatcaggggaagagaatgggaaggggagaagacaaattaattcaagtactttggaaggacaaatgggtaatcagcttggcaggtgggccagtgggcagaagctgacagtgagatgatcatgaacgaagacagtagctccactatacagaagaaagcccatgagcatagcgtgcaaatggaccaggtacacatgtgtctggacaggctcccactgtccagtcacaaatgaataagcgagatagagccaagacagaggtccagtcctaggaggccccagggtcccctcccaccagccagggtcagatccagtggggtttatcagccagaggggtgtgtgtccatctgaagtacatggcagagaagtggtccttgtgggttaggaaatcagatttctgggnactgtaaaaattcccaaaattagtctgattttctgggaggaataaggatcattaatggtttcagaatttgaataaggtgactgcttctttgtaccgtcgttaggaaagatggaaaactaagttttaaaccacagcatgaggaatttaaagcagctatgaagactgttagccactgaggaaagtaatcatagggcactgccagttatagagcagaagggggtccccgcgtggctgcacagttggcagaaagggtcgtagccaagggaccttcaagatcccttccagcactgggatccgataatcctaacctcactggctctgctgggccagcttctgatacaagcagtacccgagtcttccctgtggtgaggatgtccgtggaaacccttgttctttactcatggtatatgctcatcagagtataatctctttgaaggcaggagtgggtgtggccccctaaccctgagtgctgcacagtgcctaagccagtgctggggttcccctgggcatgtagagttagaactgaacatcaaacatccttagatataactcataaaatgactgcccctgcttgctttcctttaaggcattgttaatggaaatgccagagctcagaaattgagccctgggcctggcttgtatctgaggtggctcagagccaagctgtcctcgcctggatgggaggctggcccccaccatttagggcagggcaggaggcggtctgtcgatgatgacagggaaggagtgtctggatggacatgcagactgcctgacctgacctacttggctacaggaaatagtacattccttcttggttcttttaaaaaaatatgattagaaacccaattttagttaatgaaagtggctgttaaagatagtgcctgagtagtatgttaaatctagcctgtaactgtcagattttggtgtctctcattttctcataacagataaggaaggaagcctggctgaccacctaaaatgcagttattttcctgtccccaaagttcacttcaacgaggggaatgggaagggcaatgtcttccataggaccctttccagtctcctcctgagagctgtgtcttccctggggcacactccagggctggctcctgccctcacagctgtgctgtgtggctctccctgcatgcatgcatgcccaagctggatttctccagaggccttgggccgggcagaatctagtgtgtccagctagaaagagccccacaaagataaggacatggatagatactgctggatgtccagatggtcgatagctgagccattccttcatggctttgtcagtttcctaaactgtctcagaagccagtcctcagccatagtggggggaaggggtgaatggtttttctcctcactgatgcttcaacttcaagagctccctttctcctcacagttcttccagctcccgggagaagggtatgtggatcaaagggagaaaacccatggtacgttatgcccgccttgaatggcttgcgagctggggttgccatcttgatcatttgggaggtaaggagactcatcacagcctcagactgccttcctaactccttcaaataatactgactctgacaaggaaacttaaatcatttaccatttaccattaagtcagtgttaccactgacacattagacacattagaaatgttttttctgaaaattttaaaacctctgaaaaaaggctgcaaatcttggctgaacacaaagcaaaagcatttagttgactcagattcacagcactgatttcttttttaaaacaattcaacaatgtgtgtgaacattgggcaaaatcagagagtaatggctatgatgactcctgagacttcagtatgtgaaatacatcattaacatcaatggtcaggctcctaagcctgggccatgcttcctgagtagcttagcaaccatgccttacagggctgtagcatgcacaatatcacctttctccaccccagcttgcttgcaatcttcaagcactggtttcagtgtcacagatagaaaaatgagattcataggacacagggtaccatatagtcaccattctaaagtaccccttttgaaacatttcctaaaatccaagtcaaaattaatgtctataatattttaaatgtgctttttgtaaaaactgtgtgttagtttcatgatttttgccttttttacactatatgccatgattttcacctgacagtaatagccaataaaaagccagaaagtaatgcttca

SEQ ID NO: 422124 - DNA, 402 bp, Homo sapiens
cgacgtgggcctgcgagagggtccctgcaattatagttgtcccaattagaaggggacaatcactcaagaagccctctagctacttaaagcaatcttgcacagccatcacttatacctaacaatcctttgtcatacttaataaacctctggtatattttcctttattatgcttgttaaaaacacagtataaatgggagaaatcattaaagatcattaactccaaggctgctggatgttaggacccttaagcatacttaaaagattgattgtaatcaagaataacttgtatcagattgccttccagtgattcacatttattagttcaaccagttacatacctgtagcaagagaccagtttatttggcaataaaattggggaaggaatcaagacttaaatgagga

SEQ ID NO: 422125 - DNA, 1869 bp, Homo sapiens
gaaaggggaaaaatgactcagaacaagacaaaagctctgactgtttaaagttatcgcttacagagactttaacaattttgtggaatttttacaactatgagagtaaatggaactggtcaactcttgacagttgcctcaagatggagtgaaattgcatcgagggtaagactgtgtccacaggtttaaaattctctcttctgagtaatagtgttcatgtgctcccattctcgaccctgttgttgaaattcaaacttaaatagcctgacttcttgttgggtaacttgccctgcctccagaggtatttgaacttcattatcttcagcacaggaattgttaatcttctcacttcacctgttcttgcattagctcaattgatgtcatcactgatttcctaaactagaaactatggaagcatctttgacttttccttttctctgttggattagcttaatcaccaagtcctgtcaacttctgaaatgaatctcaaatttcttcccttctctatctgttgcccctgattttgccttaagttcttgcctgagtgatctcccagcctgtcttctgtctccttttggttcagtctttatactgcctcttgagtaatctttctgaaatttaaacttgatatttttcgccctcttgcttgaaaacttcacttgcttccccatttcctactctttaaggaatgatttctttagcctcagatagaaggacctttatgatctggccatattctgaaatagcttcaatcctctcctcatctctgttccagtatacatctttccttcttattctgcaaacattagaccacttgatattctttaaatatgtcatgtacttttcttgtgtctgttctttgggataattcctatccttttcagggaggcaaattgcacgtgagtttaagtatgaaggcaatgtatacctgctgattgtaaaatatttaaacattgtacatatctgtgtggttttaaaagtctgcttttaattatgtaaaattcatcttccctttccacagataacttctgttaacaacttgatatctattgtacaagatgtgttactggcatttccatgtatatatgtatataaatgcaggaaaccaacatgtcattgacacctctcttctttacttttccccatatctaatcattcctcaagtcttactgatttttatcagctagaatctatctccttatttctacctctattgccactctgatccaggctaccagcatttccctcttaggcttctgaagcaacttcctaactcccacttgtgctcctcacactcactctggtcggctatccattcattctccatacagcaactagagtcattcttttaaaattgcggacctgatccttccatctcccagctgaacgcttttcatttgcttcctgttctcatgagtatgccaaaatgtattctgggctaggaggccctgaggaatttggtccttccctcctcccccctcgttttctgtgcttcgccctcactgggcttgcctttcttttccttaaatacatcatgttctctcctattttagatccttttccccgaaggtatggaaacattatttctgtaagcttattcttctatatagatgggaagtttttaaatcagataaggttctaagggcatgtggacaatttacgttatcatagtattgttcataacgtccatcattattctgtagactgtaagggcttacttagctcgtgtaagaattatccttcaaaaagcatttttaaggtattagtattgctaatctataaactttgtgcaagaagtcctaaagtcaatagcaacatttatttaaagtacagtttgtcatacttaataaacctctggtatattttccttta

SEQ ID NO: 422126 - DNA, 2107 bp, Homo sapiens
gaaaggggaaaaatgactcagaacaagacaaaagctctgactgtttaaagttatcgcttacagagactttaacaattttgtggaatttttacaactatgagagtaaatggaactggtcaactcttgacagttgcctcaagatggagtgaaattgcatcgagggtaagactgtgtccacaggtttaaaattctctcttctgagtaatagtgttcatgtgctcccattctcgaccctgttgttgaaattcaaacttaaatagcctgacttcttgttgggtaacttgccctgcctccagaggtatttgaacttcattatcttcagcacaggaattgttaatcttctcacttcacctgttcttgcattagctcaattgatgtcatcactgatttcctaaactagaaactatggaagcatctttgacttttccttttctctgttggattagcttaatcaccaagtcctgtcaacttctgaaatgaatctcaaatttcttcccttctctatctgttgcccctgattttgccttaagttcttgcctgagtgatctcccagcctgtcttctgtctccttttggttcagtctttatactgcctcttgagtaatctttctgaaatttaaacttgatatttttcgccctcttgcttgaaaacttcacttgcttccccatttcctactctttaaggaatgatttctttagcctcagatagaaggacctttatgatctggccatattctgaaatagcttcaatcctctcctcatctctgttccagtatacatctttccttcttattctgcaaacattagaccacttgatattctttaaatatgtcatgtacttttcttgtgtctgttctttgggataattcctatccttttcagggaggcaaattgcacgtgagtttaagtatgaaggcaatgtatacctgctgattgtaaaatatttaaacattgtacatatctgtgtggttttaaaagtctgcttttaattatgtaaaattcatcttccctttccacagataacttctgttaacaacttgatatctattgtacaagatgtgttactggcatttccatgtatatatgtatataaatgcaggaaaccaacatgtcattgacacctctcttctttacttttccccatatctaatcattcctcaagtcttactgatttttatcagctagaatctatctccttatttctacctctattgccactctgatccaggctaccagcatttccctcttaggcttctgaagcaacttcctaactcccacttgtgctcctcacactcactctggtcggctatccattcattctccatacagcaactagagtcattcttttaaaattgcggacctgatccttccatctcccagctgaacgcttttcatttgcttcctgttctcatgagtatgccaaaatgtattctgggctaggaggccctgaggaatttggtccttccctcctcccccctcgttttctgtgcttcgccctcactgggcttgcctttcttttccttaaatacatcatgttctctcctattttagatccttttccccgaaggtatggaaacattatttctgtaagcttattcttctatatagatgggaagtttttaaatcagataaggttctaagggcatgtggacaatttacgttatcatagtattgttcataacgtccatcattattctgtagactgtaagggcttacttagctcgtgtaagaattatccttcaaaaagcatttttaaggtattagtattgctaatctataaactttgtgcaagaagtcctaaagtcaatagcaacatttatttaaagtacagtttgtcatacttaataaacctctggtatattttcctttattatgcttgttaaaaacacagtataaatgggagaaatcattaaagatcattaactccaaggctgctggatgttaggacccttaagcatacttaaaagattgattgtaatcaagaataacttgtatcagattgccttccagtgattcacatttattagttcaaccagttacatacctgtagcaagagaccagtttatttggcaataaaattggggaaggaatcaagacttaaatgagga

SEQ ID NO: 422127 - DNA, 1023 bp, Homo sapiens
tacgcgcagcttccggttccgcctgttccggcgcacgtaatcgccgagggcacgtgcatgccccctggttaagagttgcaggtagcggtagcgatggacactctggatcgagtagtaaagcccaaaacgaaaagagccaagagattccttgagaagagagaaccgaaactcaatgaaaatattaaaaatgccatgctgattaaagggggaaatgcaaatgcaacagtgacaaaagtacttaaagatgtgtatgcactgaaaaaaccatacggtgtactatataaaaagaaaaatattacaagaccttttgaggatcagacatcactggaattcttttcaaagaagtcagattgttctttattcatgtttggctcccataataagaagcggccaaataatctagtaataggtcgtatgtatgactaccatgtgctggatatgattgaattaggtattgagaattttgtctctctaaaagacattaagaacagtaaatgtcctgagggaacaaaacccatgctgatatttgctggcgatgatttcgatgtaacagaagattatagaagactaaaaagtcttcttattgatttcttcagaggccccacagtatcaaatatccgcctggctggattagagtatgttctgcacttcactgcactgaatgggaagatttactttcgaagctataagttgctgttgaagaaatctggttgcagaacaccacggattgaattggaagagatgggaccctcattggatctggttctgaggaggacacacctggcatcggatgacctttataaattatctatgaaaatgccaaaagctctcaagccaaagaagaagaaaaatatttcccatgatacttttggtacaacttatggaaggattcatatgcagaagcaagacctaagcaaactacaaaccaggaaaatgaaggggttgaagaagcgacctgcagaaaggataacagaagaccacgagaaaaagtcaaaaagaattaaaaaaaattgatggaactta

SEQ ID NO: 422128 - DNA, 394 bp, Homo sapiens
actcttgaggatccccctcgggttggaactgaatgggatgatttactttcgaagctataagttgctgttgaagaaatctggttgcagaacaccacggattgaattggaagagatgggaccctcattggatctggttctgaggaggacacacctggcatcggatgacctttataaattatctatgaaaatgccaaaagctctcaagccaaagaagaagaaaaatatttcccatgatacttttggtacaacttatggaaggattcatatgcagaagcaagacctaagcaaactacaaaccaggaaaatgaaggggttgaagaagcgacctgcagaaaggataacagaagaccacgagaaaaagtcaaaaagaattaaaaaaaattgatggaactta

SEQ ID NO: 422129 - DNA, 1533 bp, Homo sapiens
tacgcgcagcttccggttccgcctgttccggcgcacgtaatcgccgagggcacgtgcatgccccctggttaagagttgcaggtagcggtagcgatggacactctggatcgagtagtaaagcccaaaacgaaaagagccaagagattccttgagaagagagaaccgaaactcaatgaaaatattaaaaatgccatgctgattaaagggggaaatgcaaatgcaacagtgacaaaagtacttaaagatgtgtatgcactgaaaaaaccatacggtgtactatataaaaagaaaaatattacaagaccttttgaggatcagacatcactggaattcttttcaaagaagtcagattgttctttattcatgtttggctcccataataagaagcggccaaataatctagtaataggtcgtatgtatgactaccatgtgctggatatgattgaattaggtattgagaattttgtctctctaaaagacattaagaacagtaaatgtcctgagggaacaaaacccatgctgatatttgctggcgatgatttcgatgtaacagaagattatagaagactaaaaagtcttcttattgatttcttcagaggccccacagtatcaaatatccgcctggctggattagagtatgttctgcacttcactgcactgaatgggaagatttactttcgaagctataagttgctgttgaagaaatctggttgcagaacaccacggattgaattggaagagatgggaccctcattggatctggttctgaggaggacacacctggcatcggatgacctttataaattatctatgaaaatgccaaaagctctcaagccaaagaagaagaaaaatatttcccatgatacttttggtacaacttatggaaggattcatatgcagaagcaagacctaagcaaactacaaaccaggaaaatgaaggggttgaagaagcgacctgcagaaaggataacagaagaccacgagaaaaagtcaaaaagaattaaaaaaaattgatggaacttagccagccactactgtttcattgtgttctacttaagagaattatcaagcgtcaatccattcagagtttcttataagatcttattatatatttttataacatgataattttacgatatattattatgaacagtaatatactagtattaagtgtaaagtaagccttttatttgagacattacaccctggtgtgccattttctcttgtgatatcccctgccctccacaaattcttctttctcattgggtggatggatgggtgaggagggatctccataaccattgggatttttttgaatttctggccttagctaaagaaagccacagaaagccggacccgcaggagctgtgtaaacaatctcagtatgaattacctggaaagttaacctcctctcccaacatggatctacattctgatttttattttctacttttcttttattttgcctgaaatcctactcgttgacatttgagattttaagctttgtggctgaaaatatatagatctctgaga

SEQ ID NO: 422130 - DNA, 1102 bp, Homo sapiens
agctctcaagtgggagccgtgggatgggagggatgtgggattgaagcgttggccgcttttatcctagccagttgaaaaacgtctgacttccgaagtatgagacagatggtatagtggggttaggagcacagccctcggaatccgacagatctgagtgacagtctggcgcgtccacttaaagctttgtgactttggaaagcccaaaacgaaaagagccaagagattccttgagaagagagaaccgaaactcaatgaaaatattaaaaatgccatgctgattaaagggggaaatgcaaatgcaacagtgacaaaagtacttaaagatgtgtatgcactgaaaaaaccatacggtgtactatataaaaagaaaaatattacaagaccttttgaggatcagacatcactggaattcttttcaaagaagtcagattgttctttattcatgtttggctcccataataagaagcggccaaataatctagtaataggtcgtatgtatgactaccatgtgctggatatgattgaattaggtattgagaattttgtctctctaaaagacattaagaacagtaaatgtcctgagggaacaaaacccatgctgatatttgctggcgatgatttcgatgtaacagaagattatagaagactaaaaagtcttcttattgatttcttcagaggccccacagtatcaaatatccgcctggctggattagagtatgttctgcacttcactgcactgaatgggaagatttactttcgaagctataagttgctgttgaagaaatctggttgcagaacaccacggattgaattggaagagatgggaccctcattggatctggttctgaggaggacacacctggcatcggatgacctttataaattatctatgaaaatgccaaaagctctcaagccaaagaagaagaaaaatatttcccatgatacttttggtacaacttatggaaggattcatatgcagaagcaagacctaagcaaactacaaaccaggaaaatgaaggggttgaagaagcgacctgcagaaaggataacagaagaccacgagaaaaagtcaaaaagaattaaaaaaaattgatggaactta

SEQ ID NO: 422131 - DNA, 1145 bp, Homo sapiens
tacgcgcagcttccggttccgcctgttccggcgcacgtaatcgccgagggcacgtgcatgccccctggttaagagttgcaggtagcggtagcgatggacactctggatcgagtagtaaagcccaaaacgaaaagagccaagagattccttgagaagagagaaccgaaactcaatgaaaatattaaaaatgccatgctgattaaagggggaaatgcaaatgcaacagtgacaaaagtacttaaagatgtgtatgcactgaaaaaaccatacggtgtactatataaaaagaaaaatattacaagaccttttgaggatcagacatcactgtagagatacggtcttaccttgttggccaggctggtctcaaactcctgatctcaagtaatcaactcgcctcggcgtcccaagtgctgggattacaggtgtgagccaccgtgcctggcctgaaggaattcttttcaaagaagtcagattgttctttattcatgtttggctcccataataagaagcggccaaataatctagtaataggtcgtatgtatgactaccatgtgctggatatgattgaattaggtattgagaattttgtctctctaaaagacattaagaacagtaaatgtcctgagggaacaaaacccatgctgatatttgctggcgatgatttcgatgtaacagaagattatagaagactaaaaagtcttcttattgatttcttcagaggccccacagtatcaaatatccgcctggctggattagagtatgttctgcacttcactgcactgaatgggaagatttactttcgaagctataagttgctgttgaagaaatctggttgcagaacaccacggattgaattggaagagatgggaccctcattggatctggttctgaggaggacacacctggcatcggatgacctttataaattatctatgaaaatgccaaaagctctcaagccaaagaagaagaaaaatatttcccatgatacttttggtacaacttatggaaggattcatatgcagaagcaagacctaagcaaactacaaaccaggaaaatgaaggggttgaagaagcgacctgcagaaaggataacagaagaccacgagaaaaagtcaaaaagaattaaaaaaaattgatggaactta

SEQ ID NO: 422132 - DNA, 1063 bp, Homo sapiens
tacgcgcagcttccggttccgcctgttccggcgcacgtaatcgccgagggcacgtgcatgccccctggttaagagttgcaggtagcggtagcgatggacactctggatcgagtagtaaagcccaaaacgaaaagagccaagagattccttgagaagagagaaccgaaactcaatgaaaatattaaaaatgccatgctgattaaagggggaaatgcaaatgcaacagtgacaaaagtacttaaagatgtgaatgtgttttgttttgaaagctataaattttgttttacagtatgcactgaaaaaaccatacggtgtactatataaaaagaaaaatattacaagaccttttgaggatcagacatcactggaattcttttcaaagaagtcagattgttctttattcatgtttggctcccataataagaagcggccaaataatctagtaataggtcgtatgtatgactaccatgtgctggatatgattgaattaggtattgagaattttgtctctctaaaagacattaagaacagtaaatgtcctgagggaacaaaacccatgctgatatttgctggcgatgatttcgatgtaacagaagattatagaagactaaaaagtcttcttattgatttcttcagaggccccacagtatcaaatatccgcctggctggattagagtatgttctgcacttcactgcactgaatgggaagatttactttcgaagctataagttgctgttgaagaaatctggttgcagaacaccacggattgaattggaagagatgggaccctcattggatctggttctgaggaggacacacctggcatcggatgacctttataaattatctatgaaaatgccaaaagctctcaagccaaagaagaagaaaaatatttcccatgatacttttggtacaacttatggaaggattcatatgcagaagcaagacctaagcaaactacaaaccaggaaaatgaaggggttgaagaagcgacctgcagaaaggataacagaagaccacgagaaaaagtcaaaaagaattaaaaaaaattgatggaactta

SEQ ID NO: 422133 - DNA, 623 bp, Homo sapiens
gttctagaggtccctgatgtcgttcttatggcttatggtccttcttgataggtagtgagaatttggtctctctaaaagacattaagaacagtaaatgtcctgagggaacaaaacccatgctgatatttgctggcgatgatttcgatgtaacagaagattatagaagactaaaaagtcttcttattgatttcttcagaggccccacagtatcaaatatccgcctggctggattagagtatgttctgcacttcactgcactgaatgggaagatttactttcgaagctataagttgctgttgaagaaatctggttgcagaacaccacggattgaattggaagagatgggaccctcattggatctggttctgaggaggacacacctggcatcggatgacctttataaattatctatgaaaatgccaaaagctctcaagccaaagaagaagaaaaatatttcccatgatacttttggtacaacttatggaaggattcatatgcagaagcaagacctaagcaaactacaaaccaggaaaatgaaggggttgaagaagcgacctgcagaaaggataacagaagaccacgagaaaaagtcaaaaagaattaaaaaaaattgatggaactta

SEQ ID NO: 422134 - DNA, 1722 bp, Homo sapiens
gattgaaatgtgtagaggggagtagataggtggtagaagtagaggtaagagtgcaggtagcggtagcgatggacactctgtatcgagtaaagcccaaaacgaaaagagccaagagattccttgagaagagagaaccgaaactcaatgaaaatattaaaaatgccatgctgattaaagggggaaatgcaaatgcaacagtgacaaaagtacttaaagatgtgtatgcactgaaaaaaccatacggtgtactatataaaaagaaaaatattacaagaccttttgaggatcagacatcactggaattcttttcaaagaagtcagattgttctttattcatgtttggctcccataataagaagcggccaaataatctagtaataggtcgtatgtatgactaccatgtgctggatatgattgaattagatttcttcagaggccccacagtatcaaatatccgcctggctggattagagtatgttctgcacttcactgcactgaatgggaagatttactttcgaagctataagttgctgttgaagaaatctggttgcagaacaccacggattgaattggaagagatgggaccctcattggatctggttctgaggaggacacacctggcatcggatgacctttataaattatctatgaaaatgccaaaagctctcaagccaaagaagaagaaaaatatttcccatgatacttttggtacaacttatggaaggattcatatgcagaagcaagacctaagcaaactacaaaccaggaaaatgaaggggttgaagaagcgacctgcagaaaggataacagaagaccacgagaaaaagtcaaaaagaattaaaaaaaattgatggaacttagccagccactactgtttcattgtgttctacttaagagaattatcaagcgtcaatccattcagagtttcttataagatcttattatatatttttataacatgataattttacgatatattattatgaacagtaatatactagtattaagtgtaaagtaagccttttatttgagacattacaccctggtgtgccattttctcttgtgatatcccctgccctccacaaattcttctttctcattgggtggatggatgggtgaggagggatctccataaccattgggatttttttgaatttctggccttagctaaagaaagccacagaaagccggacccgcaggagctgtgtaaacaatctcagtatgaattacctggaaagttaacctcctctcccaacatggatctacattctgatttttattttctacttttcttttattttgcctgaaatcctactcgttgacatttgagattttaagctttgtggctgaaaatatatagatctctgagagggatgtctgctatctgattattgataaattacactactgttgattgttttaagagactctactactaagtagagcccaccccgcttctctgagacgaaacctgtgttttttggttggtttgtttttaagagatggggtcttgttctgtcacctagggtggagtgcagtggcacaatcacagctcactgcagccctgaactcctgggctcaagtaatcctcctgcctgagcctcttacgtagctgggattacaggcatgagccactgagccctactttttttttttaaagcaatgaggtcttgctgtgttgcccaggctggactcaaattcctgggctcaagtgatcctccc

SEQ ID NO: 422135 - DNA, 1256 bp, Homo sapiens
actcttgaggatccccctcgggttggaactgaatgggatgatttactttcgaagctataagttgctgttgaagaaatctggttgcagaacaccacggattgaattggaagagatgggaccctcattggatctggttctgaggaggacacacctggcatcggatgacctttataaattatctatgaaaatgccaaaagctctcaagccaaagaagaagaaaaatatttcccatgatacttttggtacaacttatggaaggattcatatgcagaagcaagacctaagcaaactacaaaccaggaaaatgaaggggttgaagaagcgacctgcagaaaggataacagaagaccacgagaaaaagtcaaaaagaattaaaaaaaattgatggaacttagccagccactactgtttcattgtgttctacttaagagaattatcaagcgtcaatccattcagagtttcttataagatcttattatatatttttataacatgataattttacgatatattattatgaacagtaatatactagtattaagtgtaaagtaagccttttatttgagacattacaccctggtgtgccattttctcttgtgatatcccctgccctccacaaattcttctttctcattgggtggatggatgggtgaggagggatctccataaccattgggatttttttgaatttctggccttagctaaagaaagccacagaaagccggacccgcaggagctgtgtaaacaatctcagtatgaattacctggaaagttaacctcctctcccaacatggatctacattctgatttttattttctacttttcttttattttgcctgaaatcctactcgttgacatttgagattttaagctttgtggctgaaaatatatagatctctgagagggatgtctgctatctgattattgataaattacactactgttgattgttttaagagactctactactaagtagagcccaccccgcttctctgagacgaaacctgtgttttttggttggtttgtttttaagagatggggtcttgttctgtcacctagggtggagtgcagtggcacaatcacagctcactgcagccctgaactcctgggctcaagtaatcctcctgcctgagcctcttacgtagctgggattacaggcatgagccactgagccctactttttttttttaaagcaatgaggtcttgctgtgttgcccaggctggactcaaattcctgggctcaagtgatcctccc

SEQ ID NO: 422136 - DNA, 393 bp, Homo sapiens
ttttagtagagacagggtttcaccacgttggccaggttggtctcggactcctcacctcaagtgatctacccacctcagcctcccaaagtgctgggattacaggtgtgagccaccacgcccggccaaatattgtttcacataacttttatttgtctttgtatgatgtgtatactgggtgacaacttcaaatttttttttttttattactatgcattgtggtcaggatggtttgaaaaccaaaagttgttgttgatgatgctgtgctttttgttcccttctgtacacctaaatagaccctatagtcctagggtcagactggcgtggttgaagcatggaagacttgttagatctggaacgtcctttcagcttctgtatcagacagacagatgttag

SEQ ID NO: 422137 - DNA, 1885 bp, Homo sapiens
tacgcgcagcttccggttccgcctgttccggcgcacgtaatcgccgagggcacgtgcatgccccctggttaagagttgcaggtagcggtagcgatggacactctggatcgagtagtaaagcccaaaacgaaaagagccaagagattccttgagaagagagaaccgaaactcaatgaaaatattaaaaatgccatgctgattaaagggggaaatgcaaatgcaacagtgacaaaagtacttaaagatgtgtatgcactgaaaaaaccatacggtgtactatataaaaagaaaaatattacaagaccttttgaggatcagacatcactggaattcttttcaaagaagtcagattgttctttattcatgtttggctcccataataagaagcggccaaataatctagtaataggtcgtatgtatgactaccatgtgctggatatgattgaattaggtattgagaattttgtctctctaaaagacattaagaacagtaaatgtcctgagggaacaaaacccatgctgatatttgctggcgatgatttcgatgtaacagaagattatagaagactaaaaagtcttcttattgatttcttcagaggccccacagtatcaaatatccgcctggctggattagagtatgttctgcacttcactgcactgaatgggaagatttactttcgaagctataagttgctgttgaagaaatctggttgcagaacaccacggattgaattggaagagatgggaccctcattggatctggttctgaggaggacacacctggcatcggatgacctttataaattatctatgaaaatgccaaaagctctcaagccaaagaagaagaaaaatatttcccatgatacttttggtacaacttatggaaggattcatatgcagaagcaagacctaagcaaactacaaaccaggaaaatgaaggggttgaagaagcgacctgcagaaaggataacagaagaccacgagaaaaagtcaaaaagaattaaaaaaaattgatggaacttagccagccactactgtttcattgtgttctacttaagagaattatcaagcgtcaatccattcagagtttcttataagatcttattatatatttttataacatgataattttacgatatattattatgaacagtaatatactagtattaagtgtaaagtaagccttttatttgagacattacaccctggtgtgccattttctcttgtgatatcccctgccctccacaaattcttctttctcattgggtggatggatgggtgaggagggatctccataaccattgggatttttttgaatttctggccttagctaaagaaagccacagaaagccggacccgcaggagctgtgtaaacaatctcagtatgaattacctggaaagttaacctcctctcccaacatggatctacattctgatttttattttctacttttcttttattttgcctgaaatcctactcgttgacatttgagattttaagctttgtggctgaaaatatatagatctctgagagggatgtctgctatctgattattgataaattacactactgttgattgttttaagagactctactactaagtagagcccaccccgcttctctgagacgaaacctgtgttttttggttggtttgtttttaagagatggggtcttgttctgtcacctagggtggagtgcagtggcacaatcacagctcactgcagccctgaactcctgggctcaagtaatcctcctgcctgagcctcttacgtagctgggattacaggcatgagccactgagccctactttttttttttaaagcaatgaggtcttgctgtgttgcccaggctggactcaaattcctgggctcaagtgatcctccc

SEQ ID NO: 422138 - DNA, 1305 bp, Homo sapiens
tcttgtttcctgccacttcggctctacacagtgtgcattctggaatgacagggtcttatgttctgcacttcactgcactgaatgggaagatttactttcgaagctataagttgctgttgaagaaatctggttgcagaacaccacggattgaattggaagagatgggaccctcattggatctggttctgaggaggacacacctggcatcggatgacctttataaattatctatgaaaatgccaaaagctctcaagccaaagaagaagaaaaatatttcccatgatacttttggtacaacttatggaaggattcatatgcagaagcaagacctaagcaaactacaaaccaggaaaatgaaggggttgaagaagcgacctgcagaaaggataacagaagaccacgagaaaaagtcaaaaagaattaaaaaaaattgatggaacttagccagccactactgtttcattgtgttctacttaagagaattatcaagcgtcaatccattcagagtttcttataagatcttattatatatttttataacatgataattttacgatatattattatgaacagtaatatactagtattaagtgtaaagtaagccttttatttgagacattacaccctggtgtgccattttctcttgtgatatcccctgccctccacaaattcttctttctcattgggtggatggatgggtgaggagggatctccataaccattgggatttttttgaatttctggccttagctaaagaaagccacagaaagccggacccgcaggagctgtgtaaacaatctcagtatgaattacctggaaagttaacctcctctcccaacatggatctacattctgatttttattttctacttttcttttattttgcctgaaatcctactcgttgacatttgagattttaagctttgtggctgaaaatatatagatctctgagagggatgtctgctatctgattattgataaattacactactgttgattgttttaagagactctactactaagtagagcccaccccgcttctctgagacgaaacctgtgttttttggttggtttgtttttaagagatggggtcttgttctgtcacctagggtggagtgcagtggcacaatcacagctcactgcagccctgaactcctgggctcaagtaatcctcctgcctgagcctcttacgtagctgggattacaggcatgagccactgagccctactttttttttttaaagcaatgaggtcttgctgtgttgcccaggctggactcaaattcctgggctcaagtgatcctccc

SEQ ID NO: 422139 - DNA, 1733 bp, Homo sapiens
gcggatgttgtcctccctgcgaggatcaaagtaggcaagatggcgtcgagcggcggggagctagggagtttatttgatcaccacgtccagagggcggtatgcgacacacgggccaaatatcgagagggacgacggcctcgtgctgtgaaggtatatacaatcaatttggaatctcagtacttattaatacaaggagttcctgctgtgggagtcatgaaggaattagttgagcgattcgctttatatggtgcaattgaacagtacaatgctctagatgaatacccagcagaagactttactgaagtttatcttattaaatttatgaacttacaaagtgcaaggacagccaagagaaaaatggatgaacagagtttcttcggtggattgcttcatgtgtgctatgctccagaatttgaaacagttgaagaaactagaaaaaaactacaaatgcggaaggcatatgtagtaaaaactactgaaaataaagaccattacgtgacaaagaagaaattggttacagagcataaagacacagaggattttagacaagacttccactcagagatgtctggattttgtaaagctgctttgaacacttctgcagggaactcaaatccttatcttccgtattcctgtgaattgcctttatgttatttctcctcaaaatgtatgtgttcatccgggggacctgtagacagagcaccagactcctctaaggatggtagaaaccatcataaaacaatggggcattataaccacaatgactctttgcggaaaacacagataaactctttgaaaaactcagtggcctgccctggtgcacaaaaggctattacgtcttcagaggcagttgacagatttatgcctaggacaacacaactgcaggagcgcaaaagaagaagagaagatgatcgtaaacttggaacttttcttcaaacaaacccaactggtaatgagattatgattggacctctgttaccagacatctctaaagtggatatgcacgatgactcattgaatacaacggcgaatttaattcggcataaacttaaagaggtaatttcatctgtgccaaagcctccagaggacaagccagaagatgtacatacaagtcatccattaaaacaaagaagaagaatatagagtgccagcagcaacttagtattttctaaaaagaacatttattatttatttttagcctgtcattttaattcttcaagagattttactgctggtattttttaatgcactcctctttgtaatttcattcaagccatttgtctaaagtcatttctttgttttttgggagatggagtcttgctctgttgcccaggctggaatgcagtggcgtgatctcggctcactgcaacctccacctcccgggttcaagcgattctcctgcctcagcctcctgagtatctgggattacaggcgtgcaccaccatgcctggctaagttttgtgttttttttagtagagatgggttttcaccatattggtcaggctggtctcgaactcctgaccttgtgatacacctgcctcagcctcccaaagggatgagccaccgcgcctggcccatttcttctttttttgacccatacttaatgttgcagaaactattcttgtcataacattatctctcatgtacagtaattatatgtaaattaattgaagcaaatatggaaactttacaatagaaataaagataggcagccagcgtctgtttccaattat

SEQ ID NO: 422140 - DNA, 412 bp, Homo sapiens
tcatatatgtacattttttacctaaaaatatctgattaaaggtattatttaataataattaaaatccgtgggcacagttttgaagccttctttagcttttcagtttaggctgggcccagtgcctcacaccaataacttcagcactttgggaggctgaggtgagcagattgcttgagcccaggctggtctcgaactcctgaccttgtgatacacctgcctcagcctcccaaagggatgagccaccgcgcctggcccatttcttctttttttgacccatacttaatgttgcagaaactattcttgtcataacattatctctcatgtacagtaattatatgtaaattaattgaagcaaatatggaaactttacaatagaaataaagataggcagccagcgtctgtttccaattat

SEQ ID NO: 422141 - DNA, 607 bp, Homo sapiens
tcatatatgtacattttttacctaaaaatatctgattaaaggtattatttaataataattaaaatccgtgggcacagttttgaagccttctttagcttttcagtttaggctgggcccagtgcctcacaccaataacttcagcactttgggaggctgaggtgagcagattgcttgagcccaggagtctgagaccagcctgaccaatgtgatgaaaccccatctttaccataaatatacaaaaattagccaggcgtggtggtgaactcttgtagctacttgggaagcttaggtggaagggtacttgagtctgggaggcggaggttgcagtgagccaagatcatgccactgcactccagcctgggtgacagtgtgagaccctgtctcaaaaaaaaaggttttcagtttgtgctgccacccttacttccttccttcagttacagctgaactgaggcatagacatagatacatacctgtctcaaccagagctgattacattttcaagataaacgtgtgaagtccaaattctaggtccagaaatagaacaacaaaaaaaagatattaaatacagtttactatagtttctaataattttccatttcaaatgaag

SEQ ID NO: 422142 - DNA, 638 bp, Homo sapiens
ctttcatcccaagtaaatctagattaaaaaactatgctatcttgtatttccattcaggacagccaagagaaaaatggatgaacagagtttcttcggtggattgcttcatgtgtgctatgctccagaatttgaaacagttgaagaaactagaaaaaaactacaaatgcggaaggcatatgtagtaaaaactactgaaaataaaggtatggaaagcatattgctaaatgcctcctgtgtgtcaggcactctgccaggtgtgtcatcatgcaattcccagtctagtggtaggagaggcaagtaaaccatcacagtattcagtaactgtgaaccacagggttctctgcagcacactacataatctgggttgagaagggagaaatattggttcatagaagacttcctatagtatgtgagaagtggctgaattttaaaggataagtagacgttaactaaatgggagaggaaaagatggaaaggcaagccaggcaagatgtttaaatgtttagaggaataaatgagcatcatgcatttaaggaactttaattaatacagtataaccaaagcccaaaggtttcagtgagagataagtttagaaaagctttgaccagaatgcagtgagaagcagttatgatttgcag

SEQ ID NO: 422143 - DNA, 1714 bp, Homo sapiens
gcggatgttgtcctccctgcgaggatcaaagtaggcaagatggcgtcgagcggcggggagctagggagtttatttgatcaccacgtccagagggcggtatgcgacacacgggccaaatatcgagagggacgacggcctcgtgctgtgaaggtatatacaatcaatttggaatctcagtacttattaatacaaggagttcctgctgtgggagtcatgaaggaattagttgagcgattcgctttatatggtgcaattgaacagtacaatgctctagatgaatacccagcagaagactttactgaagtttatcttattaaatttatgaacttacaaagtgcaaggacagccaagagaaaaatggatgaacagagtttcttcggtggattgcttcatgtgtgctatgctccagaatttgaaacagttgaagaaactagaaaaaaactacaaatgcggaaggcatatgtagtaaaaactactgaaaataaagaccattacgtgacaaagaagaaattggttacagagcataaagacacagaggattttagacaagacttccactcagagatgtctggattttgtaaagctgctttgaacacttctgcagggaactcaaatccttatcttccgtattcctgtgaattgcctttatgttatttctcctcaaaatgtatgtgttcatccgggggacctgtagacagagcaccagactcctctaaggatggtagaaaccatcataaaacaatggggcattataaccacaatgactctttgcggaaaacacagataaactctttgaaaaactcagtggcctgccctggtgcacaaaaggctattacgtcttcagaggcagttgacagatttatgcctaggacaacacaactgcaggagcgcaaaagaagaagagaagatgatcgtaaacttggaacttttcttcaaacaaacccaactggtaatgagattatgattggacctctgttaccagacatctctaaagtggatatgcacgatgactcattgaatacaacggcgaatttaattcggcataaacttaaagaggtaaggttatttttaaaaaactattctaagacacgatttggttataggattaaatggagaattatttgtgggaacaatagtactgtaattttttttcactttttagtgttttgatgtgtttttctacagttctctgttgaaataactgaatttggctaacattttatttgctttaaactgttaatacttgctttaaacaatgaacagacattttatatcactgtagatacaaaatattaaagcagtggtttcagccaattaaatcaatctgtgagagtggagcccaggcctgccatttttgttaaaagctccccaggtagttctaatatgagccaaagttgagaagcaaaagtattgtaaattatttctctcaaatttagagttattacagtttatatcaaattcaaaatgcttaatttgcttttgtgataaagagcaatagaaggtggtgagatttctaaaaattaggcctccaggtatgcatttcaaatgtagacttcttaaatgatcgggatcagattgtgctgcctaggtagtctgtttttttttttaatgtcatttacataatcattttccatttcctaagcacaaatgaagttaacatctgagttagcttttgaaagacacctttttgtggggtagggactactgttacaaa

SEQ ID NO: 422144 - DNA, 1679 bp, Homo sapiens
gcggatgttgtcctccctgcgaggatcaaagtaggcaagatggcgtcgagcggcggggagctagggagtttatttgatcaccacgtccagagggcggtatgcgacacacgggccaaatatcgagagggacgacggcctcgtgctgtgaaggtatatacaatcaatttggaatctcagtacttattaatacaaggagttcctgctgtgggagtcatgaaggaattagttgagcgattcgctttatatggtgcaattgaacagtacaatgctctagatgaatacccagcagaagactttactgaagtttatcttattaaatttatgaacttacaaagtgcaaggacagccaagagaaaaatggatgaacagagtttcttcggtggattgcttcatgtgtgctatgctccagaatttgaaacagttgaagaaactagaaaaaaactacaaatgcggaaggcatatgtagtaaaaactactgaaaataaagaccattacgtgacaaagaagaaattggttacagagcataaagacacagaggattttagacaagacttccactcagagatgtctggattttgtaaagctgctttgaacacttctgcagggaactcaaatccttatcttccgtattcctgtgaattgcctttatgttatttctcctcagatggtagaaaccatcataaaacaatggggcattataaccacaatgactctttgcggaaaacacagataaactctttgaaaaactcagtggcctgccctggtgcacaaaaggctattacgtcttcagaggcagttgacagatttatgcctaggacaacacaactgcaggagcgcaaaagaagaagagaagatgatcgtaaacttggaacttttcttcaaacaaacccaactggtaatgagattatgattggacctctgttaccagacatctctaaagtggatatgcacgatgactcattgaatacaacggcgaatttaattcggcataaacttaaagaggtaatttcatctgtgccaaagcctccagaggacaagccagaagatgtacatacaagtcatccattaaaacaaagaagaagaatatagagtgccagcagcaacttagtattttctaaaaagaacatttattatttatttttagcctgtcattttaattcttcaagagattttactgctggtattttttaatgcactcctctttgtaatttcattcaagccatttgtctaaagtcatttctttgttttttgggagatggagtcttgctctgttgcccaggctggaatgcagtggcgtgatctcggctcactgcaacctccacctcccgggttcaagcgattctcctgcctcagcctcctgagtatctgggattacaggcgtgcaccaccatgcctggctaagttttgtgttttttttagtagagatgggttttcaccatattggtcaggctggtctcgaactcctgaccttgtgatacacctgcctcagcctcccaaagggatgagccaccgcgcctggcccatttcttctttttttgacccatacttaatgttgcagaaactattcttgtcataacattatctctcatgtacagtaattatatgtaaattaattgaagcaaatatggaaactttacaatagaaataaagataggcagccagcgtctgtttccaattat

SEQ ID NO: 422145 - DNA, 1425 bp, Homo sapiens
ttttatccgttttaggttttaaaccatgtgaatatatacccttctcaagaaatgatttttttggagtagaatttgttaacatttttaagtgatttttttaaattatatgattctgaatgatgaaaacaataaaccacttctgtttccctttccctcaacttttaaattgtaatataaagaccattacgtgacaaagaagaaattggttacagagcataaagacacagaggattttagacaagacttccactcagagatgtctggattttgtaaagctgctttgaacacttctgcagggaactcaaatccttatcttccgtattcctgtgaattgcctttatgttatttctcctcaaaatgtatgtgttcatccgggggacctgtagacagagcaccagactcctctaaggatggtagaaaccatcataaaacaatggggcattataaccacaatgactctttgcggaaaacacagataaactctttgaaaaactcagtggcctgccctggtgcacaaaaggctattacgtcttcagaggcagttgacagatttatgcctaggacaacacaactgcaggagcgcaaaagaagaagagaagatgatcgtaaacttggaacttttcttcaaacaaacccaactggtaatgagattatgattggacctctgttaccagacatctctaaagtggatatgcacgatgactcattgaatacaacggcgaatttaattcggcataaacttaaagaggtaatttcatctgtgccaaagcctccagaggacaagccagaagatgtacatacaagtcatccattaaaacaaagaagaagaatatagagtgccagcagcaacttagtattttctaaaaagaacatttattatttatttttagcctgtcattttaattcttcaagagattttactgctggtattttttaatgcactcctctttgtaatttcattcaagccatttgtctaaagtcatttctttgttttttgggagatggagtcttgctctgttgcccaggctggaatgcagtggcgtgatctcggctcactgcaacctccacctcccgggttcaagcgattctcctgcctcagcctcctgagtatctgggattacaggcgtgcaccaccatgcctggctaagttttgtgttttttttagtagagatgggttttcaccatattggtcaggctggtctcgaactcctgaccttgtgatacacctgcctcagcctcccaaagggatgagccaccgcgcctggcccatttcttctttttttgacccatacttaatgttgcagaaactattcttgtcataacattatctctcatgtacagtaattatatgtaaattaattgaagcaaatatggaaactttacaatagaaataaagataggcagccagcgtctgtttccaattat

SEQ ID NO: 422146 - DNA, 2182 bp, Homo sapiens
gcggatgttgtcctccctgcgaggatcaaagtaggcaagatggcgtcgagcggcggggagctagggagtttatttgatcaccacgtccagagggcggtatgcgacacacgggccaaatatcgagagggacgacggcctcgtgctgtgaaggtatatacaatcaatttggaatctcagtacttattaatacaaggagttcctgctgtgggagtcatgaaggaattagttgagcgattcgctttatatggtgcaattgaacagtacaatgctctagatgaatacccagcagaagactttactgaagtttatcttattaaatttatgaacttacaaagtgcaaggacagccaagagaaaaatggatgaacagagtttcttcggtggattgcttcatgtgtgctatgctccagaatttgaaacagttgaagaaactagaaaaaaactacaaatgcggaaggcatatgtagtaaaaactactgaaaataaagaccattacgtgacaaagaagaaattggttacagagcataaagacacagaggattttagacaagacttccactcagagatgtctggattttgtaaagctgctttgaacacttctgcagggaactcaaatccttatcttccgtattcctgtgaattgcctttatgttatttctcctcaaaatgtatgtgttcatccgggggacctgtagacagagcaccagactcctctaaggatggtagaaaccatcataaaacaatggggcattataaccacaatgactctttgcggaaaacacagataaactctttgaaaaactcagtggcctgccctggtgcacaaaaggctattacgtcttcagaggcagttgacagatttatgcctaggacaacacaactgcaggagcgcaaaagaagaagagaagatgatcgtaaacttggaacttttcttcaaacaaacccaactggtaatgagattatgattggacctctgttaccagacatctctaaagtggatatgcacgatgactcattgaatacaacggcgaatttaattcggcataaacttaaagaggtaatttcatctgtgccaaagcctccagaggacaagccagaagatgtacatacaagtcatccattaaaacaaagaagaagaatatagagtgccagcagcaacttagtattttctaaaaagaacatttattatttatttttagcctgtcattttaattcttcaagagattttactgctggtattttttaatgcactcctctttgtaatttcattcaagccatttgtctaaagtcatttctttgttttttgggagatggagtcttgctctgttgcccaggctggaatgcagtggcgtgatctcggctcactgcaacctccacctcccgggttcaagcgattctcctgcctcagcctcctgagtatctgggattacaggcgtgcaccaccatgcctggctaagttttgtgttttttttagtagagatgggttttcaccatattggtcaggctggtctcgaactcctgaccttgtgatacacctgcctcagcctcccaaagggatgagccaccgcgcctggcccatttcttctttttttgacccatacttaatgttgcagaaactattcttgtcataacattatctctcatgtacagtaattatatgtaaattaattgaagcaaatatggaaactttacaatagaaataaagataggcagccagcgtctgtttccaattataatacaagtattgaatgaaccattgaaacactagaagtcaggatgtttccgaatgccagggtttcaaaatcaagacaattctatgaagtaaaaagtagattagctattagaacaaagctgaaattagaaccttatatgctttaaataacttttaagaatttgcttgacctgtggcaatccaaaaatacatcagtatttataaattctagacttctgttactacttctggcatatccacacttttttctgtcagtggattacataattggaaatttcagtacatctagactgtctctattttctttttctttttttatttttagtagagacagggtctcactgtgttgcccaggcaggtattgaactcctgggctcaagtgattcacccacctcggcctcccaaagtactaggattatgggtgtgacccactgtgcctggccattttctt

SEQ ID NO: 422147 - DNA, 1992 bp, Homo sapiens
gcggatgttgtcctccctgcgaggatcaaagtaggcaagatggcgtcgagcggcggggagctagggagtttatttgatcaccacgtccagagggcggtatgcgacacacgggccaaatatcgagagggacgacggcctcgtgctgtgaaggtaaagtgattttggtttcattcgctctcctcggtagctttatgtgagtgctagcgccatatgaccagcctacggaaataaaggcacgacaaggcttccgtcagatctgtctctcgttagagctggcgtgaagaaccctcggtcagttaccaaagattctcacgacgcctttggtcaagtattagaacatcaactccacgagaataggccttggttttagtcattggatcttctgtgtttacagtactacttggcacaggtatatacaatcaatttggaatctcagtacttattaatacaaggagttcctgctgtgggagtcatgaaggaattagttgagcgattcgctttatatggtgcaattgaacagtacaatgctctagatgaatacccagcagaagactttactgaagtttatcttattaaatttatgaacttacaaagtgcaaggacagccaagagaaaaatggatgaacagagtttcttcggtggattgcttcatgtgtgctatgctccagaatttgaaacagttgaagaaactagaaaaaaactacaaatgcggaaggcatatgtagtaaaaactactgaaaataaagaccattacgtgacaaagaagaaattggttacagagcataaagacacagaggattttagacaagacttccactcagagatgtctggattttgtaaagctgctttgaacacttctgcagggaactcaaatccttatcttccgtattcctgtgaattgcctttatgttatttctcctcaaaatgtatgtgttcatccgggggacctgtagacagagcaccagactcctctaaggatggtagaaaccatcataaaacaatggggcattataaccacaatgactctttgcggaaaacacagataaactctttgaaaaactcagtggcctgccctggtgcacaaaaggctattacgtcttcagaggcagttgacagatttatgcctaggacaacacaactgcaggagcgcaaaagaagaagagaagatgatcgtaaacttggaacttttcttcaaacaaacccaactggtaatgagattatgattggacctctgttaccagacatctctaaagtggatatgcacgatgactcattgaatacaacggcgaatttaattcggcataaacttaaagaggtaatttcatctgtgccaaagcctccagaggacaagccagaagatgtacatacaagtcatccattaaaacaaagaagaagaatatagagtgccagcagcaacttagtattttctaaaaagaacatttattatttatttttagcctgtcattttaattcttcaagagattttactgctggtattttttaatgcactcctctttgtaatttcattcaagccatttgtctaaagtcatttctttgttttttgggagatggagtcttgctctgttgcccaggctggaatgcagtggcgtgatctcggctcactgcaacctccacctcccgggttcaagcgattctcctgcctcagcctcctgagtatctgggattacaggcgtgcaccaccatgcctggctaagttttgtgttttttttagtagagatgggttttcaccatattggtcaggctggtctcgaactcctgaccttgtgatacacctgcctcagcctcccaaagggatgagccaccgcgcctggcccatttcttctttttttgacccatacttaatgttgcagaaactattcttgtcataacattatctctcatgtacagtaattatatgtaaattaattgaagcaaatatggaaactttacaatagaaataaagataggcagccagcgtctgtttccaattat

SEQ ID NO: 422148 - DNA, 2643 bp, Homo sapiens
tgaccctgggaaatgcttctatccctgagaggaggctcagcacagaaggaggaaggacagcagggccaacagtcacagcagccctgaccagagcattcctggagctcaagctcctctacaaagaggtggacagagaagacagcagagaccatgggacccccctcagcccctccctgcagattgcatgtcccctggaaggaggtcctgctcacagcctcacttctaaccttctggaacccacccaccactgccaagctcactattgaatccacgccgttcaatgtcgcagaggggaaggaggtgcttctacttgtccacaacctgccccagaatctttttggttacagctggtacaaaggcgaaagagtggatggcaacagtctaattgtaggatatgtaataggaactcaacaagctaccccagggcccgcatacagtggtcgagagacaatataccccaatgcatccctgctgatccagaacgtcacccagaatgacacaggattctataccctacaagtcataaagtcagatcttgtgaatgaagaagcaaccggacagttccatgtatacccggagctgcccaagccctccatctccagcaacaactccaaccccgtggaggacaaggatgctgtggccttcacctgtgaacctgagattcagaacacaacctacctgtggtgggtaaataatcagagcctcccggtcagtcccaggctgcagctgtccaatggcaacaggaccctcactctactcagtgtcacaaggaatgatgcaggaacctatgaatgtgaaatccagaacccagtgagtgccagccgcagtgacccagtcatcctgaatgtcctctatggcccagatggccccaccatttccccctcaaaggccaattaccgtccaggggaaaatctgaacctctcctgccacgcagcctctaacccacctgcacagtactcttggtttatcaatgggacgttccagcaatccacacaagagctctttatccccaacatcactgtgaataatagcggatcctatatgtgccaagcccataactcagccactggcctcaataggaccacagtcacgatgatcacagtctctggaagtgctcctgtcctctcagctgtggccaccgtcggcatcacgattggagtgctggccagggtggctctgatatagcagccctggtgtattttcgatatttcaggaagactggcagattggaccagaccctgaattcttctagctcctccaatcccattttatcccatggaaccactaaaaacaaggtctgctctgctcctgaagccctatatgctggagatggacaactcaatgaaaatttaaagggaaaaccctcaggcctgaggtgtgtgccactcagagacttcacctaactagagacaggcaaactgcaaaccatggtgagaaattgacgacttcacactatggacagcttttcccaagatgtcaaaacaagactcctcatcatgataaggctcttacccccttttaatttgtccttgcttatgcctgcctctttcgcttggcaggatgatgctgtcattagtatttcacaagaagtagcttcagagggtaacttaacagagtatcagatctatcttgtcaatcccaacgttttacataaaataagagatcctttagtgcacccagtgactgacattagcagcatctttaacacagccgtgtgttcaaatgtacagtggtccttttcagagttggacttctagactcacctgttctcactccctgttttaattcaacccagccatgcaatgccaaataatagaattgctccctaccagctgaacagggaggagtctgtgcagtttctgacacttgttgttgaacatggctaaatacaatgggtatcgctgagactaagttgtagaaattaacaaatgtgctgcttggttaaaatggctacactcatctgactcattctttattctattttagttggtttgtatcttgcctaaggtgcgtagtccaactcttggtattaccctcctaatagtcatactagtagtcatactccctggtgtagtgtattctctaaaagctttaaatgtctgcatgcagccagccatcaaatagtgaatggtctctctttggctggaattacaaaactcagagaaatgtgtcatcaggagaacatcataacccatgaaggataaaagccccaaatggtggtaactgataatagcactaatgctttaagatttggtcacactctcacctaggtgagcgcattgagccagtggtgctaaatgctacatactccaactgaaatgttaaggaagaagatagatccaattaaaaaaaattaaaaccaatttaaaaaaaaaaagaacacaggagattccagtctacttgagttagcataatacagaagtcccctctactttaacttttacaaaaaagtaacctgaactaatctgatgttaaccaatgtatttatttctgtggttctgtttccttgttccaatttgacaaaacccactgttcttgtattgtattgcccagggggagctatcactgtacttgtagagtggtgctgctttaattcataaatcacaaataaaagccaattagctctataactaaaaaaaaaaa

SEQ ID NO: 422149 - DNA, 530 bp, Homo sapiens
accacccaaacccttcatcaccagcaacaactccaaccccgtggaggatgaggatgctgtagccttaacctgtgaacctgagattcagaacacaacctacctgtggtgggtaaataatcagagcctcccggtcagtcccaggctgcagctgtccaatgacaacaggaccctcactctactcagtgtcacaaggaatgatgtaggaccctatgagtgtggaatccagaacaaattaagtgttgaccacagcgacccagtcatcctgaatgtcctctatggcccagacgaccccaccatttccccctcatacacctattaccgtccaggggtgaacctcagcctctcctgccatgcagcctctaacccacctgcacagtattcttggctgattgatgggaacatccagcaatacacacaagagctctttatctccaacatcactgagaagaacagcggactctatacctgccaggccaataactcagccagtggccacagcaggactacagtcaagacaatcacagtctctg

SEQ ID NO: 422150 - DNA, 267 bp, Homo sapiens
  misc_feature (206)..(206): n is a, c, g, or t
accacccaaacccttcatcaccagcaacaactccaaccccgtggaggatgaggatgctgtagccttaacctgtgaacctgagattcagaacacaacctcagctcgtggaggcatctacacccacccacagcagcactggctcgctacacacaacactgacccctgccagctccacaagcgctggccttcaggaagaatctaccacnttccagagctgccaagctcaagtgacacaacacctcacctcccgcaccacacagccccttg

SEQ ID NO: 422151 - DNA, 354 bp, Homo sapiens
acagcagccttgacaaaacgttcctggaactcaagctcttctccacagaggaggacagagcagacagcagagaccatggagtctccctcggcccctccccacagatggtgcatcccctggcagaggctcctgctcacagcctcacttctaaccttctggaacccacccaccactgccaagctcactattgaatccacgccgttcaatgtcgcagaggggaaggaggtgcttctacttgtccacaacctgccccagaatctttttggttacagctggttagaagtgaggctgtgagcaggacctccttccaggggacatgcaatctgcagggaggggctgaggggggtcccatgg

SEQ ID NO: 422152 - DNA, 1535 bp, Homo sapiens
tgaccctgggaaatgcttctatccctgagaggaggctcagcacagaaggaggaaggacagcagggccaacagtcacagcagccctgaccagagcattcctggagctcaagctcctctacaaagaggtggacagagaagacagcagagaccatgggacccccctcagcccctccctgcagattgcatgtcccctggaaggaggtcctgctcacagcctcacttctaaccttctggaacccacccaccactgccaagctcactattgaatccacgccgttcaatgtcgcagaggggaaggaggtgcttctacttgtccacaacctgccccagaatctttttggttacagctggtacaaaggcgaaagagtggatggcaacagtctaattgtaggatatgtaataggaactcaacaagctaccccagggcccgcatacagtggtcgagagacaatataccccaatgcatccctgctgatccagaacgtcacccagaatgacacaggattctataccctacaagtcataaagtcagatcttgtgaatgaagaagcaaccggacagttccatgtatacccggagctgcccaagccctccatctccagcaacaactccaaccccgtggaggacaaggatgctgtggccttcacctgtgaacctgagattcagaacacaacctacctgtggtgggtaaataatcagagcctcccggtcagtcccaggctgcagctgtccaatggcaacaggaccctcactctactcagtgtcacaaggaatgatgcaggaacctatgaatgtgaaatccagaacccagtgagtgccagccgcagtgacccagtcatcctgaatgtcctctatggcccagatggccccaccatttccccctcaaaggccaattaccgtccaggggaaaatctgaacctctcctgccacgcagcctctaacccacctgcacagtactcttggtttatcaatgggacgttccagcaatccacacaagagctctttatccccaacatcactgtgaataatagcggatcctatatgtgccaagcccataactcagccactggcctcaataggaccacagtcacgatgatcacagtctctggaagtgctcctgtcctctcagctgtggccaccgtcggcatcacgattggagtgctggccagggtggctctgatatagcagccctggtgtattttcgatatttcaggaagactggcagattggaccagaccctgaattcttctagctcctccaatcccattttatcccatggaaccactaaaaacacaatcctaaaatttatatgggaaccacaaaagacttagaatagtcagctatcctgagcaaaaggaatcaaactggaggaatcatattacctgacttccaattattcaacagagctacagtaaccaaaacagcatgatactggcataacaacagacacataggaacagtatagacaacccagaaacaaattcatacatctatggtgaccacttttgacaaaggaatgaagaacacacactggg

SEQ ID NO: 422153 - DNA, 428 bp, Homo sapiens
taatacggaccgcatggcagcacactcccatttatgaataacagcatctgggtcagacattatccaataatagtaatattactcaacacagttttaatatcacctttgtaaaaaatattaccatccaattaaaaaaaattaaaaccaatttaaaaaaaaaaagaacacaggagattccagtctacttgagttagcataatacagaagtcccctctactttaacttttacaaaaaagtaacctgaactaatctgatgttaaccaatgtatttatttctgtggttctgtttccttgttccaatttgacaaaacccactgttcttgtattgtattgcccagggggagctatcactgtacttgtagagtggtgctgctttaattcataaatcacaaataaaagccaattagctctataactaaaaaaaaaaa

SEQ ID NO: 422154 - DNA, 456 bp, Homo sapiens
ggggaggggctgtctcctgtgctacttctgctcaaacacccattcccatcatcactcatctccaggatgtccttaaggctcagggttcacattttctgatgggagaaacaggtgaatgtctcagactttggctcaggggacatagcgggggtttggttgagacttcagggttgtgacatggctcagggggacaccgtggcccttccacagaccaggaacttatgcttccctctgacaacatcacctgtggctttattctctttcctccagatggcccagatggccccaccatttccccctcaaaggccaattaccgtccaggggaaaatctgaacctctcctgccacgcagcctctaacccacctgcacagtactcttggtttatcaatgggacgttccagcaatccacacaagagctctttatccccaacatcactgtgaataatagcggatcct

SEQ ID NO: 422155 - DNA, 625 bp, Homo sapiens
  misc_feature (624)..(624): n is a, c, g, or t
tgaccctgggaaatgcttctatccctgagaggaggctcagcacagaaggaggaaggacagcagggccaacagtcacagcagccctgaccagagcattcctggagctcaagctcctctacaaagaggtggacagagaagacagcagagaccatgggacccccctcagcccctccctgcagattgcatgtcccctggaaggaggtcctgctcacagcctcacttctaaccttctggaacccacccaccactgccaagctcactattgaatccacgccgttcaatgtcgcagaggggaaggaggtgcttctacttgtccacaacctgccccagaatctttttggttacagctggtacaaaggcgaaagagtggatggcaacagtctaattgtaggatatgtaataggaactcaacaagctaccccagggcccgcatacagtggtcgagagacaatataccccaatgcatccctgctgatccagaacgtcacccagaatgacacaggattctataccctacaagtcataaagtcagatcttgtgaatgaagaagcaaccggacagttccatgtatacccggagctgcccaagtcctccttctcgcagtctctaatcactagtgaattnc

SEQ ID NO: 422156 - DNA, 445 bp, Homo sapiens
  misc_feature (44)..(45): n is a, c, g, or t
  misc_feature (51)..(51): n is a, c, g, or t
  misc_feature (56)..(56): n is a, c, g, or t
  misc_feature (62)..(62): n is a, c, g, or t
tcctatgttttgagtcagaactcaggagtgcaaacagcagtganncagcancctgnatgtcntctatggcccggatgcccccaccatttcccctctaaacacatcttacagatcaggggaaaatctgaacctctcctgccacgcagcctctaacccacctgcacagtactcttggtttgtcaatgggactttccagcaatccacccaagagctctttatccccaacatcactgtgaataatagtggatcctatacgtgccaagcccataactcagacactggcctcaataggaccacagtcacgacgatcacagtctatgccaacatcgtgaaaccccatctctactaaaaatacaaaaatgagctgggcttggtggcgcgcacctgtagtcccagttactcgggaggctgaggcaggagaatcgcttgaacccgggaggtggag

SEQ ID NO: 422157 - DNA, 2261 bp, Homo sapiens
  misc_feature (179)..(179): n is a, c, g, or t
ctggattatagtgaggagtttactcaattaagtcaagagttttaaagtcttctctgatcagaatttgctatctgatcagagcaggccacccaatcacagcaggtgcttggaggggagtggaatctcagtagagttgatgactcaccaagtgtaaatgggaaaaagcaacacagtcacanttccatgtatacccggagctgcccaagccctccatctccagcaacaactccaaccccgtggaggacaaggatgctgtggccttcacctgtgaacctgagattcagaacacaacctacctgtggtgggtaaataatcagagcctcccggtcagtcccaggctgcagctgtccaatggcaacaggaccctcactctactcagtgtcacaaggaatgatgcaggaacctatgaatgtgaaatccagaacccagtgagtgccagccgcagtgacccagtcatcctgaatgtcctctatggcccagatggccccaccatttccccctcaaaggccaattaccgtccaggggaaaatctgaacctctcctgccacgcagcctctaacccacctgcacagtactcttggtttatcaatgggacgttccagcaatccacacaagagctctttatccccaacatcactgtgaataatagcggatcctatatgtgccaagcccataactcagccactggcctcaataggaccacagtcacgatgatcacagtctctggaagtgctcctgtcctctcagctgtggccaccgtcggcatcacgattggagtgctggccagggtggctctgatatagcagccctggtgtattttcgatatttcaggaagactggcagattggaccagaccctgaattcttctagctcctccaatcccattttatcccatggaaccactaaaaacaaggtctgctctgctcctgaagccctatatgctggagatggacaactcaatgaaaatttaaagggaaaaccctcaggcctgaggtgtgtgccactcagagacttcacctaactagagacaggcaaactgcaaaccatggtgagaaattgacgacttcacactatggacagcttttcccaagatgtcaaaacaagactcctcatcatgataaggctcttacccccttttaatttgtccttgcttatgcctgcctctttcgcttggcaggatgatgctgtcattagtatttcacaagaagtagcttcagagggtaacttaacagagtatcagatctatcttgtcaatcccaacgttttacataaaataagagatcctttagtgcacccagtgactgacattagcagcatctttaacacagccgtgtgttcaaatgtacagtggtccttttcagagttggacttctagactcacctgttctcactccctgttttaattcaacccagccatgcaatgccaaataatagaattgctccctaccagctgaacagggaggagtctgtgcagtttctgacacttgttgttgaacatggctaaatacaatgggtatcgctgagactaagttgtagaaattaacaaatgtgctgcttggttaaaatggctacactcatctgactcattctttattctattttagttggtttgtatcttgcctaaggtgcgtagtccaactcttggtattaccctcctaatagtcatactagtagtcatactccctggtgtagtgtattctctaaaagctttaaatgtctgcatgcagccagccatcaaatagtgaatggtctctctttggctggaattacaaaactcagagaaatgtgtcatcaggagaacatcataacccatgaaggataaaagccccaaatggtggtaactgataatagcactaatgctttaagatttggtcacactctcacctaggtgagcgcattgagccagtggtgctaaatgctacatactccaactgaaatgttaaggaagaagatagatccaattaaaaaaaattaaaaccaatttaaaaaaaaaaagaacacaggagattccagtctacttgagttagcataatacagaagtcccctctactttaacttttacaaaaaagtaacctgaactaatctgatgttaaccaatgtatttatttctgtggttctgtttccttgttccaatttgacaaaacccactgttcttgtattgtattgcccagggggagctatcactgtacttgtagagtggtgctgctttaattcataaatcacaaataaaagccaattagctctataactaaaaaaaaaaa

SEQ ID NO: 422158 - DNA, 3269 bp, Homo sapiens
caggtgattatcctaattaatgtctatctaattaaattactgtcagcagctaaccaatggcaggagccgtttcatcggctgcacaagcagcaagatcaaaagtgagccttttctgattgctgcatagtgtcaattggccaatctcttctcccagggaaaaaaaaaagtaaatcaaacctttgagaagcatttgctggttgaagtgctttctgtctagtgagggggtctgtggatttctagtttatgataaataggactttaaaaaccaggacgggagggcgagtgttcaggttctagagctatgcagctggagcactgcctttctccttctatcatgctctccaagaaatttctcaatgtgagcagcagctacccacattcaggcggatccgagcttgtcttgcacgatcatcccattatctcgaccactgacaacctggagagaagttcacctttgaaaaaaattaccagggggatgacgaatcagtcagatacagacaattttcctgactccaaggactcaccaggggacgtccagagaagtaaactctctcctgtcttggacggggtctctgagcttcgtcacagtttcgatggctctgctgcagatcgctacctcctctctcagtccagccagccacagtctgcggccactgctcccagtgccatgttcccgtaccccggccagcacggaccggcgcaccccgccttctccatcggcagccctagccgctacatggcccaccacccggtcatcaccaacggagcctacaacagcctcctgtccaactcctcgccgcagggataccccacggccggctacccctacccacagcagtacggccactcctaccaaggagctccgttctaccagttctcctccacccagccggggctggtgcccggcaaagcacaggtgtacctgtgcaacaggcccctttggctgaaatttcaccggcaccaaacggagatgatcatcaccaaacagggaaggcgcatgtttccttttttaagttttaacatttctggtctcgatcccacggctcattacaatattttggtggatgtgattttggcggatcccaatcactggaggtttcaaggaggcaaatgggttccttgcggcaaagcggacaccaatgtgcaaggaaatcgggtctatatgcatccggattcccccaacactggggctcactggatgcgccaagaaatctcttttggaaaattaaaacttacgaacaacaaaggagcttcaaataacaatgggcagatggtggttttacagtccttgcacaagtaccagccccgcctgcatgtggtggaagtgaacgaggacggcacggaggacactagccagcccggccgcgtgcagacgttcactttccctgagactcagttcatcgccgtcaccgcctaccagaacacggatattacacaactgaaaatagatcacaacccttttgcaaaaggatttcgggataattatgacacgatctacaccggctgtgacatggaccgcctgaccccctcgcccaacgactcgccgcgctcgcagatcgtgcccggggcccgctacgccatggccggctctttcctgcaggaccagttcgtgagcaactacgccaaggcccgcttccacccgggccgggtacggaccgcagcgtgccgcacaccaacgggctgctgtcgccgcagcaggccgaggacccgggcgcgccctcgccgcaacgctggtttgtgacgccggccaacaaccggctggacttcgcggcctcggcctatgacacggccacggacttcgcgggcaacgcggccacgctgctctcttacgcggcggcgggcgtgaaggcgctgccgctgcaggctgcaggctgcactggccgcccgctcggctactacgccgacccgtcgggctggggcgcccgcagtcccccgcagtactgcggcaccaagtcgggctcggtgctgccctgctggcccaacagcgccgcggccgccgcgcgcatggccggcgccaatccctacctgggcgaggaggccgagggcctggccgccgagcgctcgccgctgccgcccggcgccgccgaggacgccaagcccaaggacctgtccgattccagctggatcgagacgccctcctcgatcaagtccatcgactccagcgactcggggatttacgagcaggccaagcggaggcggatctcgccggccgacacgcccgtgtccgagagttcgtccccgctcaagagcgaggtgctggcccagcgggactgcgagaagaactgcgccaaggacattagcggctactatggcttctactcgcacagctaggccgcccctacccgcccggccccgccgcggcccggacccccagccagcccctcacagctcttccccagctccgcctccccacactcctccttgcgcacccactcattttatttgaccctcgatggccgtctgcagcgaataagtgcaggtctccgagcgtgattttaaccttttttgcacagcagtctctgcaattagctcaccgaccttcaactttgctgtaaaccttttggttttcctacttactcttcttctgtggagttatcctcctacaattcccctccccctcgtctttctcttacctcctacttctctttcttgtaatgaaactcttcacctttaggagacctgggcagtcctgtcaggcagcagcgattccgacccgccaagtctcggcctccacattaaccataggatgttgactctagaacctggacccacccagcgcgtcctttcttatccccgagtggatggatggatggatggatggtagggatgttaataattttagtggaacaaagcctgtgaaatgattgtacatagtgttaatttattgtaacgaatggctagtttttattctcgtcaaggcacaaaaccagttcatgcttaacctttttttcctttcctttctttgcttttctttctctcctctcatactttctcttctctctcttttaattttcttgtgagataatattctaagaggctctagaaacatgaaatactcagtagtgatgggtttcccacttctcctcaatccgttgcatgaaataattactatgtgccctaatgcacacaaatagctaaggagaatccacccaaacacctttaaaggataggtgtctgttcataggcaagtcgattaagtggcatgatgcctgcaaagcaaagtcaactggagttgtatgttccccccaccttctaaatagaatagctcg

SEQ ID NO: 422159 - DNA, 3288 bp, Homo sapiens
caggtgattatcctaattaatgtctatctaattaaattactgtcagcagctaaccaatggcaggagccgtttcatcggctgcacaagcagcaagatcaaaagtgagccttttctgattgctgcatagtgtcaattggccaatctcttctcccagggaaaaaaaaaagtaaatcaaacctttgagaagcatttgctggttgaagtgctttctgtctagtgagggggtctgtggatttctagtttatgataaataggactttaaaaaccaggacgggagggcgagtgttcaggttctagagctatgcagctggagcactgcctttctccttctatcatgctctccaagaaatttctcaatgtgagcagcagctacccacattcaggcggatccgagcttgtcttgcacgatcatcccattatctcgaccactgacaacctggagagaagttcacctttgaaaaaaattaccagggggatgacgaatcagtcagatacagacaattttcctgactccaaggactcaccaggggacgtccagagaagtaaactctctcctgtcttggacggggtctctgagcttcgtcacagtttcgatggctctgctgcagatcgctacctcctctctcagtccagccagccacagtctgcggccactgctcccagtgccatgttcccgtaccccggccagcacggaccggcgcaccccgccttctccatcggcagccctagccgctacatggcccaccacccggtcatcaccaacggagcctacaacagcctcctgtccaactcctcgccgcagggataccccacggccggctacccctacccacagcagtacggccactcctaccaaggagctccgttctaccagttctcctccacccagccggggctggtgcccggcaaagcacaggtgtacctgtgcaacaggcccctttggctgaaatttcaccggcaccaaacggagatgatcatcaccaaacagggaaggcgcatgtttccttttttaagttttaacatttctggtctcgatcccacggctcattacaatattttggtggatgtgattttggcggatcccaatcactggaggtttcaaggaggcaaatgggttccttgcggcaaagcggacaccaatgtgcaaggaaatcgggtctatatgcatccggattcccccaacactggggctcactggatgcgccaagaaatctcttttggaaaattaaaacttacgaacaacaaaggagcttcaaataacaatgggcagatggtggttttacagtccttgcacaagtaccagccccgcctgcatgtggtggaagtgaacgaggacggcacggaggacactagccagcccggccgcgtgcagacgttcactttccctgagactcagttcatcgccgtcaccgcctaccagaacacggatattacacaactgaaaatagatcacaacccttttgcaaaaggatttcgggataattatgacacgatctacaccggctgtgacatggaccgcctgaccccctcgcccaacgactcgccgcgctcgcagatcgtgcccggggcccgctacgccatggccggctctttcctgcaggaccagttcgtgagcaactacgccaaggcccgcttccacccgggcgcgggcgcgggccccgggccgggtacggaccgcagcgtgccgcacaccaacgggctgctgtcgccgcagcaggccgaggacccgggcgcgccctcgccgcaacgctggtttgtgacgccggccaacaaccggctggacttcgcggcctcggcctatgacacggccacggacttcgcgggcaacgcggccacgctgctctcttacgcggcggcgggcgtgaaggcgctgccgctgcaggctgcaggctgcactggccgcccgctcggctactacgccgacccgtcgggctggggcgcccgcagtcccccgcagtactgcggcaccaagtcgggctcggtgctgccctgctggcccaacagcgccgcggccgccgcgcgcatggccggcgccaatccctacctgggcgaggaggccgagggcctggccgccgagcgctcgccgctgccgcccggcgccgccgaggacgccaagcccaaggacctgtccgattccagctggatcgagacgccctcctcgatcaagtccatcgactccagcgactcggggatttacgagcaggccaagcggaggcggatctcgccggccgacacgcccgtgtccgagagttcgtccccgctcaagagcgaggtgctggcccagcgggactgcgagaagaactgcgccaaggacattagcggctactatggcttctactcgcacagctaggccgcccctacccgcccggccccgccgcggcccggacccccagccagcccctcacagctcttccccagctccgcctccccacactcctccttgcgcacccactcattttatttgaccctcgatggccgtctgcagcgaataagtgcaggtctccgagcgtgattttaaccttttttgcacagcagtctctgcaattagctcaccgaccttcaactttgctgtaaaccttttggttttcctacttactcttcttctgtggagttatcctcctacaattcccctccccctcgtctttctcttacctcctacttctctttcttgtaatgaaactcttcacctttaggagacctgggcagtcctgtcaggcagcagcgattccgacccgccaagtctcggcctccacattaaccataggatgttgactctagaacctggacccacccagcgcgtcctttcttatccccgagtggatggatggatggatggatggtagggatgttaataattttagtggaacaaagcctgtgaaatgattgtacatagtgttaatttattgtaacgaatggctagtttttattctcgtcaaggcacaaaaccagttcatgcttaacctttttttcctttcctttctttgcttttctttctctcctctcatactttctcttctctctcttttaattttcttgtgagataatattctaagaggctctagaaacatgaaatactcagtagtgatgggtttcccacttctcctcaatccgttgcatgaaataattactatgtgccctaatgcacacaaatagctaaggagaatccacccaaacacctttaaaggataggtgtctgttcataggcaagtcgattaagtggcatgatgcctgcaaagcaaagtcaactggagttgtatgttccccccaccttctaaatagaatagctcg

SEQ ID NO: 422160 - DNA, 276 bp, Homo sapiens
ggaaccctcctcctgtggggtaacagtctggccgggggcccagtcgtggggcggtgtctgcagtccgggtccagatccgcggcacgcagagcccgggaggcccgagaggaaccagcgggcagaggacttgggaaaggcgcaccgacttccctgcaggcctgactccggtctccatggcgaaagcaggcaggtggcacagccgcggctctccatgagggagcagcttagattatatgctgttggattaaaatgtaataaacataggagtaaaaaaaa

SEQ ID NO: 422161 - DNA, 864 bp, Homo sapiens
  misc_feature (11)..(11): n is a, c, g, or t
  misc_feature (22)..(22): n is a, c, g, or t
  misc_feature (24)..(24): n is a, c, g, or t
ctcgtgcgatntcggcagaggntnaacagccaagatgctgcggaatctgctggctcttcgtcagattgggcagaggacgataagcactgcttcccgcaggcattttaaaaataaagttccggagaagcaaaaactgttccaggaggatgatgaaattccactgtatctaaagggtggggtagctgatgccctcctgtatagagccaccatgattcttacagttggtggaacagcatatgccatatatgagctggctgtggcttcatttcccaagaagcaggagtgacttcagtcatcccagcaatcgcttggttcagtttcattcagctctctatggaccagtaatctgataaataaccgagctcttctttggggatcaatatttattgacttgtagtaactgccaccaataaagcagtctttaccatgaaaaaaaaaaaaaaaaaaaaaaaaaaaaaaaaaaaaaaaaaaaaaaaaaaaaaaaaaaaaaaaaaaaaaaaaaaaaaaaaaaaaaaaaaaaaaaaaaaaaaaaaaagagggggggggggggaaaagatagggggggggcacaacgaaagtgagtgagcgccacacaaagtatttagaataacgagcgggccgccacaccaaagggggcgcttactaaatgatgacaagcgacagcggcgagtaatacacacaggcgagggagcgacaaaacagcggatcgcgacaatatagaggagcgccacacacacgggggggggcagcaggaggcgccacacccacgaagaagattacgcgccggggacacaaacaacgaagagggggataggtgacacccacgacgatatggcgcgcaggaatcggagcggacaaagaaaa

SEQ ID NO: 422162 - DNA, 335 bp, Homo sapiens
gggggggagggggggggaaaaattgtaaaaaataggagggagtttccggtgaggagcaccaatttcctgtatctaaagggtggggtagctgatgccctcctgtatagagccaccatgattcttacagttggtggaacagcatatgccatatatgagctggctgtggcttcatttcccaagaagcaggagtgacttcagtcatcccagcaatcgcttggttcagtttcattcagctctctatggaccagtaatctgataaataaccgagctcttctttggggatcaatatttattgacttgtagtaactgccaccaataaagcagtctttaccatg

SEQ ID NO: 422163 - DNA, 838 bp, Homo sapiens
agcgattctcctgcctcagcctcccgagtagctgggattacaggcgtgcaccaccatgcctggctaattttgtagttttagtagagacggagtttctccgtgttggtcaggctggtcttgaactcctgacctcaggtgatccgcccgcctcggcctcccaaagtgctgggattacaggtttcagcaactatgcccggcccagttatcagctattttttatattacatttgattactttaaaattatatcactctttttttttacattcactttagggaaggcttgcatattttgaactatttttttctttggcatttaatcatccttagcatttctcaggcagtcttgggttaatatggaaataacctttgtatacgttcttaatcttatttttaaaaatttttgcattttatgttgacaaatatattattgtgccacactttctatattaaaactagattaaatatattttacatatatttatttaaaatttttccagcacctatcaaaatacttttttgtgttccaattaaggtagtcttaatgcaaacttacaacttttgaactggaatattaaatttatacacttagatcttagaatttatggttaagttcttttttgttttttatttttaggaacagcatatgccatatatgagctggctgtggcttcatttcccaagaagcaggagtgacttcagtcatcccagcaatcgcttggttcagtttcattcagctctctatggaccagtaatctgataaataaccgagctcttctttggggatcaatatttattgacttgtagtaactgccaccaataaagcagtctttaccatg

SEQ ID NO: 422164 - DNA, 590 bp, Homo sapiens
cggacgcgtgggttttaaggtgtgcacttttattcaactggtctcaagtcagtgtacaggtaagccctggctgcctccacccactcccaggagaccaaaagccttcatacatctcaagttgggggacaaaaaagggggaagggggggcacgaaggctcatcattcaaaataaaacaaaataaaaaagtattaaggcgaagattaaaaaaattttgcattacataatttacacgaaagcaatgctatcacctcccctgtgtggacttgggagaggactgggccattctccttagagagaagtggggtggcttttaggatggcaagggacttcctgtaacaacgcatctcatatttggaatgactattaaaaaaacaacaatgtgcaatcaaagtcctcggccacattgtgaactttgggggatgctcgctccaaccgactgctgtcaccttcagtcatcccagcaatcgcttggttcagtttcattcagctctctatggaccagtaatctgataaataaccgagctcttctttggggatcaatatttattgacttgtagtaactgccaccaataaagcagtctttaccatg

SEQ ID NO: 422165 - DNA, 941 bp, Homo sapiens
tccccttatctgttccttagtctcctttgtatattccttaatgttgggagttctttgagattatgttctgtgcctttaagttacacattctgcctgaacaatcttaagtaccttattattccattgtcttaacactgactgacttctctatcttttcttgtgccttgacatctgtcttgagctctagatttttcattattaatctcttgagaaatgaaggttaataatgaattaacctaagttagtaaggcccaagcagcaatcattccacacaagcctgggtttaataaggtcaaaacaggaataatctcacaccaacctgagatttcttacattcctcattactgtgaatggtatagccaaccaccttgaggagcgcaagcctctcttcggcccggaaagatttaagttcgtgaatgcatacgcaagactcggaggtagttccggttccggcgtggccattttcgttggtggtgttcagttgtggcggttgctggtcagtaacagccaagatgctgcggaatctgctggctcttcgtcagattgggcagaggacgataagcactgcttcccgcaggcattttaaaaataaagttccggagaagcaaaaactgttccaggaggatgatgaaattccactgtatctaaagggtggggtagctgatgccctcctgtatagagccaccatgattcttacagttggtggaacagcatatgccatatatgagctggctgtggcttcatttcccaagaagcaggagtgacttcagtcatcccagcaatcgcttggttcagtttcattcagctctctatggaccagtaatctgataaataaccgagctcttctttggggatcaatatttattgacttgtagtaactgccaccaataaagcagtctttaccatgaaaaaaaaaacatgaatgcatagataaaacatgt

SEQ ID NO: 422166 - DNA, 1050 bp, Homo sapiens
tccccttatctgttccttagtctcctttgtatattccttaatgttgggagttctttgagattatgttctgtgcctttaagttacacattctgcctgaacaatcttaagtaccttattattccattgtcttaacactgactgacttctctatcttttcttgtgccttgacatctgtcttgagctctagatttttcattattaatctcttgagaaatgaaggttaataatgaattaacctaagttagtaaggcccaagcagcaatcattccacacaagcctgggtttaataaggtcaaaacaggaataatctcacaccaacctgagatttcttacattcctcattactgtgaatggtatagccaaccaccttgaggagcgcaagcctctcttcggcccggaaagatttaagttcgtgaatgcatacgcaagactcggaggtagttccggttccggcgtggccattttcgttggtggtgttcagttgtggcggttgctggtcagtaacagccaagatgctgcggaatctgctggctcttcgtcagattgggcagaggacgataagcactgcttcccgcaggcattttaaaaataaagttccggagaagcaaaaactgttccaggaggatgatgaaattccactgtatctaaagggtggggtagctgatgccctcctgtatagagccaccatgattcttacagttggtggaacagcatatgccatatatgagctggctgtggcttcatttcccaagaagcaggagtgacttcagtcatcccagcaatcgcttggttcagtttcattcagctctctatggaccagtaatctgataaataaccgagctcttctttggggatcaatatttattgacttgtagtaactgccaccaataaagcagtctttaccatgaaaaaaaaaaaaaaaaaaaaaaaaaaaaaattaatattaaaaagtagatttgtgtttctttgcggatgaacttgcgcattgggttatacattcctttgtcttcgtttctctttctttctatttctatagtatgcccccatttt

SEQ ID NO: 422167 - DNA, 429 bp, Homo sapiens
  misc_feature (11)..(11): n is a, c, g, or t
  misc_feature (22)..(22): n is a, c, g, or t
  misc_feature (24)..(24): n is a, c, g, or t
ctcgtgcgatntcggcagaggntnaacagccaagatgctgcggaatctgctggctcttcgtcagattgggcagaggacgataagcactgcttcccgcaggcattttaaaaataaagttccggagaagcaaaaactgttccaggaggatgatgaaattccactgtatctaaagggtggggtagctgatgccctcctgtatagagccaccatgattcttacagttggtggaacagcatatgccatatatgagctggctgtggcttcatttcccaagaagcaggagtgacttcagtcatcccagcaatcgcttggttcagtttcattcagctctctatggaccagtaatctgataaataaccgagctcttctttggggatcaatatttattgacttgtagtaactgccaccaataaagcagtctttaccatg

SEQ ID NO: 422168 - DNA, 1126 bp, Homo sapiens
tccccttatctgttccttagtctcctttgtatattccttaatgttgggagttctttgagattatgttctgtgcctttaagttacacattctgcctgaacaatcttaagtaccttattattccattgtcttaacactgactgacttctctatcttttcttgtgccttgacatctgtcttgagctctagatttttcattattaatctcttgagaaatgaaggttaataatgaattaacctaagttagtaaggcccaagcagcaatcattccacacaagcctgggtttaataaggtcaaaacaggaataatctcacaccaacctgagatttcttacattcctcattactgtgaatggtatagccaaccaccttgaggagcgcaagcctctcttcggcccggaaagatttaagttcgtgaatgcatacgcaagactcggaggtagttccggttccggcgtggccattttcgttggtggtgttcagttgtggcggttgctggtcagtaacagccaagatgctgcggaatctgctggctcttcgtcagattgggcagaggacgataagcactgcttcccgcaggcattttaaaaataaagttccggagaagcaaaaactgttccaggaggatgatgaaattccactgtatctaaagggtggggtagctgatgccctcctgtatagagccaccatgattcttacagttggtggaacagcatatgccatatatgagctggctgtggcttcatttcccaagaagcaggagtgacttcagtcatcccagcaatcgcttggttcagtttcattcagctctctatggaccagtaatctgataaataaccgagctcttctttggggatcaatatttattgacttgtagtaactgccaccaataaagcagtctttaccatgaaaaaaaaaaaaaaaaaaaaaaaaaaaaaaaaaaaaaaaaaaaaaaaaaaaaaaaaaaaaaaaaaaaaaaaaaaaagaggggggggcgcgcgcgccaaaaaatatacccccgggggggcgcccaatcgcgccccccccccttttttgtggaaaaagggggcgcccccaaaggggggggtaaaaaaagggggggggcggggcgggaaacggggggcgggg

SEQ ID NO: 422169 - DNA, 1202 bp, Homo sapiens
  misc_feature (926)..(926): n is a, c, g, or t
  misc_feature (931)..(931): n is a, c, g, or t
  misc_feature (936)..(936): n is a, c, g, or t
  misc_feature (938)..(939): n is a, c, g, or t
  misc_feature (944)..(944): n is a, c, g, or t
tccccttatctgttccttagtctcctttgtatattccttaatgttgggagttctttgagattatgttctgtgcctttaagttacacattctgcctgaacaatcttaagtaccttattattccattgtcttaacactgactgacttctctatcttttcttgtgccttgacatctgtcttgagctctagatttttcattattaatctcttgagaaatgaaggttaataatgaattaacctaagttagtaaggcccaagcagcaatcattccacacaagcctgggtttaataaggtcaaaacaggaataatctcacaccaacctgagatttcttacattcctcattactgtgaatggtatagccaaccaccttgaggagcgcaagcctctcttcggcccggaaagatttaagttcgtgaatgcatacgcaagactcggaggtagttccggttccggcgtggccattttcgttggtggtgttcagttgtggcggttgctggtcagtaacagccaagatgctgcggaatctgctggctcttcgtcagattgggcagaggacgataagcactgcttcccgcaggcattttaaaaataaagttccggagaagcaaaaactgttccaggaggatgatgaaattccactgtatctaaagggtggggtagctgatgccctcctgtatagagccaccatgattcttacagttggtggaacagcatatgccatatatgagctggctgtggcttcatttcccaagaagcaggagtgacttcagtcatcccagcaatcgcttggttcagtttcattcagctctctatggaccagtaatctgataaataaccgagctcttctttggggatcaatatttattgacttgtagtaactgccaccaataaagcagtctttaccatgaaaaaaaaaataaaaaaanaaaanaaaanannaaaanaaaaaaaaaaaaaaaaaaaaaaaaaaaaaaaaaaaaaaaaaaaaaaaaaaaagaggggggggcccccttggcccaattgttttttaacttgggcaagttttttctttcggcccgaatttggcgttaattggccaatttccccttaaggggggggttttaaaaataaatggccggggttttacaaggcgggatggaaaaaccctggggtacccaaattaaacgccttgaagaaatcccctttcccaggtggggtaaaag

SEQ ID NO: 422170 - DNA, 1054 bp, Homo sapiens
  misc_feature (926)..(926): n is a, c, g, or t
  misc_feature (931)..(931): n is a, c, g, or t
  misc_feature (936)..(936): n is a, c, g, or t
  misc_feature (938)..(939): n is a, c, g, or t
  misc_feature (944)..(944): n is a, c, g, or t
tccccttatctgttccttagtctcctttgtatattccttaatgttgggagttctttgagattatgttctgtgcctttaagttacacattctgcctgaacaatcttaagtaccttattattccattgtcttaacactgactgacttctctatcttttcttgtgccttgacatctgtcttgagctctagatttttcattattaatctcttgagaaatgaaggttaataatgaattaacctaagttagtaaggcccaagcagcaatcattccacacaagcctgggtttaataaggtcaaaacaggaataatctcacaccaacctgagatttcttacattcctcattactgtgaatggtatagccaaccaccttgaggagcgcaagcctctcttcggcccggaaagatttaagttcgtgaatgcatacgcaagactcggaggtagttccggttccggcgtggccattttcgttggtggtgttcagttgtggcggttgctggtcagtaacagccaagatgctgcggaatctgctggctcttcgtcagattgggcagaggacgataagcactgcttcccgcaggcattttaaaaataaagttccggagaagcaaaaactgttccaggaggatgatgaaattccactgtatctaaagggtggggtagctgatgccctcctgtatagagccaccatgattcttacagttggtggaacagcatatgccatatatgagctggctgtggcttcatttcccaagaagcaggagtgacttcagtcatcccagcaatcgcttggttcagtttcattcagctctctatggaccagtaatctgataaataaccgagctcttctttggggatcaatatttattgacttgtagtaactgccaccaataaagcagtctttaccatgaaaaaaaaaataaaaaaanaaaanaaaanannaaaanaaaaaaatgtaaattatatattagatttattatattgaatttaaaacaatcaatgggccgccgttttaacaagtcgggactggaccctggcgttaccctttttgggctcg

SEQ ID NO: 422171 - DNA, 1639 bp, Homo sapiens
tccccttatctgttccttagtctcctttgtatattccttaatgttgggagttctttgagattatgttctgtgcctttaagttacacattctgcctgaacaatcttaagtaccttattattccattgtcttaacactgactgacttctctatcttttcttgtgccttgacatctgtcttgagctctagatttttcattattaatctcttgagaaatgaaggttaataatgaattaacctaagttagtaaggcccaagcagcaatcattccacacaagcctgggtttaataaggtcaaaacaggaataatctcacaccaacctgagatttcttacattcctcattactgtgaatggtatagccaaccaccttgaggagcgcaagcctctcttcggcccggaaagatttaagttcgtgaatgcatacgcaagactcggaggtagttccggttccggcgtggccattttcgttggtggtgttcagttgtggcggttgctggtcagtaacagccaagatgctgcggaatctgctggctcttcgtcagattgggcagaggacgataagcactgcttcccgcaggcattttaaaaataaagttccggagaagcaaaaactgttccaggaggatgatgaaattccactgtatctaaagggtggggtagctgatgccctcctgtatagagccaccatgattcttacagttggtggaacagcatatgccatatatgagctggctgtggcttcatttcccaagaagcaggagtgacttcagtcatcccagcaatcgcttggttcagtttcattcagctctctatggaccagtaatctgataaataaccgagctcttctttggggatcaatatttattgacttgtagtaactgccaccaataaagcagtctttaccatgcgaaaaaaaaaaacaacaaaaaaccaccaaaaacaaatttgggggcgccggcccaccagaaaagcgtccttatcgacccaccatctatctttggagcaagctcgggtgacccccagtcctgcgttcaactgcaaccagtcggccaccaaggcgcggttccccacgggacacctccgcggcagagtaacatgcggtggagggggattcactacacataataaaaacacgtgccggggggagaacacgcagacgcgtggttctggcaaccaaccccaccaagtagtgggcctcagcgcagagcacaccagggaggcgtccatcaaccagggagagtttgccaacgcgagcagcgcggcaaaacaaaacaataagcacaccgcgcacgaggaggacaaacaaagcgcacatgaccagaaacgaaacaagacgatagccaacaagacacgaagggagacaagcaccgacaacagcaagagcacagtaagagcaagaacagagacacaccccgcggcacttcgcagtcgcaccacagacaacgacgagccaacaactacaaaatgaaaaaacgagcagagcctcaaaatcactcgacatcccgaacaacacgacccagcaacacacagaacacgcaccaagaccgacagcaccgcagccgcagaccagaaactcacaccgctcaccacaagccccgcagaaacgcaaaatcaccacagacagaaccggcaacgatga

SEQ ID NO: 422172 - DNA, 1168 bp, Homo sapiens
tccccttatctgttccttagtctcctttgtatattccttaatgttgggagttctttgagattatgttctgtgcctttaagttacacattctgcctgaacaatcttaagtaccttattattccattgtcttaacactgactgacttctctatcttttcttgtgccttgacatctgtcttgagctctagatttttcattattaatctcttgagaaatgaaggttaataatgaattaacctaagttagtaaggcccaagcagcaatcattccacacaagcctgggtttaataaggtcaaaacaggaataatctcacaccaacctgagatttcttacattcctcattactgtgaatggtatagccaaccaccttgaggagcgcaagcctctcttcggcccggaaagatttaagttcgtgaatgcatacgcaagactcggaggtagttccggttccggcgtggccattttcgttggtggtgttcagttgtggcggttgctggtcagtaacagccaagatgctgcggaatctgctggctcttcgtcagattgggcagaggacgataagcactgcttcccgcaggcattttaaaaataaagttccggagaagcaaaaactgttccaggaggatgatgaaattccactgtatctaaagggtggggtagctgatgccctcctgtatagagccaccatgattcttacagttggtggaacagcatatgccatatatgagctggctgtggcttcatttcccaagaagcaggagtgacttcagtcatcccagcaatcgcttggttcagtttcattcagctctctatggaccagtaatctgataaataaccgagctcttctttggggatcaatatttattgacttgtagtaactgccaccaataaagcagtctttaccatgaaaaaaaaatcaatcctccttctatccttttcctcactctcttcatttctccaaaaatctttcaacaaaaaaccacataaaataaaacctgttgccccttggcccattccttttaaattggccaagcttatcatcgcgcccaatttggcttcctgggccaattcccccattggggggtcggttacaaatcacctgcccggcgttttaaaaacgtttaaactgggacctctggcttccccaattccccttgtgggaccccct

SEQ ID NO: 422173 - DNA, 1027 bp, Homo sapiens
tccccttatctgttccttagtctcctttgtatattccttaatgttgggagttctttgagattatgttctgtgcctttaagttacacattctgcctgaacaatcttaagtaccttattattccattgtcttaacactgactgacttctctatcttttcttgtgccttgacatctgtcttgagctctagatttttcattattaatctcttgagaaatgaaggttaataatgaattaacctaagttagtaaggcccaagcagcaatcattccacacaagcctgggtttaataaggtcaaaacaggaataatctcacaccaacctgagatttcttacattcctcattactgtgaatggtatagccaaccaccttgaggagcgcaagcctctcttcggcccggaaagatttaagttcgtgaatgcatacgcaagactcggaggtagttccggttccggcgtggccattttcgttggtggtgttcagttgtggcggttgctggtcagtaacagccaagatgctgcggaatctgctggctcttcgtcagattgggcagaggacgataagcactgcttcccgcaggcattttaaaaataaagttccggagaagcaaaaactgttccaggaggatgatgaaattccactgtatctaaagggtggggtagctgatgccctcctgtatagagccaccatgattcttacagttggtggaacagcatatgccatatatgagctggctgtggcttcatttcccaagaagcaggagtgacttcagtcatcccagcaatcgcttggttcagtttcattcagctctctatggaccagtaatctgataaataaccgagctcttctttggggatcaatatttattgacttgtagtaactgccaccaataaagcagtctttaccatggctttgtctgattttatcactttatgccaataatttcaacttttggtcagccttgtaaatcttaggtaaggatcaaagaaatgattcttttgccactaaacttgtgaaagcaacattatt

SEQ ID NO: 422174 - DNA, 817 bp, Homo sapiens
tccccttatctgttccttagtctcctttgtatattccttaatgttgggagttctttgagattatgttctgtgcctttaagttacacattctgcctgaacaatcttaagtaccttattattccattgtcttaacactgactgacttctctatcttttcttgtgccttgacatctgtcttgagctctagatttttcattattaatctcttgagaaatgaaggttaataatgaattaacctaagttagtaaggcccaagcagcaatcattccacacaagcctgggtttaataaggtcaaaacaggaataatctcacaccaacctgagatttcttacattcctcattactgtgaatggtatagccaaccaccttgaggagcgcaagcctctcttcggcccggaaagatttaagttcgtgaatgcatacgcaagactcggaggtagttccggttccggcgtggccattttcgttggtggtgttcagttgtggcggttgctggtcagtaacagccaagatgctgcggaatctgctggaggatgatgaaattccactgtatctaaagggtggggtagctgatgccctcctgtatagagccaccatgattcttacagttggtggaacagcatatgccatatatgagctggctgtggcttcatttcccaagaagcaggagtgacttcagtcatcccagcaatcgcttggttcagtttcattcagctctctatggaccagtaatctgataaataaccgagctcttctttggggatcaatatttattgacttgtagtaactgccaccaataaagcagtctttaccatg

SEQ ID NO: 422175 - DNA, 962 bp, Homo sapiens
tccccttatctgttccttagtctcctttgtatattccttaatgttgggagttctttgagattatgttctgtgcctttaagttacacattctgcctgaacaatcttaagtaccttattattccattgtcttaacactgactgacttctctatcttttcttgtgccttgacatctgtcttgagctctagatttttcattattaatctcttgagaaatgaaggttaataatgaattaacctaagttagtaaggcccaagcagcaatcattccacacaagcctgggtttaataaggtcaaaacaggaataatctcacaccaacctgagatttcttacattcctcattactgtgaatggtatagccaaccaccttgaggagcgcaagcctctcttcggcccggaaagatttaagttcgtgaatgcatacgcaagactcggaggtagttccggttccggcgtggccattttcgttggtggtgttcagttgtggcggttgctggtcagtaacagccaagatgctgcggaatctgctggctcttcgtcagattgggcagaggacgataagcactgcttcccgcaggcattttaaaaataaagttccggagaagcaaaaactgttccagaggtactgaagtattttataggagatgttacttgtaattattagattaccaaaaggaggatgatgaaattccactgtatctaaagggtggggtagctgatgccctcctgtatagagccaccatgattcttacagttggtggaacagcatatgccatatatgagctggctgtggcttcatttcccaagaagcaggagtgacttcagtcatcccagcaatcgcttggttcagtttcattcagctctctatggaccagtaatctgataaataaccgagctcttctttggggatcaatatttattgacttgtagtaactgccaccaataaagcagtctttaccatg

SEQ ID NO: 422176 - DNA, 866 bp, Homo sapiens
tccccttatctgttccttagtctcctttgtatattccttaatgttgggagttctttgagattatgttctgtgcctttaagttacacattctgcctgaacaatcttaagtaccttattattccattgtcttaacactgactgacttctctatcttttcttgtgccttgacatctgtcttgagctctagatttttcattattaatctcttgagaaatgaaggttaataatgaattaacctaagttagtaaggcccaagcagcaatcattccacacaagcctgggtttaataaggtcaaaacaggaataatctcacaccaacctgagatttcttacattcctcattactgtgaatggtatagccaaccaccttgaggagcgcaagcctctcttcggcccggaaagatttaagttcgtgaatgcatacgcaagactcggaggtagttccggttccggcgtggccattttcgttggtggtgttcagttgtggcggttgctggtcagtaacagccaagatgctgcggaatctgctggctcttcgtcagattgggcagaggacgataagcactgcttcccgcaggcattttaaaaataaagttccggagaagcaaaaactgttccagtgatgccctcctgtatagagccaccatgattcttacagttggtggaacagcatatgccatatatgagctggctgtggcttcatttcccaagaagcaggagtgacttcagtcatcccagcaatcgcttggttcagtttcattcagctctctatggaccagtaatctgataaataaccgagctcttctttggggatcaatatttattgacttgtagtaactgccaccaataaagcagtctttaccatg

SEQ ID NO: 422177 - DNA, 1384 bp, Homo sapiens
gcatgagccactgcgcctggccttgatgtcttaataaaaaaataacaccagtaagatttgatgattatgttgtgatagagttggctttctgagtcccattgatggcagtgaaggctatatttcagtcaaaaacatccattatatcccacctcttacagcaagggctttaaaacattttgactgtgatgcaaaataaaagcacactttacatctaaactttgtacagacatatttatgaccaaaactttgagtgattattttatgcctatcatattcataggaatgccacatacttggatttctgtgagtcttgcatgaagtctataatatgtcctcattttaaagatgaagaaatcatattaattacctgtttgggaaactctactctcacaccacaacaatcaacatggaagatctctgttgccaaatgtgtgggggtttttccctgcacaccaagtaatggacaccagctaggtgtcctccagttcagtttccacactatctactgggagatagcatcagattccacaggttgatggcacaagactgtcccctccttcccaccagttgcaagtttgggtcttcggaacttctgactgactggctttaagttggggttcccacaatctcctcgttggggaaacacatttaccagtttattataaaaggtataggctgggcatggtggctcatgcctgtaatcccagcatgctgggattacaggtttcagcaactatgcccggcccagttatcagctattttttatattacatttgattactttaaaattatatcactctttttttttacattcactttagggaaggcttgcatattttgaactatttttttctttggcatttaatcatccttagcatttctcaggcagtcttgggttaatatggaaataacctttgtatacgttcttaatcttatttttaaaaatttttgcattttatgttgacaaatatattattgtgccacactttctatattaaaactagattaaatatattttacatatatttatttaaaatttttccagcacctatcaaaatacttttttgtgttccaattaaggtagtcttaatgcaaacttacaacttttgaactggaatattaaatttatacacttagatcttagaatttatggttaagttcttttttgttttttatttttaggaacagcatatgccatatatgagctggctgtggcttcatttcccaagaagcaggagtgacttcagtcatcccagcaatcgcttggttcagtttcattcagctctctatggaccagtaatctgataaataaccgagctcttctttggggatcaatatttattgacttgtagtaactgccaccaataaagcagtctttaccatg

SEQ ID NO: 422178 - DNA, 822 bp, Homo sapiens
tccccttatctgttccttagtctcctttgtatattccttaatgttgggagttctttgagattatgttctgtgcctttaagttacacattctgcctgaacaatcttaagtaccttattattccattgtcttaacactgactgacttctctatcttttcttgtgccttgacatctgtcttgagctctagatttttcattattaatctcttgagaaatgaaggttaataatgaattaacctaagttagtaaggcccaagcagcaatcattccacacaagcctgggtttaataaggtcaaaacaggaataatctcacaccaacctgagatttcttacattcctcattactgtgaatggtatagccaaccaccttgaggagcgcaagcctctcttcggcccggaaagatttaagttcgtgaatgcatacgcaagactcggaggtagttccggttccggcgtggccattttcgttggtggtgttcagttgtggcggttgctggtcagtaacagccaagatgctgcggaatctgctggctcttcgtcagattgggcagaggacgataagcactgcttcccgcaggcattttaaaaataaagttccggagaagcaaaaactgttccaggaacagcatatgccatatatgagctggctgtggcttcatttcccaagaagcaggagtgacttcagtcatcccagcaatcgcttggttcagtttcattcagctctctatggaccagtaatctgataaataaccgagctcttctttggggatcaatatttattgacttgtagtaactgccaccaataaagcagtctttaccatg

SEQ ID NO: 422179 - DNA, 1278 bp, Homo sapiens
tccccttatctgttccttagtctcctttgtatattccttaatgttgggagttctttgagattatgttctgtgcctttaagttacacattctgcctgaacaatcttaagtaccttattattccattgtcttaacactgactgacttctctatcttttcttgtgccttgacatctgtcttgagctctagatttttcattattaatctcttgagaaatgaaggttaataatgaattaacctaagttagtaaggcccaagcagcaatcattccacacaagcctgggtttaataaggtcaaaacaggaataatctcacaccaacctgagatttcttacattcctcattactgtgaatggtatagccaaccaccttgaggagcgcaagcctctcttcggcccggaaagatttaagttcgtgaatgcatacgcaagactcggaggtagttccggttccggcgtggccattttcgttggtggtgttcagttgtggcggttgctggtcagtaacagccaagatgctgcggaatctgctggctcttcgtcagattgggcagaggacgataagcactgcttcccgcaggcattttaaaaataaagttccggagaagcaaaaactgttccagaggtactgaagtattttataggagatgttacttgtaattattagattaccaaaaggtaagagttgggataaacaagtatgtgtataaattagatcatatgacaatataaacattacaaaaaaagtcaaggacatgtaccatagtgctaatagtggttgtctcttggggaaagacctggtggagcagagcaatttacctttataagtagtttgattatgagtgatttttgttttattatggtttctagcttttcctaaataaagcttaaagtgattaaaaatagttgtatcatatatacctaaaatacaatactttattgaacagatgtactaaatagctactgtatgctggattagatgctagggatataatttagggttataaaccaaaatcccttccccacttttttaagggaaaaaaagtttcctatgactaaatctaatgtgtggcaattattggttcttttatatttaagttatattaaagttgttgagatcagtgtgtatgttttatagctttaatgtttatatattctttggaaagaccgtcattaatggatctcaaattaacggtgaaagaagaatgctgacttttaggaattcttattttaaaagtagtagtagtagagacggaataaagaaaattgtaggtcttttaa

SEQ ID NO: 422180 - DNA, 903 bp, Homo sapiens
tccccttatctgttccttagtctcctttgtatattccttaatgttgggagttctttgagattatgttctgtgcctttaagttacacattctgcctgaacaatcttaagtaccttattattccattgtcttaacactgactgacttctctatcttttcttgtgccttgacatctgtcttgagctctagatttttcattattaatctcttgagaaatgaaggttaataatgaattaacctaagttagtaaggcccaagcagcaatcattccacacaagcctgggtttaataaggtcaaaacaggaataatctcacaccaacctgagatttcttacattcctcattactgtgaatggtatagccaaccaccttgaggagcgcaagcctctcttcggcccggaaagatttaagttcgtgaatgcatacgcaagactcggaggtagttccggttccggcgtggccattttcgttggtggtgttcagttgtggcggttgctggtcagtaacagccaagatgctgcggaatctgctggctcttcgtcagattgggcagaggacgataagcactgcttcccgcaggcattttaaaaataaagttccggagaagcaaaaactgttccaggaggatgatgaaattccactgtatctaaagggtggggtagctgatgccctcctgtatagagccaccatgattcttacagttggtgcatcaggatatgcgatatattaacagcttgtggcatcctttatctattagcaagaggtccttcagtgattgcagcaatatcttggttcaggttcccttagctatgtatagcccagtaatgtgatagaatggctaggttttctatggggatcaagatttcttccgttgtagtttctatcaacaatgaatcagtttttcc

SEQ ID NO: 422181 - DNA, 973 bp, Homo sapiens
tccccttatctgttccttagtctcctttgtatattccttaatgttgggagttctttgagattatgttctgtgcctttaagttacacattctgcctgaacaatcttaagtaccttattattccattgtcttaacactgactgacttctctatcttttcttgtgccttgacatctgtcttgagctctagatttttcattattaatctcttgagaaatgaaggttaataatgaattaacctaagttagtaaggcccaagcagcaatcattccacacaagcctgggtttaataaggtcaaaacaggaataatctcacaccaacctgagatttcttacattcctcattactgtgaatggtatagccaaccaccttgaggagcgcaagcctctcttcggcccggaaagatttaagttcgtgaatgcatacgcaagactcggaggtagttccggttccggcgtggccattttcgttggtggtgttcagttgtggcggttgctggtcagtaacagccaagatgctgcggaatctgctggctcttcgtcagattgggcagaggacgataagcactgcttcccgcaggcattttaaaaataaagttccggagaagcaaaaactgttccaggaggatgatgaaattccactgtatctaaagggtggggtagctgatgccctcctgtatagagccaccatgattcttacagttggtggtaaggcctttggaatgtttgaaggtttatagaaaagtaatagtaatgataactgataactttattgcttttgctatgccagtattttaatgcaggcagtttgtctccagaatttgatatcttactatatctcataatgattcaagagggtgactgatacatactgtataagagcattgtgatgtcttcttttttttttgaaatggagttttgctcctgttgcccaggctggattgcaatggcgcgatctcggctcactgcaacctct

SEQ ID NO: 422182 - DNA, 557 bp, Homo sapiens
gaacgagatcacgggactgagacggcgagccggctagagcggatagagccgtactgccgctctagtttttcttttgctctctatggttaggagcgcaagcctctcttcggcccggaaagatttaagttcgtgaatgcatacgcaagactcggaggtagttccggttccggcgtggccattttcgttggtggtgttcagttgtggcggttgctggtcagtaacagccaagatgctgcggaatctgctggtgaggagcttctcatcttgcattcatgatgggggcgagggagtggagaggaggctgaggcaccacgacagaaaaccctcacctgggaggggtgccgaaggcggctaatgaagtcaccttgattcgtgtcctttttccctgaccttactttcccttccgtctattcctctcgccccaggccgttactgggtagatgtaaggagtggagaggctggggaagtgaccagagactcgtgggttagacccgtcttgggttcttagtcaccacctctaaccctgtcggtcattgatgaggttagtagctccgatc

SEQ ID NO: 422183 - DNA, 667 bp, Homo sapiens
ccttagctccagggaccagcctactgaacatcgaaaaggtcaggaacgagatcacgggactgagacggcgagccggctagagcggatagagccgtactgccgctctagtttttcttttgctctctatggttaggagcgcaagcctctcttcggcccggaaagatttaagttcgtgaatgcatacgcaagactcggaggtagttccggttccggcgtggccattttcgttggtggtgttcagttgtggcggttgctggtcagtaacagccaagatgctgcggaatctgctggctcttcgtcagattgggcagaggacgataagcactgcttcccgcaggcattttaaaaataaagttccggagaagcaaaaactgttccaggaggatgatgaaattccactgtatctaaagggtggggtagctgatgccctcctgtatagagccaccatgattcttacagttggtggaacagcatatgccatatatgagctggctgtggcttcatttcccaagaagcaggagtgacttcagtcatcccagcaatcgcttggttcagtttcattcagctctctatggaccagtaatctgataaataaccgagctcttctttggggatcaatatttattgacttgtagtaactgccaccaataaagcagtctttaccatg

SEQ ID NO: 422184 - DNA, 907 bp, Homo sapiens
tccccttatctgttccttagtctcctttgtatattccttaatgttgggagttctttgagattatgttctgtgcctttaagttacacattctgcctgaacaatcttaagtaccttattattccattgtcttaacactgactgacttctctatcttttcttgtgccttgacatctgtcttgagctctagatttttcattattaatctcttgagaaatgaaggttaataatgaattaacctaagttagtaaggcccaagcagcaatcattccacacaagcctgggtttaataaggtcaaaacaggaataatctcacaccaacctgagatttcttacattcctcattactgtgaatggtatagccaaccaccttgaggagcgcaagcctctcttcggcccggaaagatttaagttcgtgaatgcatacgcaagactcggaggtagttccggttccggcgtggccattttcgttggtggtgttcagttgtggcggttgctggtcagtaacagccaagatgctgcggaatctgctggctcttcgtcagattgggcagaggacgataagcactgcttcccgcaggcattttaaaaataaagttccggagaagcaaaaactgttccaggaggatgatgaaattccactgtatctaaagggtggggtagctgatgccctcctgtatagagccaccatgattcttacagttggtggaacagcatatgccatatatgagctggctgtggcttcatttcccaagaagcaggagtgacttcagtcatcccagcaatcgcttggttcagtttcattcagctctctatggaccagtaatctgataaataaccgagctcttctttggggatcaatatttattgacttgtagtaactgccaccaataaagcagtctttaccatg

SEQ ID NO: 422185 - DNA, 1708 bp, Homo sapiens
tccccttatctgttccttagtctcctttgtatattccttaatgttgggagttctttgagattatgttctgtgcctttaagttacacattctgcctgaacaatcttaagtaccttattattccattgtcttaacactgactgacttctctatcttttcttgtgccttgacatctgtcttgagctctagatttttcattattaatctcttgagaaatgaaggttaataatgaattaacctaagttagtaaggcccaagcagcaatcattccacacaagcctgggtttaataaggtcaaaacaggaataatctcacaccaacctgagatttcttacattcctcattactgtgaatggtatagccaaccaccttgaggagcgcaagcctctcttcggcccggaaagatttaagttcgtgaatgcatacgcaagactcggaggtagttccggttccggcgtggccattttcgttggtggtgttcagttgtggcggttgctggtcagtaacagccaagatgctgcggaatctgctggctcttcgtcagattgggcagaggacgataagcactgcttcccgcaggcattttaaaaataaagttccggagaagcaaaaactgttccaggaggatgatgaaattccactgtatctaaagggtggggtagctgatgccctcctgtatagagccaccatgattcttacagttggtggaacagcatatgccatatatgagctggctgtggcttcatttcccaagaagcaggagtgacttcagtcatcccagcaatcgcttggttcagtttcattcagctctctatggaccagtaatctgataaataaccgagctcttctttggggatcaatatttattgacttgtagtaactgccaccaataaagcagtctttaccatgaaaaaaaaaaaaaaaaaaaaaaaaaaaaaaaaaaaaaaaaaaaaaaaaaaaaaaaaaaaaaaaaaagggggggggcgccaaaaaaaacccccgggggggccccatggccccccttttttggtacagggggcccccaaggggggtaatataaaaacgcgaggaggcgggggcggagtattaaacacaacgcgcgcgggaggggggaacacaacgcgtgcatggcgggagactcttttgcggagaaaggagccccccatcacgtgtgcgggcggggggggaccacatgatggtcggaaccacccccctcacacaagaaatattaacggagccaggggggaaaacaaaaaaccatagggggtgtcctcggcggtctcaacccaaccgggcgtcatattgtgtggggcaagaaaaagttgggccacgcgcgatttgtctgctgccaccaactttcctccggcaggctccgccacacttataacaaaccgggagaataagaatgacaaacggaagacgagcaaatatagtagagcagaaggagaaggaggacagcacatcatcgacgaaagcacgatggagagagagtgcaacacgacagcaaacgaacaaaaacgctaagaaaaacacaacaggatgaaaagcagcacgaagtacacagcaaagccggagcaagaaataccgaaaaaacagaaggaaacgtgcgaaatcacaatgaaagatcagggccacaagagaaaagaccgtgcaggcaaaatcgatgatgccagagcgacagcacatgccacgctcgtccccacagctctc

SEQ ID NO: 422186 - DNA, 1073 bp, Homo sapiens
tccccttatctgttccttagtctcctttgtatattccttaatgttgggagttctttgagattatgttctgtgcctttaagttacacattctgcctgaacaatcttaagtaccttattattccattgtcttaacactgactgacttctctatcttttcttgtgccttgacatctgtcttgagctctagatttttcattattaatctcttgagaaatgaaggttaataatgaattaacctaagttagtaaggcccaagcagcaatcattccacacaagcctgggtttaataaggtcaaaacaggaataatctcacaccaacctgagatttcttacattcctcattactgtgaatggtatagccaaccaccttgaggagcgcaagcctctcttcggcccggaaagatttaagttcgtgaatgcatacgcaagactcggaggtagttccggttccggcgtggccattttcgttggtggtgttcagttgtggcggttgctggtcagtaacagccaagatgctgcggaatctgctggctcttcgtcagattgggcagaggacgataagcactgcttcccgcaggcattttaaaaataaagttccggagaagcaaaaactgttccaggaggatgatgaaattccactgtatctaaagggtggggtagctgatgccctcctgtatagagccaccatgattcttacagttggtggaacagcatatgccatatatgagctggctgtggcttcatttcccaagaagcaggagtgacttcagtcatcccagcaatcgcttggttcagtttcattcagctctctatggaccagtaatctgataaataaccgagctcttctttggggatcaatatttattgacttgtagtaactgccaccaataaagcagtctttaccatgaaaaaaaaaaaaaaaaaaaaaaaaaaaaaaactgtgtggtggggcgcgcccgtgggccctctggaaaagagcttttcgaagacccatgcgcgttgggggcgcgcgggggcccccaagtggggttagcgtggaaccgggcgccaagaggcgtgtcccgagaggggac

SEQ ID NO: 422187 - DNA, 2237 bp, Homo sapiens
gcaccggcgaacctgcctgggcaggcagctcgcgcaggacggggcgggaccagacagttgcgcgcacagaaggctggcgtagcaggtaaagatggcagctaccatgttccgggctacgctgcggggatggagaaccggtgtccagcggggctgcgggctacggctgttgagccagacccagggccctccagattaccccaggtttgtggagtctgtggatgaatatcagtttgtggagcgcctgttaccggctaccaggatcccagatcccccaaagcatgaacattatcctacccctagtggctggcagcctcccagagaccccccacccaacctgccttactttgtacgacgctctcggatgcacaacatccccgtctacaaggacatcacgcatggcaaccggcagatgactgtgatccggaaagtggaaggggacatctgggccctgcagaaagacgtggaagattttctgagcccgctgctggggaagacacctgtcacccaggtcaatgaggtgacaggtaccctacggatcaagggctactttgaccaggagcttaaagcctggctcttggagaaaggcttctgaggcccagccgagcagcctgcttgtcagcatgccctgtggatcaagtctagggggcctcaggaggagggaggtgggtgttggagcccctgagacaggggatacagaaactagggctaaaggactttggggtcaggccttgcttgcataaaggagaaaacaactctatgtacatgctgggggagagtgcctaatgtgggagaccaaatagggatcaccaggctaatggggggcgtcagcagctttctctccctcctatcttggcctgttcttttttgttttttgagacggagtctcactctgttgcccagggtggagtgcagtggcatgatcttggctcactgcaacttccacctctgggatcaagggattctcctgcctcagcctcttgagtagctgggattacaggcgcccaccaccacagcctgctaatttttgtatttttagtagagatggggtttcaccatgttggccaggctggtctcaaactcctgactcgaagtgatccgcccaccttggcctcccaaagcgttgggattataggcatgagccatgtgcctggtccaccttggcctgttttgtttttctttccttgggctcagcaattcaaattctagttgttatttggtggaagcagtagcccaaccccagtttaggggaaggtagcacagggcagagccactgggcactttgtttccttggccctccgaagctcactgttgcaaatacccccaagcctttgctctaggccagatcttgtttggtgcaggtgatggagaacacagatgactcgggcatgggtcttggagatcttctgttcaaagtacagtgctggcactggggcacagagtgcccacgttagccccgggctctgatagagaggtaggaggcacgttcttggtcactgttccattgcagaccagacttgctggcctgaccacaagggagtggctgggaactcacagccagcatagggacatccccctgcagccttctgacctgcaatcaaggctggggaggggtttgcaggcaggaatatgctgacctttcaccctgccatcccatcccaaccccagctcactagccttcatatatgccttatacttggagtcacaggggccaaaggcctgagaccccaccctgcccccaaactggctaagacagctttcagttcctgactccccaacttggtctctgccctgaagcagggcactgaactctgggctgcttctctgtgtgtaaaatgggcacatcttcctaatctgttaatggtcagtggtgtccccaaggatagtgctggcttccatggaaaccctcactcctggagattccattccattttcaagtgtacagccacagcaaggagcccgacactgatttgatcgattctgtgacacaaaccccaccaattgttaatgcaagtttttatttggctgtatatacaatttaagctattaaaatttgtacaatatttacaaattaaataatcatctgaaaaaaaagggggccgctaaattccgagggcagtaacggacccgttttgaaaagggccaaggaggataaaaaggacgcgcggtaacccgtggaaagccggctggcggaccccttgggcatggcccggaacggaaaaggtgaacgacggggggta

SEQ ID NO: 422188 - DNA, 2031 bp, Homo sapiens
gtgacgcgtgggtcgacccacgcgtccgggcagaagatggcagctaccatgttccgggctacgctgcggggatggagaaccggtgtccagcggggctgcgggctacggctgttgagccagacccagggccctccagattaccccaggtttgtggagtctgtggatgaatatcagtttgtggagcgcctgttaccggctaccaggatcccagatcccccaaagcatgaacattatcctacccctagtggctggcagcctcccagagaccccccacccaacctgccttactttgtacgacgctctcggatgcacaacatccccgtctacaaggacatcacgcatggcaaccggcagatgactgtgatccggaaagtggaaggggacatctgggccctgcagaaagacgtggaagattttctgagcccgctgctggggaagacacctgtcacccaggtcaatgaggtgacaggtaccctacggatcaagggctactttgaccaggagcttaaagcctggctcttggagaaaggcttctgaggcccagccgagcagcctgcttgtcagcatgccctgtggatcaagtctagggggcctcaggaggagggaggtgggtgttggagcccctgagacaggggatacagaaactagggctaaaggactttggggtcaggccttgcttgcataaaggagaaaacaactctatgtacatgctgggggagagtgcctaatgtgggagaccaaatagggatcaccaggctaatggggggcgtcagcagctttctctccctcctatcttggcctgttcttttttgttttttgagacggagtctcactctgttgcccagggtggagtgcagtggcatgatcttggctcactgcaacttccacctctgggatcaagggattctcctgcctcagcctcttgagtagctgggattacaggcgcccaccaccacagcctgctaatttttgtatttttagtagagatggggtttcaccatgttggccaggctggtctcaaactcctgactcgaagtgatccgcccaccttggcctcccaaagcgttgggattataggcatgagccatgtgcctggtccaccttggcctgttttgtttttctttccttgggctcagcaattcaaattctagttgttatttggtggaagcagtagcccaaccccagtttaggggaaggtagcacagggcagagccactgggcactttgtttccttggccctccgaagctcactgttgcaaatacccccaagcctttgctctaggccagatcttgtttggtgcaggtgatggagaacacagatgactcgggcatgggtcttggagatcttctgttcaaagtacagtgctggcactggggcacagagtgcccacgttagccccgggctctgatagagaggtaggaggcacgttcttggtcactgttccattgcagaccagacttgctggcctgaccacaagggagtggctgggaactcacagccagcatagggacatccccctgcagccttctgacctgcaatcaaggctggggaggggtttgcaggcaggaatatgctgacctttcaccctgccatcccatcccaaccccagctcactagccttcatatatgccttatacttggagtcacaggggccaaaggcctgagaccccaccctgcccccaaactggctaagacagctttcagttcctgactccccaacttggtctctgccctgaagcagggcactgaactctgggctgcttctctgtgtgtaaaatgggcacatcttcctaatctgttaatggtcagtggtgtccccaaggatagtgctggcttccatggaaaccctcactcctggagattccattccattttcaagtgtacagccacagcaaggagcccgacactgatttgatcgattctgtgacacaaaccccaccaattgttaatgcaagtttttatttggctgtatatacaatttaagctattaaaatttgtacaatatttacaaattaaataatcatctgaaa

SEQ ID NO: 422189 - DNA, 2005 bp, Homo sapiens
gcaccggcgaacctgcctgggcaggcagctcgcgcaggacggggcgggaccagacagttgcgcgcacagaaggctggcgtagcaggtaagccagacccagggccctccagattaccccaggtttgtggagtctgtggatgaatatcagtttgtggagcgcctgttaccggctaccaggatcccagatcccccaaagcatgaacattatcctacccctagtggctggcagcctcccagagaccccccacccaacctgccttactttgtacgacgctctcggatgcacaacatccccgtctacaaggacatcacgcatggcaaccggcagatgactgtgatccggaaagtggaaggggacatctgggccctgcagaaagacgtggaagattttctgagcccgctgctggggaagacacctgtcacccaggtcaatgaggtgacaggtaccctacggatcaagggctactttgaccaggagcttaaagcctggctcttggagaaaggcttctgaggcccagccgagcagcctgcttgtcagcatgccctgtggatcaagtctagggggcctcaggaggagggaggtgggtgttggagcccctgagacaggggatacagaaactagggctaaaggactttggggtcaggccttgcttgcataaaggagaaaacaactctatgtacatgctgggggagagtgcctaatgtgggagaccaaatagggatcaccaggctaatggggggcgtcagcagctttctctccctcctatcttggcctgttcttttttgttttttgagacggagtctcactctgttgcccagggtggagtgcagtggcatgatcttggctcactgcaacttccacctctgggatcaagggattctcctgcctcagcctcttgagtagctgggattacaggcgcccaccaccacagcctgctaatttttgtatttttagtagagatggggtttcaccatgttggccaggctggtctcaaactcctgactcgaagtgatccgcccaccttggcctcccaaagcgttgggattataggcatgagccatgtgcctggtccaccttggcctgttttgtttttctttccttgggctcagcaattcaaattctagttgttatttggtggaagcagtagcccaaccccagtttaggggaaggtagcacagggcagagccactgggcactttgtttccttggccctccgaagctcactgttgcaaatacccccaagcctttgctctaggccagatcttgtttggtgcaggtgatggagaacacagatgactcgggcatgggtcttggagatcttctgttcaaagtacagtgctggcactggggcacagagtgcccacgttagccccgggctctgatagagaggtaggaggcacgttcttggtcactgttccattgcagaccagacttgctggcctgaccacaagggagtggctgggaactcacagccagcatagggacatccccctgcagccttctgacctgcaatcaaggctggggaggggtttgcaggcaggaatatgctgacctttcaccctgccatcccatcccaaccccagctcactagccttcatatatgccttatacttggagtcacaggggccaaaggcctgagaccccaccctgcccccaaactggctaagacagctttcagttcctgactccccaacttggtctctgccctgaagcagggcactgaactctgggctgcttctctgtgtgtaaaatgggcacatcttcctaatctgttaatggtcagtggtgtccccaaggatagtgctggcttccatggaaaccctcactcctggagattccattccattttcaagtgtacagccacagcaaggagcccgacactgatttgatcgattctgtgacacaaaccccaccaattgttaatgcaagtttttatttggctgtatatacaatttaagctattaaaatttgtacaatatttacaaattaaataatcatctgaaa

SEQ ID NO: 422190 - DNA, 1643 bp, Homo sapiens
gcaccggcgaacctgcctgggcaggcagctcgcgcaggacggggcgggaccagacagttgcgcgcacagaaggctggcgtagcaggtaaagatggcagctaccatgttccgggctacgctgcggggatggagaaccggtgtccagcggggctgcgggctacggctgttgagccagacccagggccctccagattaccccaggtttgtggagtctgtggatgaatatcagtttgtggagcgcctgttaccggctaccaggatcccagatcccccaaagcatgaacattatcctacccctagtggctggcagcctcccagagaccccccacccaacctgccttactttgtacgacgctctcggatgcacaacatccccgtctacaaggacatcacgcatggcaaccggcagatgactgtgatccggaaagtggaaggggacatctgggccctgcagaaagacgtggaagattttctgagcccgctgctggggaagacacctgtcacccaggtcaatgaggtgacaggtaccctacggatcaagggctactttgaccaggagcttaaagcctggctcttggagaaaggcttctgaggcccagccgagcagcctgcttgtcagcatgccctgtggatcaagtctagggggcctcaggaggagggaggtgggtgttggagcccctgagacaggggatacagaaactagggctaaaggactttggggtcaggccttgcttgcataaaggagaaaacaactctatgtacatgctgggggagagtgcctaatgtgggagaccaaatagggatcaccaggctaatggggggcgtcagcagctttctctccctcctatcttggcctgttcttttttgttttttgagacggagtctcactctgttgcccagggtggagtgcagtggcatgatcttggctcactgcaacttccacctctgggatcaagggattctcctgcctcagcctcttgagtagctgggattacaggcgcccaccaccacagcctgctaatttttgtatttttagtagagatggggtttcaccatgttggccaggctggtctcaaactcctgactcgaagtgatccgcccaccttggcctcccaaagcgttgggattataggcatgagccatgtgcctggtccaccttggcctgttttgtttttctttccttgggctcagcaattcaaattctagttgttatttggtggaagcagtagcccaaccccagtttaggggaaggtagcacagggcagagccactgggcactttgtttccttggccctccgaagctcactgttgcaaatacccccaagcctttgctctaggccagatcttgtttggtgcaggtgatggagaacacagatgactcgggcatgggtcttggagatcttctgttcaaagtacagtgctggcactggggcacagagtgcccacgttagccccgggctctgatagagaggtaggaggcacgttcttggtcactgttccattgcagaccagactggggggcggagcaccagggggggggactcccacgccggtagggagaccctggaggttgacggaacaagggcgaggggaggcgaaaagggggctccaccggcggcatcgacacaggaaacaaaattgtg

SEQ ID NO: 422191 - DNA, 1935 bp, Homo sapiens
gcaccggcgaacctgcctgggcaggcagctcgcgcaggacggggcgggaccagacagttgcgcgcacagaaggctggcgtagcaggtaaagatggcagctaccatgttccgggctacgctgcggggatggagaaccggtgtccagcggggctgcgggctacggctgttgaccccccacccaacctgccttactttgtacgacgctctcggatgcacaacatccccgtctacaaggacatcacgcatggcaaccggcagatgactgtgatccggaaagtggaaggggacatctgggccctgcagaaagacgtggaagattttctgagcccgctgctggggaagacacctgtcacccaggtcaatgaggtgacaggtaccctacggatcaagggctactttgaccaggagcttaaagcctggctcttggagaaaggcttctgaggcccagccgagcagcctgcttgtcagcatgccctgtggatcaagtctagggggcctcaggaggagggaggtgggtgttggagcccctgagacaggggatacagaaactagggctaaaggactttggggtcaggccttgcttgcataaaggagaaaacaactctatgtacatgctgggggagagtgcctaatgtgggagaccaaatagggatcaccaggctaatggggggcgtcagcagctttctctccctcctatcttggcctgttcttttttgttttttgagacggagtctcactctgttgcccagggtggagtgcagtggcatgatcttggctcactgcaacttccacctctgggatcaagggattctcctgcctcagcctcttgagtagctgggattacaggcgcccaccaccacagcctgctaatttttgtatttttagtagagatggggtttcaccatgttggccaggctggtctcaaactcctgactcgaagtgatccgcccaccttggcctcccaaagcgttgggattataggcatgagccatgtgcctggtccaccttggcctgttttgtttttctttccttgggctcagcaattcaaattctagttgttatttggtggaagcagtagcccaaccccagtttaggggaaggtagcacagggcagagccactgggcactttgtttccttggccctccgaagctcactgttgcaaatacccccaagcctttgctctaggccagatcttgtttggtgcaggtgatggagaacacagatgactcgggcatgggtcttggagatcttctgttcaaagtacagtgctggcactggggcacagagtgcccacgttagccccgggctctgatagagaggtaggaggcacgttcttggtcactgttccattgcagaccagacttgctggcctgaccacaagggagtggctgggaactcacagccagcatagggacatccccctgcagccttctgacctgcaatcaaggctggggaggggtttgcaggcaggaatatgctgacctttcaccctgccatcccatcccaaccccagctcactagccttcatatatgccttatacttggagtcacaggggccaaaggcctgagaccccaccctgcccccaaactggctaagacagctttcagttcctgactccccaacttggtctctgccctgaagcagggcactgaactctgggctgcttctctgtgtgtaaaatgggcacatcttcctaatctgttaatggtcagtggtgtccccaaggatagtgctggcttccatggaaaccctcactcctggagattccattccattttcaagtgtacagccacagcaaggagcccgacactgatttgatcgattctgtgacacaaaccccaccaattgttaatgcaagtttttatttggctgtatatacaatttaagctattaaaatttgtacaatatttacaaattaaataatcatctgaaa

SEQ ID NO: 422192 - DNA, 1948 bp, Homo sapiens
cacccccctcatcccatctcacacgtaccgctagccagccgcggttgaatcggacgaggagaagatggcagctaccatgttccgggctacgctgcggggatggagaaccggtgtccagcggggctgcgggctacggctgttggtgagagcgctgagcgaggagctgagggcatcgcgtgggtaccccccacccaacctgccttactttgtacgacgctctcggatgcacaacatccccgtctacaaggacatcacgcatggcaaccggcagatgactgtgatccggaaagtggaaggggacatctgggccctgcagaaagacgtggaagattttctgagcccgctgctggggaagacacctgtcacccaggtcaatgaggtgacaggtaccctacggatcaagggctactttgaccaggagcttaaagcctggctcttggagaaaggcttctgaggcccagccgagcagcctgcttgtcagcatgccctgtggatcaagtctagggggcctcaggaggagggaggtgggtgttggagcccctgagacaggggatacagaaactagggctaaaggactttggggtcaggccttgcttgcataaaggagaaaacaactctatgtacatgctgggggagagtgcctaatgtgggagaccaaatagggatcaccaggctaatggggggcgtcagcagctttctctccctcctatcttggcctgttcttttttgttttttgagacggagtctcactctgttgcccagggtggagtgcagtggcatgatcttggctcactgcaacttccacctctgggatcaagggattctcctgcctcagcctcttgagtagctgggattacaggcgcccaccaccacagcctgctaatttttgtatttttagtagagatggggtttcaccatgttggccaggctggtctcaaactcctgactcgaagtgatccgcccaccttggcctcccaaagcgttgggattataggcatgagccatgtgcctggtccaccttggcctgttttgtttttctttccttgggctcagcaattcaaattctagttgttatttggtggaagcagtagcccaaccccagtttaggggaaggtagcacagggcagagccactgggcactttgtttccttggccctccgaagctcactgttgcaaatacccccaagcctttgctctaggccagatcttgtttggtgcaggtgatggagaacacagatgactcgggcatgggtcttggagatcttctgttcaaagtacagtgctggcactggggcacagagtgcccacgttagccccgggctctgatagagaggtaggaggcacgttcttggtcactgttccattgcagaccagacttgctggcctgaccacaagggagtggctgggaactcacagccagcatagggacatccccctgcagccttctgacctgcaatcaaggctggggaggggtttgcaggcaggaatatgctgacctttcaccctgccatcccatcccaaccccagctcactagccttcatatatgccttatacttggagtcacaggggccaaaggcctgagaccccaccctgcccccaaactggctaagacagctttcagttcctgactccccaacttggtctctgccctgaagcagggcactgaactctgggctgcttctctgtgtgtaaaatgggcacatcttcctaatctgttaatggtcagtggtgtccccaaggatagtgctggcttccatggaaaccctcactcctggagattccattccattttcaagtgtacagccacagcaaggagcccgacactgatttgatcgattctgtgacacaaaccccaccaattgttaatgcaagtttttatttggctgtatatacaatttaagctattaaaatttgtacaatatttacaaattaaataatcatctgaaa

SEQ ID NO: 422193 - DNA, 1090 bp, Homo sapiens
gcaccggcgaacctgcctgggcaggcagctcgcgcaggacggggcgggaccagacagttgcgcgcacagaaggctggcgtagcaggtaaagatggcagctaccatgttccgggctacgctgcggggatggagaaccggtgtccagcggggctgcgggctacggctgttgagccagacccagggccctccagattaccccaggtttgtggagtctgtggatgaatatcagtttgtggagcgcctgttaccggctaccaggatcccagatcccccaaagcatgaacattatcctacccctagtggctggcagcctcccagagaccccccacccaacctgccttactttgtacgacgctctcggatgcacaacatccccgtctacaaggacatcacgcatggcaaccggcagatgactgtgatccggaaagtggaaggggacatctgggccctgcagaaagacgtggaagattttctgagcccgctgctggggaagacacctgtcacccaggtcaatgaggtgacaggtaccctacggatcaagggctactttgaccaggagcttaaagcctggctcttggagaaaggcttctgaggcccagccgagcagcctgcttgtcagcatgccctgtggatcaagtctagggggcctcaggaggagggaggtgggtgttggagcccctgagacaggggatacagaaactagggctaaaggactttggggtcaggccttgcttgcataaaggagaaaacaactctatgtacatgctgggggagagtgcctaatgtgggagaccaaatagggatcaccaggctaatggggggcgtcagcagctttctctccctcctatcttggcctgttcttttttgttttttgagacggagtctcactctgttgcccagggtggagtgcagtggcatgatcttggctcactgcaacttccacctctgggatcaagggattctcctgcctcagcctactcagaaggctaaggcaggaagatcgcttgagcccaagagtttgaggctgtagtatgctgtgagtgcgcctatgagtgccaactgggcaacacagtgagacccctgtctaaaa

SEQ ID NO: 422194 - DNA, 823 bp, Homo sapiens
gcaccggcgaacctgcctgggcaggcagctcgcgcaggacggggcgggaccagacagttgcgcgcacagaaggctggcgtagcaggtaaagatggcagctaccatgttccgggctacgctgcggggatggagaaccggtgtccagcggggctgcgggctacggctgttgagccagacccagggccctccagattaccccaggtttgtggagtctgtggatgaatatcagtttgtggagcgcctgttaccggctaccaggatcccagatcccccaaagcatgaacattatcctacccctagtggctggcagcctcccagagaccccccacccaacctgccttactttgtacgacgctctcggatgcacaacatccccgtctacaaggacatcacgcatggcaaccggcagatgactgtgatccggaaagtggaaggggacatctgggccctgcagaaagacgtggaagattttctgagcccgctgctggggaagacacctgtcacccaggtcaatgaggtgacaggtaccctacggatcaagggctactttgaccaggagcttaaagcctggctcttggagaaaggcttctgaggcccagccgagcagcctgcttgtcagcatgccctgtggatcaagtctagggggcctcaggaggagggaggtgggtgttggagcccctgagacaggggatacagaaactagggctaaaggacctgtgacacaaaccccaccaattgttaatgcaagtttttatttggctgtatatacaatttaagctattaaaatttgtacaatatttacaaattaaataatcatctgaaa

SEQ ID NO: 422195 - DNA, 2086 bp, Homo sapiens
gcaccggcgaacctgcctgggcaggcagctcgcgcaggacggggcgggaccagacagttgcgcgcacagaaggctggcgtagcaggtaaagatggcagctaccatgttccgggctacgctgcggggatggagaaccggtgtccagcggggctgcgggctacggctgttgagccagacccagggccctccagattaccccaggtttgtggagtctgtggatgaatatcagtttgtggagcgcctgttaccggctaccaggatcccagatcccccaaagcatgaacattatcctacccctagtggctggcagcctcccagagaccccccacccaacctgccttactttgtacgacgctctcggatgcacaacatccccgtctacaaggacatcacgcatggcaaccggcagatgactgtgatccggaaagtggaaggggacatctgggccctgcagaaagacgtggaagattttctgagcccgctgctggggaagacacctgtcacccaggtcaatgaggtgacaggtaccctacggatcaagggctactttgaccaggagcttaaagcctggctcttggagaaaggcttctgaggcccagccgagcagcctgcttgtcagcatgccctgtggatcaagtctagggggcctcaggaggagggaggtgggtgttggagcccctgagacaggggatacagaaactagggctaaaggactttggggtcaggccttgcttgcataaaggagaaaacaactctatgtacatgctgggggagagtgcctaatgtgggagaccaaatagggatcaccaggctaatggggggcgtcagcagctttctctccctcctatcttggcctgttcttttttgttttttgagacggagtctcactctgttgcccagggtggagtgcagtggcatgatcttggctcactgcaacttccacctctgggatcaagggattctcctgcctcagcctcttgagtagctgggattacaggcgcccaccaccacagcctgctaatttttgtatttttagtagagatggggtttcaccatgttggccaggctggtctcaaactcctgactcgaagtgatccgcccaccttggcctcccaaagcgttgggattataggcatgagccatgtgcctggtccaccttggcctgttttgtttttctttccttgggctcagcaattcaaattctagttgttatttggtggaagcagtagcccaaccccagtttaggggaaggtagcacagggcagagccactgggcactttgtttccttggccctccgaagctcactgttgcaaatacccccaagcctttgctctaggccagatcttgtttggtgcaggtgatggagaacacagatgactcgggcatgggtcttggagatcttctgttcaaagtacagtgctggcactggggcacagagtgcccacgttagccccgggctctgatagagaggtaggaggcacgttcttggtcactgttccattgcagaccagacttgctggcctgaccacaagggagtggctgggaactcacagccagcatagggacatccccctgcagccttctgacctgcaatcaaggctggggaggggtttgcaggcaggaatatgctgacctttcaccctgccatcccatcccaaccccagctcactagccttcatatatgccttatacttggagtcacaggggccaaaggcctgagaccccaccctgcccccaaactggctaagacagctttcagttcctgactccccaacttggtctctgccctgaagcagggcactgaactctgggctgcttctctgtgtgtaaaatgggcacatcttcctaatctgttaatggtcagtggtgtccccaaggatagtgctggcttccatggaaaccctcactcctggagattccattccattttcaagtgtacagccacagcaaggagcccgacactgatttgatcgattctgtgacacaaaccccaccaattgttaatgcaagtttttatttggctgtatatacaatttaagctattaaaatttgtacaatatttacaaattaaataatcatctgaaa

SEQ ID NO: 422196 - DNA, 2059 bp, Homo sapiens
cacccccctcatcccatctcacacgtaccgctagccagccgcggttgaatcggacgaggagaagatggcagctaccatgttccgggctacgctgcggggatggagaaccggtgtccagcggggctgcgggctacggctgttgagccagacccagggccctccagattaccccaggtttgtggagtctgtggatgaatatcagtttgtggagcgcctgttaccggctaccaggatcccagatcccccaaagcatgaacattatcctacccctagtggctggcagcctcccagagaccccccacccaacctgccttactttgtacgacgctctcggatgcacaacatccccgtctacaaggacatcacgcatggcaaccggcagatgactgtgatccggaaagtggaaggggacatctgggccctgcagaaagacgtggaagattttctgagcccgctgctggggaagacacctgtcacccaggtcaatgaggtgacaggtaccctacggatcaagggctactttgaccaggagcttaaagcctggctcttggagaaaggcttctgaggcccagccgagcagcctgcttgtcagcatgccctgtggatcaagtctagggggcctcaggaggagggaggtgggtgttggagcccctgagacaggggatacagaaactagggctaaaggactttggggtcaggccttgcttgcataaaggagaaaacaactctatgtacatgctgggggagagtgcctaatgtgggagaccaaatagggatcaccaggctaatggggggcgtcagcagctttctctccctcctatcttggcctgttcttttttgttttttgagacggagtctcactctgttgcccagggtggagtgcagtggcatgatcttggctcactgcaacttccacctctgggatcaagggattctcctgcctcagcctcttgagtagctgggattacaggcgcccaccaccacagcctgctaatttttgtatttttagtagagatggggtttcaccatgttggccaggctggtctcaaactcctgactcgaagtgatccgcccaccttggcctcccaaagcgttgggattataggcatgagccatgtgcctggtccaccttggcctgttttgtttttctttccttgggctcagcaattcaaattctagttgttatttggtggaagcagtagcccaaccccagtttaggggaaggtagcacagggcagagccactgggcactttgtttccttggccctccgaagctcactgttgcaaatacccccaagcctttgctctaggccagatcttgtttggtgcaggtgatggagaacacagatgactcgggcatgggtcttggagatcttctgttcaaagtacagtgctggcactggggcacagagtgcccacgttagccccgggctctgatagagaggtaggaggcacgttcttggtcactgttccattgcagaccagacttgctggcctgaccacaagggagtggctgggaactcacagccagcatagggacatccccctgcagccttctgacctgcaatcaaggctggggaggggtttgcaggcaggaatatgctgacctttcaccctgccatcccatcccaaccccagctcactagccttcatatatgccttatacttggagtcacaggggccaaaggcctgagaccccaccctgcccccaaactggctaagacagctttcagttcctgactccccaacttggtctctgccctgaagcagggcactgaactctgggctgcttctctgtgtgtaaaatgggcacatcttcctaatctgttaatggtcagtggtgtccccaaggatagtgctggcttccatggaaaccctcactcctggagattccattccattttcaagtgtacagccacagcaaggagcccgacactgatttgatcgattctgtgacacaaaccccaccaattgttaatgcaagtttttatttggctgtatatacaatttaagctattaaaatttgtacaatatttacaaattaaataatcatctgaaa

SEQ ID NO: 422197 - DNA, 2568 bp, Homo sapiens
gcaccggcgaacctgcctgggcaggcagctcgcgcaggacggggcgggaccagacagttgcgcgcacagaaggctggcgtagcaggtaaagatggcagctaccatgttccgggctacgctgcggggatggagaaccggtgtccagcggggctgcgggctacggctgttgagccagacccagggccctccagattaccccaggtttgtggagtctgtggatgaatatcagtttgtggagcgcctgttaccggctaccaggatcccagatcccccaaagcatgaacattatcctacccctagtggctggcagcctcccagagaccccccacccaacctgccttactttgtacgacgctctcggatgcacaacatccccgtctacaaggacatcacgcatggcaaccggcagatgactgtgatccggaaagtggaaggggacatctgggccctgcagaaagacgtggaagattttctgagcccgctgctggggaagacacctgtcacccaggtcaatgaggtgacaggtaccctacggatcaagggctactttgaccaggagcttaaagcctggctcttggagaaaggcttctgaggcccagccgagcagcctgcttgtcagcatgccctgtggatcaagtctagggggcctcaggaggagggaggtgggtgttggagcccctgagacaggggatacagaaactagggctaaaggactttggggtcaggccttgcttgcataaaggagaaaacaactctatgtacatgctgggggagagtgcctaatgtgggagaccaaatagggatcaccaggctaatggggggcgtcagcagctttctctccctcctatcttggcctgttcttttttgttttttgagacggagtctcactctgttgcccagggtggagtgcagtggcatgatcttggctcactgcaacttccacctctgggatcaagggattctcctgcctcagcctcttgagtagctgggattacaggcgcccaccaccacagcctgctaatttttgtatttttagtagagatggggtttcaccatgttggccaggctggtctcaaactcctgactcgaagtgatccgcccaccttggcctcccaaagcgttgggattataggcatgagccatgtgcctggtccaccttggcctgttttgtttttctttccttgggctcagcaattcaaattctagttgttatttggtggaagcagtagcccaaccccagtttaggggaaggtagcacagggcagagccactgggcactttgtttccttggccctccgaagctcactgttgcaaatacccccaagcctttgctctaggccagatcttgtttggtgcaggtgatggagaacacagatgactcgggcatgggtcttggagatcttctgttcaaagtacagtgctggcactggggcacagagtgcccacgttagccccgggctctgatagagaggtaggaggcacgttcttggtcactgttccattgcagaccagacttgctggcctgaccacaagggagtggctgggaactcacagccagcatagggacatccccctgcagccttctgacctgcaatcaaggctggggaggggtttgcaggcaggaatatgctgacctttcaccctgccatcccatcccaaccccagctcactagccttcatatatgccttatacttggagtcacaggggccaaaggcctgagaccccaccctgcccccaaactggctaagacagctttcagttcctgactccccaacttggtctctgccctgaagcagggcactgaactctgggctgcttctctgtgtgtaaaatgggcacatcttcctaatctgttaatggtcagtggtgtccccaaggatagtgctggcttccatggaaaccctcactcctggagattccattccattttcaagtgtacagccacagcaaggagcccgacactgatttgatcgattctgtgacacaaaccccaccaattgttaatgcaagtttttatttggctgtatatacaatttaagctattaaaatttgtacaatatttacaaattaaataatcatctgaaactgtctccaacaactcttgtaacacaaaaccaaggggaaaagacaggggcaggcaggtcccagctcctgtggtccctccttggcacagagccttttctaaactggaaagaccaggagtctggcactcctgttcctctttcccgggattaagcattcaacttcaaaagacaaaatttaagccaaaagacactagtaaggaagtaattccaattctaaacttcagaagttctgccagttgagaagtggccttccttgggcgctgggattgcagtggtcaggagcaggcgcactggcccttgcctggagtgcggctgggcagtggctgctgggtgagacaggtcagtctcacttgagaagctgcagaggaaaggggcctggggggaggggcggggcagggtccctcagtgctgcccgcctgcacccccactcccaggcattcctttccctgagttgtgtggttgccagtaagacgcagaaatgcc

SEQ ID NO: 422198 - DNA, 1854 bp, Homo sapiens
gcaccggcgaacctgcctgggcaggcagctcgcgcaggacggggcgggaccagacagttgcgcgcacagaaggctggcgtagcaggtaaccccccacccaacctgccttactttgtacgacgctctcggatgcacaacatccccgtctacaaggacatcacgcatggcaaccggcagatgactgtgatccggaaagtggaaggggacatctgggccctgcagaaagacgtggaagattttctgagcccgctgctggggaagacacctgtcacccaggtcaatgaggtgacaggtaccctacggatcaagggctactttgaccaggagcttaaagcctggctcttggagaaaggcttctgaggcccagccgagcagcctgcttgtcagcatgccctgtggatcaagtctagggggcctcaggaggagggaggtgggtgttggagcccctgagacaggggatacagaaactagggctaaaggactttggggtcaggccttgcttgcataaaggagaaaacaactctatgtacatgctgggggagagtgcctaatgtgggagaccaaatagggatcaccaggctaatggggggcgtcagcagctttctctccctcctatcttggcctgttcttttttgttttttgagacggagtctcactctgttgcccagggtggagtgcagtggcatgatcttggctcactgcaacttccacctctgggatcaagggattctcctgcctcagcctcttgagtagctgggattacaggcgcccaccaccacagcctgctaatttttgtatttttagtagagatggggtttcaccatgttggccaggctggtctcaaactcctgactcgaagtgatccgcccaccttggcctcccaaagcgttgggattataggcatgagccatgtgcctggtccaccttggcctgttttgtttttctttccttgggctcagcaattcaaattctagttgttatttggtggaagcagtagcccaaccccagtttaggggaaggtagcacagggcagagccactgggcactttgtttccttggccctccgaagctcactgttgcaaatacccccaagcctttgctctaggccagatcttgtttggtgcaggtgatggagaacacagatgactcgggcatgggtcttggagatcttctgttcaaagtacagtgctggcactggggcacagagtgcccacgttagccccgggctctgatagagaggtaggaggcacgttcttggtcactgttccattgcagaccagacttgctggcctgaccacaagggagtggctgggaactcacagccagcatagggacatccccctgcagccttctgacctgcaatcaaggctggggaggggtttgcaggcaggaatatgctgacctttcaccctgccatcccatcccaaccccagctcactagccttcatatatgccttatacttggagtcacaggggccaaaggcctgagaccccaccctgcccccaaactggctaagacagctttcagttcctgactccccaacttggtctctgccctgaagcagggcactgaactctgggctgcttctctgtgtgtaaaatgggcacatcttcctaatctgttaatggtcagtggtgtccccaaggatagtgctggcttccatggaaaccctcactcctggagattccattccattttcaagtgtacagccacagcaaggagcccgacactgatttgatcgattctgtgacacaaaccccaccaattgttaatgcaagtttttatttggctgtatatacaatttaagctattaaaatttgtacaatatttacaaattaaataatcatctgaaa

SEQ ID NO: 422199 - DNA, 1061 bp, Homo sapiens
  misc_feature (977)..(977): n is a, c, g, or t
  misc_feature (980)..(980): n is a, c, g, or t
  misc_feature (986)..(986): n is a, c, g, or t
  misc_feature (990)..(990): n is a, c, g, or t
gcaccggcgaacctgcctgggcaggcagctcgcgcaggacggggcgggaccagacagttgcgcgcacagaaggctggcgtagcaggtaaagatggcagctaccatgttccgggctacgctgcggggatggagaaccggtgtccagcggggctgcgggctacggctgttgagccagacccagggccctccagattaccccaggtttgtggagtctgtggatgaatatcagtttgtggagcgcctgttaccggctaccaggatcccagatcccccaaagcatgaacattatcctacccctagtggctggcagcctcccagagaccccccacccaacctgccttactttgtacgacgctctcggatgcacaacatccccgtctacaaggacatcacgcatggcaaccggcagatgactgtgatccggaaagtggaaggggacatctgggccctgcagaaagacgtggaagattttctgagcccgctgctggggaagacacctgtcacccaggtcaatgaggtgacaggtaccctacggatcaagggctactttgaccaggagcttaaagcctggctcttggagaaaggcttctgaggcccagccgagcagcctgcttgtcagcatgccctgtggatcaagtctagggggcctcaggaggagggaggtgggtgttggagcccctgagacaggggatacagaaactagggctaaaggactttggggtcaggccttgcttgcataaaggagaaaacaactctatgtacatgctgggggagagtgcctaatgtgggagaccaaatagggatcaccaggctaatggggggcgtcagcagctttctctccctcctatcttggcctgttcttttttgttttttgagacggagtctcactctgttgcccagggtggagtgcagtggcatgatcttggctcactgcaacttccacctctgggatcaagggattctcctgcctcagccgntangggttncggncccccaagcgtatttggtttgaagaggggccaaatggacggggaatcgctgagtgcccctgttccctggtg

SEQ ID NO: 422200 - DNA, 1035 bp, Homo sapiens
gcaccggcgaacctgcctgggcaggcagctcgcgcaggacggggcgggaccagacagttgcgcgcacagaaggctggcgtagcaggtaaagatggcagctaccatgttccgggctacgctgcggggatggagaaccggtgtccagcggggctgcgggctacggctgttgagccagacccagggccctccagattaccccaggtttgtggagtctgtggatgaatatcagtttgtggagcgcctgttaccggctaccaggatcccagatcccccaaagcatgaacattatcctacccctagtggctggcagcctcccagagaccccccacccaacctgccttactttgtacgacgctctcggatgcacaacatccccgtctacaaggacatcacgcatggcaaccggcagatgactgtgatccggaaagtggaaggggacatctgggccctgcagaaagacgtggaagattttctgagcccgctgctggggaagacacctgtcacccaggtcaatgaggtgacaggtaccctacggatcaagggctactttgaccaggagcttaaagcctggctcttggagaaaggcttctgaggcccagccgagcagcctgcttgtcagcatgccctgtggatcaagtctagggggcctcaggaggagggaggtgggtgttggagcccctgagacaggggatacagaaactagggctaaaggactttggggtcaggccttgcttgcataaaggagaaaacaactctatgtacatgctgggggagagtgcctaatgtgggagaccaaatagggatcaccaggctaatggggggccgagtttctcctctaactggcggtcttggttgaagagccactcgtgccgtgcgggcggatgttggccaacggatcacctggacaggtttctggcaagctgagagggggatgaggcccaaatgcatgtttgtaaaagggcacggcgggcaccaccagggccggccacgatgacaacagggtggcaaatggaccgagcggctccaccgaggcag

SEQ ID NO: 422201 - DNA, 658 bp, Homo sapiens
cacccccctcatcccatctcacacgtaccgctagccagccgcggttgaatcggacgaggagaagatggcagctaccatgttccgggctacgctgcggggatggagaaccggtgtccagcggggctgcgggctacggctgttgagccagacccagggccctccagattaccccaggtttgtggagtctgtggatgaatatcagtttgtggagcgcctgttaccggctaccaggatcccagatcccccaaagcatgaacattatcctacccctagtggctggcagcctcccagagaccccaccctgcccccaaactggctaagacagctttcagttcctgactccccaacttggtctctgccctgaagcagggcactgaactctgggctgcttctctgtgtgtaaaatgggcacatcttcctaatctgttaatggtcagtggtgtccccaaggatagtgctggcttccatggaaaccctcactcctggagattccattccattttcaagtgtacagccacagcaaggagcccgacactgatttgatcgattctgtgacacaaaccccaccaattgttaatgcaagtttttatttggctgtatatacaatttaagctattaaaatttgtacaatatttacaaattaaataatcatctgaaa

SEQ ID NO: 422202 - DNA, 462 bp, Homo sapiens
taaagtattattaaaatataaaggaccaaatagtgatccttgtagaacttgagggattctgagaaatagttgaaatgacactgtctcagggttaggtagactggagagcccaacgctgatgaggcagaggaatgtgtgcagccactgctatcctgggtcagcaaaatgagggtacatgatatataaagatgacctcccaagaaggacaagtctgtaagacaaaggcccaagagatccccacctgtcctcaggaatgctgtgataccaacacctaccttcaaggcctcactcatccctcggccaatcacaagagtctgtacacccttctcaacaacttccttcacatctgcaggctgcacaccaggagaatgctggatgtggaaagagaaagtagacagatggagtctcactctctcacccagagctcacattctagtaaaatgaaacaagaggccactgact

SEQ ID NO: 422203 - DNA, 205 bp, Homo sapiens
ctcagttcctgtttctctccaatcccaagtccgactaccccctggccatactttgcagtccttataggttgtattagagccttttactttcatttgcccccatgataaggaagcaatttcaggggaagtcataaggaacttcactgaagtccaccgaactgtctcctcaaagttgcgttcccaaacggcgcagtgctctgcccgc

SEQ ID NO: 422204 - DNA, 1009 bp, Homo sapiens
ggtttttgtgaacactttgtagagagtagaggattgagaaatttcagaaagctgttttaggcatcccttgtgccatttaagtggatatagtcattttacaattaacatatttctctggagtagaagaaaggctacaatgggagtgattgaggaagataatccactatcaacagtacatatggtagatgtatattagatcagggaggatgtgagaggtgatagaaggctcaagaatgaaccccaggaaacaccaacaatgaaagggcaaggaaaatcaccatgaaagatactgaagaggagcgaagtggtgggaggaacaccaggaggtagtggaatcacagaaactttgagtttgggaagtagggagcttgggggaatgatcaacagtaacatgctttagagatgtcaaggaggattaagattgtaaaactgggtttgatatccttagtaaaagcagtttcattgcagtacaagactataaataagtaccaaatgaatgggaaaagtgacagcgagtgtccgctacgagtaagcttaggtgggaaggggaaaacagcaaaagctagaagggttggagcagggatgttatgttgtgtgagtgcacacatgcccttgtattcgagttatgaggcacttgagagtgtggttaagatcctgagctctggagtcagacttcccaaattccagtctggactctgccacttgcagctttgtggccttagataagttacttagcttcagtgactcagttttcccatggctaaaatgggaatgatcaagttttgagaattaaatgctagtgcatgttaggtgctataaatagcatataataactgctgaaaagtgtaaactattattgtaattattagtaagaaaatgtttaattattaattttttatcattgacctttaaatatacttgcttcagttatattttaaactttaaattattaacaatttgggccccatgctgtgtagcaggaggaactactgttataccacttaaattt

SEQ ID NO: 422205 - DNA, 3731 bp, Homo sapiens
gcttctaaagtgaagattcagttttcacttaaacaaccagcaagtcttgaagtctcttcccaagcaaatgggagcttctttggaccttggagcacacagaggattctactttctttaaaactttgttttcaggcaatttccctgagaaccgtttacttccagaagattggtggagcttgatctgaaggctggccatgaaatctcaaggtcaacattggtattccagttcagataaaaactgtaaagtgagctttcgtgagaagcttctgattattgattcaaacctgggggtccaagatgtggagaacctcaagtttctctgcataggattggtccccaacaagaagctggagaagtccagctcagcctcagatgtttttgaacatctcttggcagaggatctgctgagtgaggaagaccctttcttcctggcagaactcctctatatcatacggcagaagaagctgctgcagcacctcaactgtaccaaagaggaagtggagcgactgctgcccacccgacaaagggtttctctgtttagaaacctgctctacgaactgtcagaaggcattgactcagagaacttaaaggacatgatcttccttctgaaagactcgcttcccaaaactgaaatgacctccctaagtttcctggcatttctagagaaacaaggtaaaatagatgaagataatctgacatgcctggaggacctctgcaaaacagttgtacctaaacttttgagaaacatagagaaatacaaaagagagaaagctatccagatagtgacacctcctgtagacaaggaagccgagtcgtatcaaggagaggaagaactagtttcccaaacagatgttaagacattcttggaagccttaccgagggcagctgtgtacaggatgaatcggaaccacagaggcctctgtgtcattgtcaacaaccacagctttacctccctgaaggacagacaaggaacccataaagatgctgagatcctgagtcatgtgttccagtggcttgggttcacagtgcatatacacaataatgtgacgaaagtggaaatggagatggtcctgcagaagcagaagtgcaatccagcccatgccgacggggactgcttcgtgttctgtattctgacccatgggagatttggagctgtctactcttcggatgaggccctcattcccattcgggagatcatgtctcacttcacagccctgcagtgccctagactggctgaaaaacctaaactctttttcatccaggcctgccaaggtgaagagatacagccttccgtatccatcgaagcagatgctctgaaccctgagcaggcacccacttccctgcaggacagtattcctgccgaggctgacttcctacttggtctggccactgtcccaggctatgtatcctttcggcatgtggaggaaggcagctggtatattcagtctctgtgtaatcatctgaagaaattggtcccaagacatgaagacatcttatccatcctcactgctgtcaacgatgatgtgagtcgaagagtggacaaacagggaacaaagaaacagatgccccagcctgctttcacactaaggaaaaaactagtattccctgtgcccctggatgcactttcaatatagcagagagtttttgttggttcttagacctcaaacgaatcattgggtataacctccagcctcctgcccagcacaggaatcggtggtctccacctgtcattctagaaacaggaaacaccgtgttttctgacacagtcaattctgattttctttttcttttgcaagtctaaatgttagaaaactttctttttttggagatagtctcattctgtcacccagactggagtgcaggggggcaatcacggctcactgtagtctcgacctcccaggctcaagctgtcctcccacctcagcctcccaagtagctgagactacaggtgtgtgtccatgcacagctaactttttattttttttgtggagatggggtttcactatgttgcctaagctggtctcaaactcctgggctcaagcgatcctcccacctcagcttctcaaagttctgggactacaggcatgaaatactgtgcctggcctggggaccaggtgcattttaaggttccttggtgttcaaaaaccacgttcttagcctagattgagcttagattgcctctctagacaactaccccttagttataattctgtgtcccctctgcatgcccttaaacattggacagtgaggtcacagtccacccaccctctctctgatctcccccttcctaagacttctcttttgcacatctagtgaggtgaaaatttggtctatgccaggcccatttcctgcttttgtgtaaggaaggtgctcacataggaagtttttatttggttagagacaggtttccctgtaggaagatgatggctcatttacactcagctgctctgcaagcagaaactttacaacctgatgtcatattccattttggactgggtgcggtgactcatgcctgtaatcccagtactctgggaagccaaggcaggcagatcacttgaggtcaggagttcgagaccagcctggccaatacggcaaaacctcatcattactaaaaacacaaaaattagccaggtgtggcggcgagcacctgtaatcccagctactcgggaggctgagacaggagaatctcttgaatccaggaggcagaggctgtggtgagccaagatgacacaactgcactccagcttgggcaacagggcgagaccttgtttaaaaaaaaaattcaatattggggttggaacatttcagttgccattgacagaacacccaattcaaattgactgaagcaaagaagggaatttattgcctctttcacattgaaacccaggagtggataacactggcttcaggcaaagcttgaatcaggactcaatctacaggccagcacctttctcttggccggatgtcctcagggctggcagatgcagtagactgcagtggacagtccccaccttgttactgctactacactttgctcctctggcccaaggcatgaggagagaggctgtgtcagaaactgaagctgttctcaggatcactgggctcttcttggcagaggggatgtctggcttgcctgaagggagtggctctgtaaggacgccttgatgctttcttcattaagattttgagcatttttacgtacttgagcttttttttttttttttttcaatttctagaggaactttttctctgttaattcctggaactgtattttgaatccttaaaggtgagccctcatagggagatccaaagtcctgtggttaacgccttcatttatagatgaggcagctgaggcctggggatgtgaacaacctgctcacagtcctcatttactggatttgacttcagccaggtgaactggaatgccttggggcgtggaagggcattaggagtgtttcatttgatatgtgaatgctcataaaaaaatgtcaaggaatgaagaacaacaactctcagtggtgcctgcatttataattatttatgtgaaagtcaaattcatgtacagtaaatttgttataagaatattcacaagaacactgttctgatatctctgattgtcatgtggatttgaatgtagcttgacagagggaatgtctaatctatattgacagggcaggaacaccgtcatcttagacaaacaccgccactttaagttccagttccctttctag

SEQ ID NO: 422206 - DNA, 3860 bp, Homo sapiens
gcttctaaagtgaagattcagttttcacttaaacaaccagcaagtcttgaagtctcttcccaagcaaatgggagcttctttggaccttggagcacacagaggattctactttctttaaaactttgttttcaggcaatttccctgagaaccgtttacttccagaagattggtggagcttgatctgaaggctggccatgaaatctcaaggtcaacattggtattccagttcagataaaaactgtaaagtgagctttcgtgagaagcttctgattattgattcaaacctgggggtccaagatgtggagaacctcaagtttctctgcataggattggtccccaacaagaagctggagaagtccagctcagcctcagatgtttttgaacatctcttggcagaggatctgctgagtgaggaagaccctttcttcctggcagaactcctctatatcatacggcagaagaagctgctgcagcacctcaactgtaccaaagaggaagtggagcgactgctgcccacccgacaaagggtttctctgtttagaaacctgctctacgaactgtcagaaggcattgactcagagaacttaaaggacatgatcttccttctgaaagactcgcttcccaaaactgaaatgacctccctaagtttcctggcatttctagagaaacaaggtaaaatagatgaagataatctgacatgcctggaggacctctgcaaaacagttgtacctaaacttttgagaaacatagagaaatacaaaagagagaaagctatccagatagtgacacctcctgtagacaaggaagccgagtcgtatcaaggagaggaagaactagtttcccaaacagatgttaagacattcttggaagccttaccgcaggagtcctggcaaaataagcatgcaggtagtaatggtaacagagccacaaatggtgcaccaagcctggtctccagggggatgcaaggagcatctgctaacactctaaactctgaaaccagcacaaagagggcagctgtgtacaggatgaatcggaaccacagaggcctctgtgtcattgtcaacaaccacagctttacctccctgaaggacagacaaggaacccataaagatgctgagatcctgagtcatgtgttccagtggcttgggttcacagtgcatatacacaataatgtgacgaaagtggaaatggagatggtcctgcagaagcagaagtgcaatccagcccatgccgacggggactgcttcgtgttctgtattctgacccatgggagatttggagctgtctactcttcggatgaggccctcattcccattcgggagatcatgtctcacttcacagccctgcagtgccctagactggctgaaaaacctaaactctttttcatccaggcctgccaaggtgaagagatacagccttccgtatccatcgaagcagatgctctgaaccctgagcaggcacccacttccctgcaggacagtattcctgccgaggctgacttcctacttggtctggccactgtcccaggctatgtatcctttcggcatgtggaggaaggcagctggtatattcagtctctgtgtaatcatctgaagaaattggtcccaagacatgaagacatcttatccatcctcactgctgtcaacgatgatgtgagtcgaagagtggacaaacagggaacaaagaaacagatgccccagcctgctttcacactaaggaaaaaactagtattccctgtgcccctggatgcactttcaatatagcagagagtttttgttggttcttagacctcaaacgaatcattgggtataacctccagcctcctgcccagcacaggaatcggtggtctccacctgtcattctagaaacaggaaacaccgtgttttctgacacagtcaattctgattttctttttcttttgcaagtctaaatgttagaaaactttctttttttggagatagtctcattctgtcacccagactggagtgcaggggggcaatcacggctcactgtagtctcgacctcccaggctcaagctgtcctcccacctcagcctcccaagtagctgagactacaggtgtgtgtccatgcacagctaactttttattttttttgtggagatggggtttcactatgttgcctaagctggtctcaaactcctgggctcaagcgatcctcccacctcagcttctcaaagttctgggactacaggcatgaaatactgtgcctggcctggggaccaggtgcattttaaggttccttggtgttcaaaaaccacgttcttagcctagattgagcttagattgcctctctagacaactaccccttagttataattctgtgtcccctctgcatgcccttaaacattggacagtgaggtcacagtccacccaccctctctctgatctcccccttcctaagacttctcttttgcacatctagtgaggtgaaaatttggtctatgccaggcccatttcctgcttttgtgtaaggaaggtgctcacataggaagtttttatttggttagagacaggtttccctgtaggaagatgatggctcatttacactcagctgctctgcaagcagaaactttacaacctgatgtcatattccattttggactgggtgcggtgactcatgcctgtaatcccagtactctgggaagccaaggcaggcagatcacttgaggtcaggagttcgagaccagcctggccaatacggcaaaacctcatcattactaaaaacacaaaaattagccaggtgtggcggcgagcacctgtaatcccagctactcgggaggctgagacaggagaatctcttgaatccaggaggcagaggctgtggtgagccaagatgacacaactgcactccagcttgggcaacagggcgagaccttgtttaaaaaaaaaattcaatattggggttggaacatttcagttgccattgacagaacacccaattcaaattgactgaagcaaagaagggaatttattgcctctttcacattgaaacccaggagtggataacactggcttcaggcaaagcttgaatcaggactcaatctacaggccagcacctttctcttggccggatgtcctcagggctggcagatgcagtagactgcagtggacagtccccaccttgttactgctactacactttgctcctctggcccaaggcatgaggagagaggctgtgtcagaaactgaagctgttctcaggatcactgggctcttcttggcagaggggatgtctggcttgcctgaagggagtggctctgtaaggacgccttgatgctttcttcattaagattttgagcatttttacgtacttgagcttttttttttttttttttcaatttctagaggaactttttctctgttaattcctggaactgtattttgaatccttaaaggtgagccctcatagggagatccaaagtcctgtggttaacgccttcatttatagatgaggcagctgaggcctggggatgtgaacaacctgctcacagtcctcatttactggatttgacttcagccaggtgaactggaatgccttggggcgtggaagggcattaggagtgtttcatttgatatgtgaatgctcataaaaaaatgtcaaggaatgaagaacaacaactctcagtggtgcctgcatttataattatttatgtgaaagtcaaattcatgtacagtaaatttgttataagaatattcacaagaacactgttctgatatctctgattgtcatgtggatttgaatgtagcttgacagagggaatgtctaatctatattgacagggcaggaacaccgtcatcttagacaaacaccgccactttaagttccagttccctttctag

SEQ ID NO: 422207 - DNA, 2085 bp, Homo sapiens
gcttctaaagtgaagattcagttttcacttaaacaaccagcaagtcttgaagtctcttcccaagcaaatgggagcttctttggaccttggagcacacagaggattctactttctttaaaactttgttttcaggcaatttccctgagaaccgtttacttccagaagattggtggagcttgatctgaaggctggccatgaaatctcaaggtcaacattggtattccagttcagataaaaactgtaaagtgagctttcgtgagaagcttctgattattgattcaaacctgggggtccaagatgtggagaacctcaagtttctctgcataggattggtccccaacaagaagctggagaagtccagctcagcctcagatgtttttgaacatctcttggcagaggatctgctgagtgaggaagaccctttcttcctggcagaactcctctatatcatacggcagaagaagctgctgcagcacctcaactgtaccaaagaggaagtggagcgactgctgcccacccgacaaagggtttctctgtttagaaacctgctctacgaactgtcagaaggcattgactcagagaacttaaaggacatgatcttccttctgaaagactcgcttcccaaaactgaaatgacctccctaagtttcctggcatttctagagaaacaaggtaaaatagatgaagataatctgacatgcctggaggacctctgcaaaacagttgtacctaaacttttgagaaacatagagaaatacaaaagagagaaagctatccagatagtgacacctcctgtagacaaggaagccgagtcgtatcaaggagaggaagaactagtttcccaaacagatgttaagacattcttggaagccttaccgcaggagtcctggcaaaataagcatgcaggtagtaatggtaacagagccacaaatggtgcaccaagcctggtctccagggggatgcaaggagcatctgctaacactctaaactctgaaaccagcacaaagagggcagctgtgtacaggatgaatcggaaccacagaggcctctgtgtcattgtcaacaaccacagctttacctccctgaaggacagacaaggaacccataaagatgctgagatcctgagtcatgtgttccagtggcttgggttcacagtgcatatacacaataatgtgacgaaagtggaaatggagatggtcctgcagaagcagaagtgcaatccagcccatgccgacggggactgcttcgtgttctgtattctgacccatgggagatttggagctgtctactcttcggatgaggccctcattcccattcgggagatcatgtctcacttcacagccctgcagtgccctagactggctgaaaaacctaaactctttttcatccaggcctgccaaggtgaagagatacagccttccgtatccatcgaagcagatgctctgaaccctgagcaggcacccacttccctgcaggacagtattcctgccgaggctgacttcctacttggtctggccactgtcccaggctatgtatcctttcggcatgtggaggaaggcagctggtatattcagtctctgtgtaatcatctgaagaaattggtcccaaggatgctgaaatttctggaaaagacaatggaaatcaggggcaggaagagaacagtgtggggtgctaaacagatctcagcaacctccctgcccacggccatctctgcgcagacacctcgaccccccatgcgcaggtggagcagcgtttcctagttctttccagaggcttccttctgcctgccttccagccacatcgcctgagattgacaacgccctacagcaagacggaaacctccctttacagcaccaccttgcgattctgcagccacaaagttgagacttctgaacgtggcactcttctgttcccttactgtttcacgtgtacctgtgtcatctttcttgtttcatcgtaaacatacttctaaaattcccattttctttatttagaaatagaactacaagcggatggttaaacaatttaaacaaatggtccatggggaaaagtgaatttcacacttgtccccccaaacttcaagtg

SEQ ID NO: 422208 - DNA, 348 bp, Homo sapiens
  misc_feature (341)..(341): n is a, c, g, or t
ggttcaagcaattctcctgctgctagtcagaaggtgatttttatttttctgtctgtgattttattttcagctatccagatagtgacacctcctgtagacaaggaagccgagtcgtatcaaggagaggaagaactagtttcccaaacagatgttaagacattcttggaagccttaccggtaggttcagtggtgtgctggtcaatgcttaacaaccggctccaccctccaacctcccctccctgccaccccaaaaaaaagaggcctcttagtctctgcagaaacaaggagtaggacaattcactcttggaagctagaaaggaggcttgagcagcagcagaagncgggtgc

SEQ ID NO: 422209 - DNA, 3953 bp, Homo sapiens
  misc_feature (3456)..(3456): n is a, c, g, or t
  misc_feature (3476)..(3476): n is a, c, g, or t
  misc_feature (3505)..(3506): n is a, c, g, or t
gcttctaaagtgaagattcagttttcacttaaacaaccagcaagtcttgaagtctcttcccaagcaaatgggagcttctttggaccttggagcacacagaggattctactttctttaaaactttgttttcaggcaatttccctgagaaccgtttacttccagaagattggtggagcttgatctgaaggctggccatgaaatctcaaggtcaacattggtattccagttcagataaaaactgtaaagtgagctttcgtgagaagcttctgattattgattcaaacctgggggtccaagatgtggagaacctcaagtttctctgcataggattggtccccaacaagaagctggagaagtccagctcagcctcagatgtttttgaacatctcttggcagaggatctgctgagtgaggaagaccctttcttcctggcagaactcctctatatcatacggcagaagaagctgctgcagcacctcaactgtaccaaagaggaagtggagcgactgctgcccacccgacaaagggtttctctgtttagaaacctgctctacgaactgtcagaaggcattgactcagagaacttaaaggacatgatcttccttctgaaagactcgcttcccaaaactgaaatgacctccctaagtttcctggcatttctagagaaacaaggtaaaatagatgaagataatctgacatgcctggaggacctctgcaaaacagttgtacctaaacttttgagaaacatagagaaatacaaaagagagaaagctatccagatagtgacacctcctgtagacaaggaagccgagtcgtatcaaggagaggaagaactagtttcccaaacagatgttaagacattcttggaagccttaccgcaggagtcctggcaaaataagcatgcaggtagtaatggtaacagagccacaaatggtgcaccaagcctggtctccagggggatgcaaggagcatctgctaacactctaaactctgaaaccagcacaaagagggcagctgtgtacaggatgaatcggaaccacagaggcctctgtgtcattgtcaacaaccacagctttacctccctgaaggacagacaaggaacccataaagatgctgagatcctgagtcatgtgttccagtggcttgggttcacagtgcatatacacaataatgtgacgaaagtggaaatggagatggtcctgcagaagcagaagtgcaatccagcccatgccgacggggactgcttcgtgttctgtattctgacccatgggagatttggagctgtctactcttcggatgaggccctcattcccattcgggagatcatgtctcacttcacagccctgcagtgccctagactggctgaaaaacctaaactctttttcatccaggcctgccaaggtgaagagatacagccttccgtatccatcgaagcagatgctctgaaccctgagcaggcacccacttccctgcaggacagtattcctgccgaggctgacttcctacttggtctggccactgtcccaggctatgtatcctttcggcatgtggaggaaggcagctggtatattcagtctctgtgtaatcatctgaagaaattggtcccaagacatgaagacatcttatccatcctcactgctgtcaacgatgatgtgagtcgaagagtggacaaacagggaacaaagaaacagatgccccagcctgctttcacactaaggaaaaaactagtattccctgtgcccctggatgcactttcaatatagcagagagtttttgttggttcttagacctcaaacgaatcattgggtataacctccagcctcctgcccagcacaggaatcggtggtctccacctgtcattctagaaacaggaaacaccgtgttttctgacacagtcaattctgattttctttttcttttgcaagtctaaatgttagaaaactttctttttttggagatagtctcattctgtcacccagactggagtgcaggggggcaatcacggctcactgtagtctcgacctcccaggctcaagctgtcctcccacctcagcctcccaagtagctgagactacaggtgtgtgtccatgcacagctaactttttattttttttgtggagatggggtttcactatgttgcctaagctggtctcaaactcctgggctcaagcgatcctcccacctcagcttctcaaagttctgggactacaggcatgaaatactgtgcctggcctggggaccaggtgcattttaaggttccttggtgttcaaaaaccacgttcttagcctagattgagcttagattgcctctctagacaactaccccttagttataattctgtgtcccctctgcatgcccttaaacattggacagtgaggtcacagtccacccaccctctctctgatctcccccttcctaagacttctcttttgcacatctagtgaggtgaaaatttggtctatgccaggcccatttcctgcttttgtgtaaggaaggtgctcacataggaagtttttatttggttagagacaggtttccctgtaggaagatgatggctcatttacactcagctgctctgcaagcagaaactttacaacctgatgtcatattccattttggactgggtgcggtgactcatgcctgtaatcccagtactctgggaagccaaggcaggcagatcacttgaggtcaggagttcgagaccagcctggccaatacggcaaaacctcatcattactaaaaacacaaaaattagccaggtgtggcggcgagcacctgtaatcccagctactcgggaggctgagacaggagaatctcttgaatccaggaggcagaggctgtggtgagccaagatgacacaactgcactccagcttgggcaacagggcgagaccttgtttaaaaaaaaaattcaatattggggttggaacatttcagttgccattgacagaacacccaattcaaattgactgaagcaaagaagggaatttattgcctctttcacattgaaacccaggagtggataacactggcttcaggcaaagcttgaatcaggactcaatctacaggccagcacctttctcttggccggatgtcctcagggctggcagatgcagtagactgcagtggacagtccccaccttgttactgctactacactttgctcctctggcccaaggcatgaggagagaggctgtgtcagaaactgaagctgttctcaggatcactgggctcttcttggcagaggggatgtctggcttgcctgaagggagtggctctgtaaggacgccttgatgctttcttcattaagattttgagcatttttacgtacttgagcttttttttttttttttttcaatttctagaggaactttttctctgttaattcctggaactgtattttgaatccttaaaggtgtataggaaaaaaatttttcccccccccccccccaaaanaaaaaaaaaggggtttttcnccccccccttggggggtggggggggtttnntttaaaaaaaaacccggggcccccccttctttcccaatttttttaaattaagaaaatgaggcagctgaggcctggggatgtgaacaacctgctcacagtcctcatttactggatttgacttcagccaggtgaactggaatgccttggggcgtggaagggcattaggagtgtttcatttgatatgtgaatgctcataaaaaaatgtcaaggaatgaagaacaacaactctcagtggtgcctgcatttataattatttatgtgaaagtcaaattcatgtacagtaaatttgttataagaatattcacaagaacactgttctgatatctctgattgtcatgtggatttgaatgtagcttgacagagggaatgtctaatctatattgacagggcaggaacaccgtcatcttagacaaacaccgccactttaagttccagttccctttctag

SEQ ID NO: 422210 - DNA, 3419 bp, Homo sapiens
actataaagacacatgcacacgtatgtttattgcagcactattcacaatagcaaagacttggaaccaacccaaatgtccatcaatgatagactagattaagaaaatgtggcacatatataccatggaatactatgcagccataaaaaaggatgagttcatgtcttttgtagggacaaggatgaagctggaaacaatcattctgagcaaactatcacaaggacagaaagccaaacaccacatgttctcactcataggtgggaattgaacaatgagaacacttggacacagggatagccattaggagaaatacctaatgtaaatgacgagttaatgggtgcagcaaaccaacatggcacatgtatacctatgtaacaaacctgcacgttgtgcacatgtaccctagaacttaaaaaataacaacaacaacaaaaacatggtttaaacaactggcatggggagatacatcctgctcttcctcacagtggatccattggagtggttggttagaaacatttaaggccctaagataaggattcctactaagtggctctatctattcttcaagagggcagctgtgtacaggatgaatcggaaccacagaggcctctgtgtcattgtcaacaaccacagctttacctccctgaaggacagacaaggaacccataaagatgctgagatcctgagtcatgtgttccagtggcttgggttcacagtgcatatacacaataatgtgacgaaagtggaaatggagatggtcctgcagaagcagaagtgcaatccagcccatgccgacggggactgcttcgtgttctgtattctgacccatgggagatttggagctgtctactcttcggatgaggccctcattcccattcgggagatcatgtctcacttcacagccctgcagtgccctagactggctgaaaaacctaaactctttttcatccaggcctgccaaggtgaagagatacagccttccgtatccatcgaagcagatgctctgaaccctgagcaggcacccacttccctgcaggacagtattcctgccgaggctgacttcctacttggtctggccactgtcccaggctatgtatcctttcggcatgtggaggaaggcagctggtatattcagtctctgtgtaatcatctgaagaaattggtcccaagacatgaagacatcttatccatcctcactgctgtcaacgatgatgtgagtcgaagagtggacaaacagggaacaaagaaacagatgccccagcctgctttcacactaaggaaaaaactagtattccctgtgcccctggatgcactttcaatatagcagagagtttttgttggttcttagacctcaaacgaatcattgggtataacctccagcctcctgcccagcacaggaatcggtggtctccacctgtcattctagaaacaggaaacaccgtgttttctgacacagtcaattctgattttctttttcttttgcaagtctaaatgttagaaaactttctttttttggagatagtctcattctgtcacccagactggagtgcaggggggcaatcacggctcactgtagtctcgacctcccaggctcaagctgtcctcccacctcagcctcccaagtagctgagactacaggtgtgtgtccatgcacagctaactttttattttttttgtggagatggggtttcactatgttgcctaagctggtctcaaactcctgggctcaagcgatcctcccacctcagcttctcaaagttctgggactacaggcatgaaatactgtgcctggcctggggaccaggtgcattttaaggttccttggtgttcaaaaaccacgttcttagcctagattgagcttagattgcctctctagacaactaccccttagttataattctgtgtcccctctgcatgcccttaaacattggacagtgaggtcacagtccacccaccctctctctgatctcccccttcctaagacttctcttttgcacatctagtgaggtgaaaatttggtctatgccaggcccatttcctgcttttgtgtaaggaaggtgctcacataggaagtttttatttggttagagacaggtttccctgtaggaagatgatggctcatttacactcagctgctctgcaagcagaaactttacaacctgatgtcatattccattttggactgggtgcggtgactcatgcctgtaatcccagtactctgggaagccaaggcaggcagatcacttgaggtcaggagttcgagaccagcctggccaatacggcaaaacctcatcattactaaaaacacaaaaattagccaggtgtggcggcgagcacctgtaatcccagctactcgggaggctgagacaggagaatctcttgaatccaggaggcagaggctgtggtgagccaagatgacacaactgcactccagcttgggcaacagggcgagaccttgtttaaaaaaaaaattcaatattggggttggaacatttcagttgccattgacagaacacccaattcaaattgactgaagcaaagaagggaatttattgcctctttcacattgaaacccaggagtggataacactggcttcaggcaaagcttgaatcaggactcaatctacaggccagcacctttctcttggccggatgtcctcagggctggcagatgcagtagactgcagtggacagtccccaccttgttactgctactacactttgctcctctggcccaaggcatgaggagagaggctgtgtcagaaactgaagctgttctcaggatcactgggctcttcttggcagaggggatgtctggcttgcctgaagggagtggctctgtaaggacgccttgatgctttcttcattaagattttgagcatttttacgtacttgagcttttttttttttttttttcaatttctagaggaactttttctctgttaattcctggaactgtattttgaatccttaaaggtgagccctcatagggagatccaaagtcctgtggttaacgccttcatttatagatgaggcagctgaggcctggggatgtgaacaacctgctcacagtcctcatttactggatttgacttcagccaggtgaactggaatgccttggggcgtggaagggcattaggagtgtttcatttgatatgtgaatgctcataaaaaaatgtcaaggaatgaagaacaacaactctcagtggtgcctgcatttataattatttatgtgaaagtcaaattcatgtacagtaaatttgttataagaatattcacaagaacactgttctgatatctctgattgtcatgtggatttgaatgtagcttgacagagggaatgtctaatctatattgacagggcaggaacaccgtcatcttagacaaacaccgccactttaagttccagttccctttctag

SEQ ID NO: 422211 - DNA, 1673 bp, Homo sapiens
ggctaatttttttatttttagtagaggtggggtttcaccatgttagtcaggctggtctcgaactcctgacctcaggtgatccacctgccttggcctcccaaagtgctgggattacaggcatgagccaccgcaaccggcccaatgaccttttctgtggctgtggattagatatctgtccttccctgcatcaagtctagtttttgttcctcatcctaactgtgtgaaattcctaagacttctcttttgcacatctagtgaggtgaaaatttggtctatgccaggcccatttcctgcttttgtgtaaggaaggtgctcacataggaagtttttatttggttagagacaggtttccctgtaggaagatgatggctcatttacactcagctgctctgcaagcagaaactttacaacctgatgtcatattccattttggactgggtgcggtgactcatgcctgtaatcccagtactctgggaagccaaggcaggcagatcacttgaggtcaggagttcgagaccagcctggccaatacggcaaaacctcatcattactaaaaacacaaaaattagccaggtgtggcggcgagcacctgtaatcccagctactcgggaggctgagacaggagaatctcttgaatccaggaggcagaggctgtggtgagccaagatgacacaactgcactccagcttgggcaacagggcgagaccttgtttaaaaaaaaaattcaatattggggttggaacatttcagttgccattgacagaacacccaattcaaattgactgaagcaaagaagggaatttattgcctctttcacattgaaacccaggagtggataacactggcttcaggcaaagcttgaatcaggactcaatctacaggccagcacctttctcttggccggatgtcctcagggctggcagatgcagtagactgcagtggacagtccccaccttgttactgctactacactttgctcctctggcccaaggcatgaggagagaggctgtgtcagaaactgaagctgttctcaggatcactgggctcttcttggcagaggggatgtctggcttgcctgaagggagtggctctgtaaggacgccttgatgctttcttcattaagattttgagcatttttacgtacttgagcttttttttttttttttttcaatttctagaggaactttttctctgttaattcctggaactgtattttgaatccttaaaggtgagccctcatagggagatccaaagtcctgtggttaacgccttcatttatagatgaggcagctgaggcctggggatgtgaacaacctgctcacagtcctcatttactggatttgacttcagccaggtgaactggaatgccttggggcgtggaagggcattaggagtgtttcatttgatatgtgaatgctcataaaaaaatgtcaaggaatgaagaacaacaactctcagtggtgcctgcatttataattatttatgtgaaagtcaaattcatgtacagtaaatttgttataagaatattcacaagaacactgttctgatatctctgattgtcatgtggatttgaatgtagcttgacagagggaatgtctaatctatattgacagggcaggaacaccgtcatcttagacaaacaccgccactttaagttccagttccctttctag

SEQ ID NO: 422212 - DNA, 1049 bp, Homo sapiens
  misc_feature (1042)..(1042): n is a, c, g, or t
gcttctaaagtgaagattcagttttcacttaaacaaccagcaagtcttgaagtctcttcccaagcaaatgggagcttctttggaccttggagcacacagaggattctactttctttaaaactttgttttcaggcaatttccctgagaaccgtttacttccagaagattggtggagcttgatctgaaggctggccatgaaatctcaaggtcaacattggtattccagttcagataaaaactgtaaagtgagctttcgtgagaagcttctgattattgattcaaacctgggggtccaagatgtggagaacctcaagtttctctgcataggattggtccccaacaagaagctggagaagtccagctcagcctcagatgtttttgaacatctcttggcagaggatctgctgagtgaggaagaccctttcttcctggcagaactcctctatatcatacggcagaagaagctgctgcagcacctcaactgtaccaaagaggaagtggagcgactgctgcccacccgacaaagggtttctctgtttagaaacctgctctacgaactgtcagaaggcattgactcagagaacttaaaggacatgatcttccttctgaaagactcgcttcccaaaactgaaatgacctccctaagtttcctggcatttctagagaaacaaggtaaaatagatgaagataatctgacatgcctggaggacctctgcaaaacagttgtacctaaacttttgagaaacatagagaaatacaaaagagagaaagctatccagatagtgacacctcctgtagacaaggaagccgagtcgtatcaaggagaggaagaactagtttcccaaacagatgttaagacattcttggaagccttaccggtaggttcagtggtgtgctggtcaatgcttaacaaccggctccaccctccaacctcccctccctgccaccccaaaaaaaagaggcctcttagtctctgcagaaacaaggagtaggacaattcactcttggaagctagaaaggaggcttgagcagcagcagaagncgggtgc

SEQ ID NO: 422213 - DNA, 552 bp, Homo sapiens
  misc_feature (545)..(545): n is a, c, g, or t
cacaagtgtaaggctttatttgtcattttgggtgtgtgtcttagaaacctgctctacgaactgtcagaaggcattgactcagagaacttaaaggacatgatcttccttctgaaagactcgcttcccaaaactgaaatgacctccctaagtttcctggcatttctagagaaacaaggtaaaatagatgaagataatctgacatgcctggaggacctctgcaaaacagttgtacctaaacttttgagaaacatagagaaatacaaaagagagaaagctatccagatagtgacacctcctgtagacaaggaagccgagtcgtatcaaggagaggaagaactagtttcccaaacagatgttaagacattcttggaagccttaccggtaggttcagtggtgtgctggtcaatgcttaacaaccggctccaccctccaacctcccctccctgccaccccaaaaaaaagaggcctcttagtctctgcagaaacaaggagtaggacaattcactcttggaagctagaaaggaggcttgagcagcagcagaagncgggtgc

SEQ ID NO: 422214 - DNA, 325 bp, Homo sapiens
tgttagtcaggctggtctcgaactcctgacctcaggtgatccacctgccttggcctcccaaagtgctgggattacaggcatgagccaccgcaaccggcccaatgaccttttctgtggctgtggattagatatctgtccttccctgcatcaagtctagtttttgttcctcatcctaactgtgtgaaattcctatgtttcatgccctcctttcttttttctcagcaggagtcctggcaaaataagcatgcaggtagtaatggtaggtatttctaatgtactttttacaacttagatcggtatggtagggatagacatatttgatata

SEQ ID NO: 422215 - DNA, 3768 bp, Homo sapiens
gcttctaaagtgaagattcagttttcacttaaacaaccagcaagtcttgaagtctcttcccaagcaaatgggagcttctttggaccttggagcacacagaggattctactttctttaaaactttgttttcaggcaatttccctgagaaccgtttacttccagaagattggtggagcttgatctgaaggctggccatgaaatctcaaggtcaacattggtattccagttcagataaaaactgtaaagtgagctttcgtgagaagcttctgattattgattcaaacctgggggtccaagatgtggagaacctcaagtttctctgcataggattggtccccaacaagaagctggagaagtccagctcagcctcagatgtttttgaacatctcttggcagaggatctgctgagtgaggaagaccctttcttcctggcagaactcctctatatcatacggcagaagaagctgctgcagcacctcaactgtaccaaagaggaagtggagcgactgctgcccacccgacaaagggtttctctgtttagaaacctgctctacgaactgtcagaaggcattgactcagagaacttaaaggacatgatcttccttctgaaagactcgcttcccaaaactgaaatgacctccctaagtttcctggcatttctagagaaacaaggtaaaatagatgaagataatctgacatgcctggaggacctctgcaaaacagttgtacctaaacttttgagaaacatagagaaatacaaaagagagaaagctatccagatagtgacacctcctgtagacaaggaagccgagtcgtatcaaggagaggaagaactagtttcccaaacagatgttaagacattcttggaagccttaccgcaggagtcctggcaaaataagcatgcaggtagtaatgagggcagctgtgtacaggatgaatcggaaccacagaggcctctgtgtcattgtcaacaaccacagctttacctccctgaaggacagacaaggaacccataaagatgctgagatcctgagtcatgtgttccagtggcttgggttcacagtgcatatacacaataatgtgacgaaagtggaaatggagatggtcctgcagaagcagaagtgcaatccagcccatgccgacggggactgcttcgtgttctgtattctgacccatgggagatttggagctgtctactcttcggatgaggccctcattcccattcgggagatcatgtctcacttcacagccctgcagtgccctagactggctgaaaaacctaaactctttttcatccaggcctgccaaggtgaagagatacagccttccgtatccatcgaagcagatgctctgaaccctgagcaggcacccacttccctgcaggacagtattcctgccgaggctgacttcctacttggtctggccactgtcccaggctatgtatcctttcggcatgtggaggaaggcagctggtatattcagtctctgtgtaatcatctgaagaaattggtcccaagacatgaagacatcttatccatcctcactgctgtcaacgatgatgtgagtcgaagagtggacaaacagggaacaaagaaacagatgccccagcctgctttcacactaaggaaaaaactagtattccctgtgcccctggatgcactttcaatatagcagagagtttttgttggttcttagacctcaaacgaatcattgggtataacctccagcctcctgcccagcacaggaatcggtggtctccacctgtcattctagaaacaggaaacaccgtgttttctgacacagtcaattctgattttctttttcttttgcaagtctaaatgttagaaaactttctttttttggagatagtctcattctgtcacccagactggagtgcaggggggcaatcacggctcactgtagtctcgacctcccaggctcaagctgtcctcccacctcagcctcccaagtagctgagactacaggtgtgtgtccatgcacagctaactttttattttttttgtggagatggggtttcactatgttgcctaagctggtctcaaactcctgggctcaagcgatcctcccacctcagcttctcaaagttctgggactacaggcatgaaatactgtgcctggcctggggaccaggtgcattttaaggttccttggtgttcaaaaaccacgttcttagcctagattgagcttagattgcctctctagacaactaccccttagttataattctgtgtcccctctgcatgcccttaaacattggacagtgaggtcacagtccacccaccctctctctgatctcccccttcctaagacttctcttttgcacatctagtgaggtgaaaatttggtctatgccaggcccatttcctgcttttgtgtaaggaaggtgctcacataggaagtttttatttggttagagacaggtttccctgtaggaagatgatggctcatttacactcagctgctctgcaagcagaaactttacaacctgatgtcatattccattttggactgggtgcggtgactcatgcctgtaatcccagtactctgggaagccaaggcaggcagatcacttgaggtcaggagttcgagaccagcctggccaatacggcaaaacctcatcattactaaaaacacaaaaattagccaggtgtggcggcgagcacctgtaatcccagctactcgggaggctgagacaggagaatctcttgaatccaggaggcagaggctgtggtgagccaagatgacacaactgcactccagcttgggcaacagggcgagaccttgtttaaaaaaaaaattcaatattggggttggaacatttcagttgccattgacagaacacccaattcaaattgactgaagcaaagaagggaatttattgcctctttcacattgaaacccaggagtggataacactggcttcaggcaaagcttgaatcaggactcaatctacaggccagcacctttctcttggccggatgtcctcagggctggcagatgcagtagactgcagtggacagtccccaccttgttactgctactacactttgctcctctggcccaaggcatgaggagagaggctgtgtcagaaactgaagctgttctcaggatcactgggctcttcttggcagaggggatgtctggcttgcctgaagggagtggctctgtaaggacgccttgatgctttcttcattaagattttgagcatttttacgtacttgagcttttttttttttttttttcaatttctagaggaactttttctctgttaattcctggaactgtattttgaatccttaaaggtgagccctcatagggagatccaaagtcctgtggttaacgccttcatttatagatgaggcagctgaggcctggggatgtgaacaacctgctcacagtcctcatttactggatttgacttcagccaggtgaactggaatgccttggggcgtggaagggcattaggagtgtttcatttgatatgtgaatgctcataaaaaaatgtcaaggaatgaagaacaacaactctcagtggtgcctgcatttataattatttatgtgaaagtcaaattcatgtacagtaaatttgttataagaatattcacaagaacactgttctgatatctctgattgtcatgtggatttgaatgtagcttgacagagggaatgtctaatctatattgacagggcaggaacaccgtcatcttagacaaacaccgccactttaagttccagttccctttctag

SEQ ID NO: 422216 - DNA, 706 bp, Homo sapiens
  misc_feature (647)..(647): n is a, c, g, or t
  misc_feature (671)..(671): n is a, c, g, or t
gcttctaaagtgaagattcagttttcacttaaacaaccagcaagtcttgaagtctcttcccaagcaaatgggagcttctttggaccttggagcacacagaggattctactttctttaaaactttgttttcaggcaatttccctgagaaccgtttacttccagaagattggtggagcttgatctgaaggctggccatgaaatctcaaggtcaacattggtattccagttcagataaaaactgtaaagtgagctttcgtgagaagcttctgattattgattcaaacctgggggtccaagatgtggagaacctcaagtttctctgcataggattggtccccaacaagaagctggagaagtccagctcagcctcagatgtttttgaacatctcttggcagaggatctgctgagtgaggaagaccctttcttcctggcagaactcctctatatcatacggcagaagaagctgctgcagcacctcaactgtaccaaagaggaagtggagcgactgctgcccacccgacaaagggtttctctgtttagaaacctgctctacgaactgtcagaaggcattgactcagagaacttaaaggacatgatcttccttctgaaagactcgcttcccaaaactgaaatgacctccctaagntttctggcatttctagagaaacanggtcctaaactttgagaacatagagaatacaaaga

SEQ ID NO: 422217 - DNA, 3952 bp, Homo sapiens
gcttctaaagtgaagattcagttttcacttaaacaaccagcaagtcttgaagtctcttcccaagcaaatgggagcttctttggaccttggagcacacagaggattctactttctttaaaactttgttttcaggcaatttccctgagaaccgtttacttccagaagattggtggagcttgatctgaaggctggccatgaaatctcaaggtcaacattggtattccagttcagataaaaactgtaaagtgagctttcgtgagaagcttctgattattgattcaaacctgggggtccaagatgtggagaacctcaagtttctctgcataggattggtccccaacaagaagctggagaagtccagctcagcctcagatgtttttgaacatctcttggcagaggatctgctgagtgaggaagaccctttcttcctggcagaactcctctatatcatacggcagaagaagctgctgcagcacctcaactgtaccaaagaggaagtggagcgactgctgcccacccgacaaagggtttctctgtttagaaacctgctctacgaactgtcagaaggcattgactcagagaacttaaaggacatgatcttccttctgaaagactcgcttcccaaaactgaaatgacctccctaagtttcctggcatttctagagaaacaaggtaaaatagatgaagataatctgacatgcctggaggacctctgcaaaacagttgtacctaaacttttgagaaacatagagaaatacaaaagagagaaagctatccagatagtgacacctcctgtagacaaggaagccgagtcgtatcaaggagaggaagaactagtttcccaaacagatgttaagacattcttggaagccttaccgcaggagtcctggcaaaataagcatgcaggtagtaatggtaacagagccacaaatggtgcaccaagcctggtctccagggggatgcaaggagcatctgctaacactctaaactctgaaaccagcacaaagagggcagctgtgtacaggatgaatcggaaccacagaggcctctgtgtcattgtcaacaaccacagctttacctccctgaaggacagacaaggaacccataaagatgctgagatcctgagtcatgtgttccagtggcttgggttcacagtgcatatacacaataatgtgacgaaagtggaaatggagatggtcctgcagaagcagaagtgcaatccagcccatgccgacggggactgcttcgtgttctgtattctgacccatgggagatttggagctgtctactcttcggatgaggccctcattcccattcgggagatcatgtctcacttcacagccctgcagtgccctagactggctgaaaaacctaaactctttttcatccaggcctgccaaggtgaagagatacagccttccgtatccatcgaagcagatgctctgaaccctgagcaggcacccacttccctgcaggacagtattcctgccgaggctgacttcctacttggtctggccactgtcccaggctatgtatcctttcggcatgtggaggaaggcagctggtatattcagtctctgtgtaatcatctgaagaaattggtcccaagacatgaagacatcttatccatcctcactgctgtcaacgatgatgtgagtcgaagagtggacaaacagggaacaaagaaacagatgccccagcctgctttcacactaaggaaaaaactagtattccctgtgcccctggatgcactttcaatatagcagagagtttttgttggttcttagacctcaaacgaatcattgggtataacctccagcctcctgcccagcacaggaatcggtggtctccacctgtcattctagaaacaggaaacaccgtgttttctgacacagtcaattctgattttctttttcttttgcaagtctaaatgttagaaaactttctttttttggagatagtctcattctgtcacccagactggagtgcaggggggcaatcacggctcactgtagtctcgacctcccaggctcaagctgtcctcccacctcagcctcccaagtagctgagactacaggtgtgtgtccatgcacagctaactttttattttttttgtggagatggggtttcactatgttgcctaagctggtctcaaactcctgggctcaagcgatcctcccacctcagcttctcaaagttctgggactacaggcatgaaatactgtgcctggcctggggaccaggtgcattttaaggttccttggtgttcaaaaaccacgttcttagcctagattgagcttagattgcctctctagacaactaccccttagttataattctgtgtcccctctgcatgcccttaaacattggacagtgaggtcacagtccacccaccctctctctgatctcccccttcctaagacttctcttttgcacatctagtgaggtgaaaatttggtctatgccaggcccatttcctgcttttgtgtaaggaaggtgctcacataggaagtttttatttggttagagacaggtttccctgtaggaagatgatggctcatttacactcagctgctctgcaagcagaaactttacaacctgatgtcatattccattttggactgggtgcggtgactcatgcctgtaatcccagtactctgggaagccaaggcaggcagatcacttgaggtcaggagttcgagaccagcctggccaatacggcaaaacctcatcattactaaaaacacaaaaattagccaggtgtggcggcgagcacctgtaatcccagctactcgggaggctgagacaggagaatctcttgaatccaggaggcagaggctgtggtgagccaagatgacacaactgcactccagcttgggcaacagggcgagaccttgtttaaaaaaaaaattcaatattggggttggaacatttcagttgccattgacagaacacccaattcaaattgactgaagcaaagaagggaatttattgcctctttcacattgaaacccaggagtggataacactggcttcaggcaaagcttgaatcaggactcaatctacaggccagcacctttctcttggccggatgtcctcagggctggcagatgcagtagactgcagtggacagtccccaccttgttactgctactacactttgctcctctggcccaaggcatgaggagagaggctgtgtcagaaactgaagctgttctcaggatcactgggctcttcttggcagaggggatgtctggcttgcctgaagggagtggctctgtaaggacgccttgatgctttcttcattaagattttgagcatttttacgtacttgagcttttttttttttttttttcaatttctagaggaactttttctctgttaattcctggaactgtattttgaatccttaaaggtgtctcgctctctcacccaggctagagtgtagtggtgtgatcttggcttactgcaaccttcgtctcctgggttcaagcgattctcctgcctccgcctcctgagtagctgggattacaggtgtgcaccaccatgcctggctaattttcatatttctagtagaaacagggttttgccattttggccaggctggtctcgaactcctgacctcaagtgatctgcccactttggcctcccaatggaatgaaccattgtgtctggcctcattcattctttctttcataaaagtttggatactgccaaacaaaattaaagacatgaagacatttgataaattgttattacaaatgtgacagttatttaactactggtgtttatttttattagagtcatagcacctactggcctctgcttcagggattcacaatggtgttgggcaggttggatatcatggggcttacccttagcaaggcattctattccacctatgcccaggcggtgtaaaacatataagcatctggtacgctgtggtaccgac

SEQ ID NO: 422218 - DNA, 968 bp, Homo sapiens
gcttctaaagtgaagattcagttttcacttaaacaaccagcaagtcttgaagtctcttcccaagcaaatgggagcttctttggaccttggagcacacagaggattctactttctttaaaactttgttttcaggcaatttccctgagaaccgtttacttccagaagattggtggagcttgatctgaaggctggccatgaaatctcaaggtcaacattggtattccagttcagataaaaactgtaaagtgagctttcgtgagaagcttctgattattgattcaaacctgggggtccaagatgtggagaacctcaagtttctctgcataggattggtccccaacaagaagctggagaagtccagctcagcctcagatgtttttgaacatctcttggcagaggatctgctgagtgaggaagaccctttcttcctggcagaactcctctatatcatacggcagaagaagctgctgcagcacctcaactgtaccaaagaggaagtggagcgactgctgcccacccgacaaagggtttctctgtttagaaacctgctctacgaactgtcagaaggcattgactcagagaacttaaaggacatgatcttccttctgaaagactcgcttcccaaaactgaaatgacctccctaagtttcctggcatttctagagaaacaaggtaaaatagatgaagataatctgacatgcctggaggacctctgcaaaacagttgtacctaaacttttgagaaacatagagaaatacaaaagagagaaaggtaagtagcttgtgattgctaacttggaccagaccatggaaattcttaaaccaattggccatgcatgatgttttgattatttgttttgttttgttttgttttgaggcagagtctcactcactctgtcacccaggctgggagtgcagtggtgtgatcttgggctcactgaaacctccgcctcccgggtttcaagtgat

SEQ ID NO: 422219 - DNA, 1633 bp, Homo sapiens
cccgcgagggcgacgcagttcgcaggcgcgtcggcgcgcctgttctggggcgcttggcttcaccgcgcaggcgcggtcgccgctgttgttgtggtccccatggagctgccgtagcggacccagcacagccaggagcgtccgggatgagctcagccgcggccgaccactgggcgtggttgctggtgctcagcttcgtgtttggatgcaatgttcttaggatcctcctcccgtccttctcatccttcatgtccagggtgctgcagaaggacgcggagcaggagtcacagatgagagcggagatccaggacatgaagcaggagctctccacagtcaacatgatggacgagtttgccagatatgccaggctggaaagaaagatcaacaagatgacggataagctcaaaacccatgtgaaagctcggacagctcaattagccaagataaaatgggtgataagtgtcgctttctacgtattgcaggctgccctgatgatctcactcatttggaagtattattctgtccctgtggctgtcgtgccgagtaaatggataacccctctagaccgcctggtagcctttcctactagagtagcaggtggtgttggaattacctgttggattttagtctgtaacaaagttgtcgctattgtgcttcatccgttcagctgaacaggaggatggatacagccgcgaggctaaaaaacggatttcctcttcctagcttaaaatctgatttacactgttttgttttttaagaaacaaaagtgcatagtttagatttttttttggttgaatatgtttgttcttggactttatgagatagtcttataagaatcacgattttctacacctgtcattgagccaagaaagtccagtttatgacacgtatgtactagtgaacaccgtcctcgatctgtacgaaatgtgaaatgtttagggacatctccatgctgtcacttgtgatttgccctcttatgtattttggtcatattgccaactggaaagtcaaaattttctaacaactttaagtaagttctttgaagacttagtgctgtttttaatccagtttagaaagtaacttaattttaataccgctactaaaaattcgaaaatttcttctttaatcacattcaatatggttaaaagaacaacactaattgacattgcgtgggctttttctccctttgtttaaaatgtcatttgttgagcaagagttgtatagtattatctacttacttgaggctgttaatttttcattacagtgttttgtaaatgtatccacgagaccatgatgcattgttttgtgctcaacttgtgttttgtatttaaagcattttgaatgaagtgtattttataagcatttaatatttatgctctttagaatggaacacagaaaacaaaccttataagtcctgattaaattaatctgaaccaataacctgtgtggcctacaaagtataattctattaaatgttccttaaaacacttttttctaattaaaatctttgcaaatgcttgtgtaacttcctgccttacagctacttgtttgctgtgagccacccgcaactgacaagtggctgttaactgagtcaccatatcccagtaaagctgaattttctcactaaaaaaaacaa

SEQ ID NO: 422220 - DNA, 784 bp, Homo sapiens
ttttttactagattagcaatcaaacaaaaatttaattatcgaaagtcaattaagtactaaaacacacacatacatacactccctctctcacacatttcaaaaataagatgcaaggcacataagcagcattatatcaaaccagaatgcattaggatattgattatatttaaataattatttttctttttccttctgtaggtgacgatggcttaatagaatttaccacagttactttagagtctccgaaagcatggctggtggaggcctgactgggaggcaggggatgcgactccttactttgcaaaggctcctctgagccttttgcaacaccaggacttgattggtcagttttcaagacatagcctgatccaaagagttcttccatgagactgcttttcttatctctgaaagttgtatccttcacttttattctggaagacttaccaaatgagggctcatacccactgtcagaatgctctagctccatttcctctctgttactgagatgcttgcctgtactatgactgtacctcatgttgccggcattggctggcccccctgaagcaggaagcccatgatgcaggttttcagttgcttctgtgaatgagtaatgtcttctttgtctgagggggcctttcgtgtagggagcagtgcctttgccaagtgtgtcatccacaccatttctctgcatgcttcttttaaacttttctcttactagaacatcttcttgattgctttctctttcaggatgaataacttcaattatttttggtggtagttcttg

SEQ ID NO: 422221 - DNA, 370 bp, Homo sapiens
attcaaggtttcaccaagggacattagtggctgtgcgtgctcatctgttgtctgtggggactgggttcctaggcttgaggtgctcagtctggagagttttcctggttttattttcgcatttccctgtcctcccttctgtgtggtcggttgtgtgattggcaggctgctttgctcaccagaggtgtctttacaggctgccctgatgatctcactcatttggaagtattattctgtccctgtggctgtcgtgccgagtaaatggataacccctctagaccgcctggtagcctttcctactagagtagcaggtaagaattttctggaagatgcagtggaagagtgcgataggcttatgtaggggtggcggtag

SEQ ID NO: 422222 - DNA, 726 bp, Homo sapiens
ctcaatctgagtcggatactattttaaataatggcataatgagatggtgggtgacttaaaaattctattttatattttctaaatatgttgagcgattgttccatttataatcagaaagtgtattataagggaaaataacatttctgtgtatttgaatattttgttaatttttcaggactgacataattatttatcctgtttttcctttcagtgaaagctcggacagctcaattagccaagataaaatgggtgataagtgtcgctttctacgtattgcaggtaagtgtgctagagcgtcagccgggtcattggagttggtgaccccggcctccagagccgtgtctgcagatccagggctgggagttcgggctgttccaccttcagctgtcgtgtcgtgtgtccctgcccacatggagctctaaacactctcggtctctaagtcagactaaaaggaagcctttctcttgaggagagttgttaaagtttgggactttttggcagatggactgtgaagtaagttctcggagagctttcaccatgcctgcatcccagtgtggtttgaagggcctggtgggatgaagcgagaggcttatagatgacatcagttttttctgagatcttcaatacttttggcccttacttgttacctggtgtacttcatgcacgctctccaccctccaggtagagaaccagcttttccgactggaattggcttctagcctccct

SEQ ID NO: 422223 - DNA, 413 bp, Homo sapiens
cccgcgagggcgacgcagttcgcaggcgcgtcggcgcgcctgttctggggcgcttggcttcaccgcgcaggcgcggtcgccgctgttgttgtggtccccatggagctgccgtagcggacccagcacagccaggagcgtccgggatgagctcagccgcggccgaccactgggcgtggttgctggtgctcagcttcgtgtttggatgcaatgttcttaggatcctcctcccgtccttctcatccttcaagtccaggggtcttcagaagggcgccgagagggagttacaaaattaaagccgggatcacgacataagcagggctttcccaataaacatgttgcgggttttcaaatttcacgttgaagaaagttcacagtgcggtatcttcacccctttactcgccagtctattgccg

SEQ ID NO: 422224 - DNA, 1484 bp, Homo sapiens
cccgcgagggcgacgcagttcgcaggcgcgtcggcgcgcctgttctggggcgcttggcttcaccgcgcaggcgcggtcgccgctgttgttgtggtccccatggagctgccgtagcggacccagcacagccaggagcgtccgggatgagctcagccgcggccgaccactgggcgtggttgctggtgctcagcttcgtgtttggatgcaatgttcttaggatcctcctcccgtccttctcatccttcatgtccagggtgctgcagaaggacgcggagcaggagtcacagatgagagcggagatccaggacatgaagcaggagctctccacagtcaacatgatggacgagtttgccagatatgccaggctggaaagaaagatcaacaagatgacggataagctcaaaacccatgtgaaagctcggacagctcaattagccaagataaaatgggtgataagtgtcgctttctacgtattgcaggctgccctgatgatctcactcatttggaagtattattctgtccctgtggctgtcgtgccgagtaaatggataacccctctagaccgcctggtagcctttcctactagagtagcaggtggtgttggaattacctgttggattttagtctgtaacaaagttgtcgctattgtgcttcatccgttcagctgaacaggaggatggatacagccgcgaggctaaaaaacggatttcctcttcctagcttaaaatctgatttacactgttttgttttttaagaaacaaaagtgcatagtttagatttttttttggttgaatatgtttgttcttggactttatgagatagtcttataagaatcacgattttctacacctgtcattgagccaagaaagtccagtttatgacacgtatgtactagtgaacaccgtcctcgatctgtacgaaatgtgaaatgtttagggacatctccatgctgtcacttgtgatttgccctcttatgtattttggtcatattgccaactggaaagtcaaaattttctaacaactttaagtaagttctttgaagacttagtgctgtttttaatccagtttagaaagtaacttaattttaataccgctactaaaaattcgaaaatttcttctttaatcacattcaatatggttaaaagaacaacactaattgacattgcgtgggctttttctccctttgtttaaaatgtcatttgttgagcaagagttgtatagtattatctacttacttgaggctgttaatttttcattacagtgttttgtaaatgtatccacgagaccatgatgcattgttttgtgctcaacttgtgttttgtatttaaagcattttgaatgaagtgtattttataagcatttaatatttatgctctttagaatggaacacagaaaacaaaccttataagtcctgattaaattaaattaatctgaaccaatacaaaagaaaaaaaaaagtggtcgcggccgccaatttaacttta

SEQ ID NO: 422225 - DNA, 1474 bp, Homo sapiens
gagacaccctcaggcgactggcgggtcgcggcttccaagctctaaatggagagttgtccctactgtgcggcaggcggaggagacctatgtccagggtgctgcagaaggacgcggagcaggagtcacagatgagagcggagatccaggacatgaagcaggagctctccacagtcaacatgatggacgagtttgccagatatgccaggctggaaagaaagatcaacaagatgacggataagctcaaaacccatgtgaaagctcggacagctcaattagccaagataaaatgggtgataagtgtcgctttctacgtattgcaggctgccctgatgatctcactcatttggaagtattattctgtccctgtggctgtcgtgccgagtaaatggataacccctctagaccgcctggtagcctttcctactagagtagcaggtggtgttggaattacctgttggattttagtctgtaacaaagttgtcgctattgtgcttcatccgttcagctgaacaggaggatggatacagccgcgaggctaaaaaacggatttcctcttcctagcttaaaatctgatttacactgttttgttttttaagaaacaaaagtgcatagtttagatttttttttggttgaatatgtttgttcttggactttatgagatagtcttataagaatcacgattttctacacctgtcattgagccaagaaagtccagtttatgacacgtatgtactagtgaacaccgtcctcgatctgtacgaaatgtgaaatgtttagggacatctccatgctgtcacttgtgatttgccctcttatgtattttggtcatattgccaactggaaagtcaaaattttctaacaactttaagtaagttctttgaagacttagtgctgtttttaatccagtttagaaagtaacttaattttaataccgctactaaaaattcgaaaatttcttctttaatcacattcaatatggttaaaagaacaacactaattgacattgcgtgggctttttctccctttgtttaaaatgtcatttgttgagcaagagttgtatagtattatctacttacttgaggctgttaatttttcattacagtgttttgtaaatgtatccacgagaccatgatgcattgttttgtgctcaacttgtgttttgtatttaaagcattttgaatgaagtgtattttataagcatttaatatttatgctctttagaatggaacacagaaaacaaaccttataagtcctgattaaattaatctgaaccaataacctgtgtggcctacaaagtataattctattaaatgttccttaaaacacttttttctaattaaaatctttgcaaatgcttgtgtaacttcctgccttacagctacttgtttgctgtgagccacccgcaactgacaagtggctgttaactgagtcaccatatcccagtaaagctgaattttctcactaaaaaaaacaa

SEQ ID NO: 422226 - DNA, 1703 bp, Homo sapiens
cccgcgagggcgacgcagttcgcaggcgcgtcggcgcgcctgttctggggcgcttggcttcaccgcgcaggcgcggtcgccgctgttgttgtggtccccatggagctgccgtagcggacccagcacagccaggagcgtccgggatgagctcagccgcggccgaccactgggcgtggttgctggtgctcagcttcgtgtttggatgcaatgttcttaggatcctcctcccgtccttctcatccttcgtaagtggctgcctggcctcccaagggccggtggggatgccgccccagtcccccggcgggtctggcgtagatgtccagggtgctgcagaaggacgcggagcaggagtcacagatgagagcggagatccaggacatgaagcaggagctctccacagtcaacatgatggacgagtttgccagatatgccaggctggaaagaaagatcaacaagatgacggataagctcaaaacccatgtgaaagctcggacagctcaattagccaagataaaatgggtgataagtgtcgctttctacgtattgcaggctgccctgatgatctcactcatttggaagtattattctgtccctgtggctgtcgtgccgagtaaatggataacccctctagaccgcctggtagcctttcctactagagtagcaggtggtgttggaattacctgttggattttagtctgtaacaaagttgtcgctattgtgcttcatccgttcagctgaacaggaggatggatacagccgcgaggctaaaaaacggatttcctcttcctagcttaaaatctgatttacactgttttgttttttaagaaacaaaagtgcatagtttagatttttttttggttgaatatgtttgttcttggactttatgagatagtcttataagaatcacgattttctacacctgtcattgagccaagaaagtccagtttatgacacgtatgtactagtgaacaccgtcctcgatctgtacgaaatgtgaaatgtttagggacatctccatgctgtcacttgtgatttgccctcttatgtattttggtcatattgccaactggaaagtcaaaattttctaacaactttaagtaagttctttgaagacttagtgctgtttttaatccagtttagaaagtaacttaattttaataccgctactaaaaattcgaaaatttcttctttaatcacattcaatatggttaaaagaacaacactaattgacattgcgtgggctttttctccctttgtttaaaatgtcatttgttgagcaagagttgtatagtattatctacttacttgaggctgttaatttttcattacagtgttttgtaaatgtatccacgagaccatgatgcattgttttgtgctcaacttgtgttttgtatttaaagcattttgaatgaagtgtattttataagcatttaatatttatgctctttagaatggaacacagaaaacaaaccttataagtcctgattaaattaatctgaaccaataacctgtgtggcctacaaagtataattctattaaatgttccttaaaacacttttttctaattaaaatctttgcaaatgcttgtgtaacttcctgccttacagctacttgtttgctgtgagccacccgcaactgacaagtggctgttaactgagtcaccatatcccagtaaagctgaattttctcactaaaaaaaacaa

SEQ ID NO: 422227 - DNA, 1580 bp, Homo sapiens
cccgcgagggcgacgcagttcgcaggcgcgtcggcgcgcctgttctggggcgcttggcttcaccgcgcaggcgcggtcgccgctgttgttgtggtccccatggagctgccgtagcggacccagcacagccaggagcgtccgggatgagctcagccgcggccgaccactgggcgtggttgctggtgctcagcttcgtgtttggatgcaatgttcttaggatcctcctcccgtccttctcatccttcatgtccagggtgctgcagaaggacgcggagcaggagtcacagatgagagcggagatccaggacatgaagcaggagctctccacagtcaacatgatggacgagtttgccagatatgccaggctggaaagaaagatcaacaagatgacggataagctcaaaacccatgtgaaagctcggacagctcaattagccaagataaaatgggtgataagtgtcgctttctacgtattgcaggctgccctgatgatctcactcatttggaagtattattctgtccctgtggctgtcgtgccgagtaaatggataacccctctagaccgcctggtagcctttcctactagagtagcaggtggtgttggaattacctgttggattttagtctgtaacaaagttgtcgctattgtgcttcatccgttcagctgaacaggaggatggatacagccgcgaggctaaaaaacggatttcctcttcctagcttaaaatctgatttacactgttttgttttttaagaaacaaaagtatagtcttataagaatcacgattttctacacctgtcattgagccaagaaagtccagtttatgacacgtatgtactagtgaacaccgtcctcgatctgtacgaaatgtgaaatgtttagggacatctccatgctgtcacttgtgatttgccctcttatgtattttggtcatattgccaactggaaagtcaaaattttctaacaactttaagtaagttctttgaagacttagtgctgtttttaatccagtttagaaagtaacttaattttaataccgctactaaaaattcgaaaatttcttctttaatcacattcaatatggttaaaagaacaacactaattgacattgcgtgggctttttctccctttgtttaaaatgtcatttgttgagcaagagttgtatagtattatctacttacttgaggctgttaatttttcattacagtgttttgtaaatgtatccacgagaccatgatgcattgttttgtgctcaacttgtgttttgtatttaaagcattttgaatgaagtgtattttataagcatttaatatttatgctctttagaatggaacacagaaaacaaaccttataagtcctgattaaattaatctgaaccaataacctgtgtggcctacaaagtataattctattaaatgttccttaaaacacttttttctaattaaaatctttgcaaatgcttgtgtaacttcctgccttacagctacttgtttgctgtgagccacccgcaactgacaagtggctgttaactgagtcaccatatcccagtaaagctgaattttctcactaaaaaaaacaa

SEQ ID NO: 422228 - DNA, 1807 bp, Homo sapiens
gggcttacgggccgagtgccctttgagattcaactttttctaaattatccttcactttctgctgtaaagagtggccacctcctttttcctctaggggactgaagcgagaggaggatattgcagggtttgcctctgtggtcatcttcttagagagcaccccctccgcccccacacccttttcctcagagccgttgcttagtgagtccctgccatggaccaggcttgggaatggtccccaagtattagtttaggaggacgactctctgcttcacaggacctaccccagaatcctgtgactcagaagcgcgcttgtgaagtgcgcatgtgcgggcagggcctccagtggggctctcgtgggggcagcagccaaggactggggctggtggcctggagagctgcccgcttctccgcccttgccgatgtccagggtgctgcagaaggacgcggagcaggagtcacagatgagagcggagatccaggacatgaagcaggagctctccacagtcaacatgatggacgagtttgccagatatgccaggctggaaagaaagatcaacaagatgacggataagctcaaaacccatgtgaaagctcggacagctcaattagccaagataaaatgggtgataagtgtcgctttctacgtattgcaggctgccctgatgatctcactcatttggaagtattattctgtccctgtggctgtcgtgccgagtaaatggataacccctctagaccgcctggtagcctttcctactagagtagcaggtggtgttggaattacctgttggattttagtctgtaacaaagttgtcgctattgtgcttcatccgttcagctgaacaggaggatggatacagccgcgaggctaaaaaacggatttcctcttcctagcttaaaatctgatttacactgttttgttttttaagaaacaaaagtgcatagtttagatttttttttggttgaatatgtttgttcttggactttatgagatagtcttataagaatcacgattttctacacctgtcattgagccaagaaagtccagtttatgacacgtatgtactagtgaacaccgtcctcgatctgtacgaaatgtgaaatgtttagggacatctccatgctgtcacttgtgatttgccctcttatgtattttggtcatattgccaactggaaagtcaaaattttctaacaactttaagtaagttctttgaagacttagtgctgtttttaatccagtttagaaagtaacttaattttaataccgctactaaaaattcgaaaatttcttctttaatcacattcaatatggttaaaagaacaacactaattgacattgcgtgggctttttctccctttgtttaaaatgtcatttgttgagcaagagttgtatagtattatctacttacttgaggctgttaatttttcattacagtgttttgtaaatgtatccacgagaccatgatgcattgttttgtgctcaacttgtgttttgtatttaaagcattttgaatgaagtgtattttataagcatttaatatttatgctctttagaatggaacacagaaaacaaaccttataagtcctgattaaattaatctgaaccaataacctgtgtggcctacaaagtataattctattaaatgttccttaaaacacttttttctaattaaaatctttgcaaatgcttgtgtaacttcctgccttacagctacttgtttgctgtgagccacccgcaactgacaagtggctgttaactgagtcaccatatcccagtaaagctgaattttctcactaaaaaaaacaa

SEQ ID NO: 422229 - DNA, 2246 bp, Homo sapiens
cccgcgagggcgacgcagttcgcaggcgcgtcggcgcgcctgttctggggcgcttggcttcaccgcgcaggcgcggtcgccgctgttgttgtggtccccatggagctgccgtagcggacccagcacagccaggagcgtccgggatgagctcagccgcggccgaccactgggcgtggttgctggtgctcagcttcgtgtttggatgcaatgttcttaggatcctcctcccgtccttctcatccttcatgtccagggtgctgcagaaggacgcggagcaggagtcacagatgagagcggagatccaggacatgaagcaggagctctccacagtcaacatgatggacgagtttgccagatatgccaggctggaaagaaagatcaacaagatgacggataagctcaaaacccatggtactgtgtcccttgcagcctggaggcttcatgagagcggatgaatagagaagtctgtatgtgaagattagtagaatacatactttgcttcttggatgttctgaatattgatggaaacttaagttatctggaggaaactcagtaataagtattactttcctcttatttgctggtgaacctttgctttctaagcacagaaatatctaagatcctctcagattttcctcagagccaactctttaaaattttaagctaactcttaaaaattgtaggttttcatttttaaattcatcacttttctgagagaagcccagaaaaaaagtctcacagtggattcccagaggcttttgttccactctctagaaaaatgcccagcagtgtcctcttctgagtgtcacctcccgggtccagtgtcctgtgatgaagagcgctttctcagggcagcccgtgtgctgagggaccccggtcacagtgtgtgcacagtcagagagctgtctctgtggctaggaaaacagacagaggggcctgtccaggcccaggacaagctggactcccaccaggggttcgtgtactgtgcacactgggaaataaggaggaaaatttagtcctgttgtgaaagctcggacagctcaattagccaagataaaatgggtgataagtgtcgctttctacgtattgcaggctgccctgatgatctcactcatttggaagtattattctgtccctgtggctgtcgtgccgagtaaatggataacccctctagaccgcctggtagcctttcctactagagtagcaggtggtgttggaattacctgttggattttagtctgtaacaaagttgtcgctattgtgcttcatccgttcagctgaacaggaggatggatacagccgcgaggctaaaaaacggatttcctcttcctagcttaaaatctgatttacactgttttgttttttaagaaacaaaagtgcatagtttagatttttttttggttgaatatgtttgttcttggactttatgagatagtcttataagaatcacgattttctacacctgtcattgagccaagaaagtccagtttatgacacgtatgtactagtgaacaccgtcctcgatctgtacgaaatgtgaaatgtttagggacatctccatgctgtcacttgtgatttgccctcttatgtattttggtcatattgccaactggaaagtcaaaattttctaacaactttaagtaagttctttgaagacttagtgctgtttttaatccagtttagaaagtaacttaattttaataccgctactaaaaattcgaaaatttcttctttaatcacattcaatatggttaaaagaacaacactaattgacattgcgtgggctttttctccctttgtttaaaatgtcatttgttgagcaagagttgtatagtattatctacttacttgaggctgttaatttttcattacagtgttttgtaaatgtatccacgagaccatgatgcattgttttgtgctcaacttgtgttttgtatttaaagcattttgaatgaagtgtattttataagcatttaatatttatgctctttagaatggaacacagaaaacaaaccttataagtcctgattaaattaatctgaaccaataacctgtgtggcctacaaagtataattctattaaatgttccttaaaacacttttttctaattaaaatctttgcaaatgcttgtgtaacttcctgccttacagctacttgtttgctgtgagccacccgcaactgacaagtggctgttaactgagtcaccatatcccagtaaagctgaattttctcactaaaaaaaacaa

SEQ ID NO: 422230 - DNA, 1130 bp, Homo sapiens
  misc_feature (25)..(26): n is a, c, g, or t
gagctgtcagaggatccccctagtnntgtcgtgccgagtaaatggataacccctctagaccgcctggtagcctttcctactagagtagcaggtggtgttggaattacctgttggattttagtctgtaacaaagttgtcgctattgtgcttcatccgttcagctgaacaggaggatggatacagccgcgaggctaaaaaacggatttcctcttcctagcttaaaatctgatttacactgttttgttttttaagaaacaaaagtgcatagtttagatttttttttggttgaatatgtttgttcttggactttatgagatagtcttataagaatcacgattttctacacctgtcattgagccaagaaagtccagtttatgacacgtatgtactagtgaacaccgtcctcgatctgtacgaaatgtgaaatgtttagggacatctccatgctgtcacttgtgatttgccctcttatgtattttggtcatattgccaactggaaagtcaaaattttctaacaactttaagtaagttctttgaagacttagtgctgtttttaatccagtttagaaagtaacttaattttaataccgctactaaaaattcgaaaatttcttctttaatcacattcaatatggttaaaagaacaacactaattgacattgcgtgggctttttctccctttgtttaaaatgtcatttgttgagcaagagttgtatagtattatctacttacttgaggctgttaatttttcattacagtgttttgtaaatgtatccacgagaccatgatgcattgttttgtgctcaacttgtgttttgtatttaaagcattttgaatgaagtgtattttataagcatttaatatttatgctctttagaatggaacacagaaaacaaaccttataagtcctgattaaattaatctgaaccaataacctgtgtggcctacaaagtataattctattaaatgttccttaaaacacttttttctaattaaaatctttgcaaatgcttgtgtaacttcctgccttacagctacttgtttgctgtgagccacccgcaactgacaagtggctgttaactgagtcaccatatcccagtaaagctgaattttctcactaaaaaaaacaa

SEQ ID NO: 422231 - DNA, 1420 bp, Homo sapiens
gagacaccctcaggcgactggcgggtcgcggcttccaagctctaaatggagagttgtccctactgtgcggcaggcggaggagacctatgtccagggtgctgcagaaggacgcggagcaggagtcacagatgagagcggagatccaggacatgaagcaggagctctccacagtcaacatgatggacgagtttgccagatatgccaggctggaaagaaagatcaacaagatgacggataagctcaaaacccatgtgaaagctcggacagctcaattagccaagataatcatttggaagtattattctgtccctgtggctgtcgtgccgagtaaatggataacccctctagaccgcctggtagcctttcctactagagtagcaggtggtgttggaattacctgttggattttagtctgtaacaaagttgtcgctattgtgcttcatccgttcagctgaacaggaggatggatacagccgcgaggctaaaaaacggatttcctcttcctagcttaaaatctgatttacactgttttgttttttaagaaacaaaagtgcatagtttagatttttttttggttgaatatgtttgttcttggactttatgagatagtcttataagaatcacgattttctacacctgtcattgagccaagaaagtccagtttatgacacgtatgtactagtgaacaccgtcctcgatctgtacgaaatgtgaaatgtttagggacatctccatgctgtcacttgtgatttgccctcttatgtattttggtcatattgccaactggaaagtcaaaattttctaacaactttaagtaagttctttgaagacttagtgctgtttttaatccagtttagaaagtaacttaattttaataccgctactaaaaattcgaaaatttcttctttaatcacattcaatatggttaaaagaacaacactaattgacattgcgtgggctttttctccctttgtttaaaatgtcatttgttgagcaagagttgtatagtattatctacttacttgaggctgttaatttttcattacagtgttttgtaaatgtatccacgagaccatgatgcattgttttgtgctcaacttgtgttttgtatttaaagcattttgaatgaagtgtattttataagcatttaatatttatgctctttagaatggaacacagaaaacaaaccttataagtcctgattaaattaatctgaaccaataacctgtgtggcctacaaagtataattctattaaatgttccttaaaacacttttttctaattaaaatctttgcaaatgcttgtgtaacttcctgccttacagctacttgtttgctgtgagccacccgcaactgacaagtggctgttaactgagtcaccatatcccagtaaagctgaattttctcactaaaaaaaacaa

SEQ ID NO: 422232 - DNA, 1518 bp, Homo sapiens
cccgcgagggcgacgcagttcgcaggcgcgtcggcgcgcctgttctggggcgcttggcttcaccgcgcaggcgcggtcgccgctgttgttgtggtccccatggagctgccgtagcggacccagcacagccaggagcgtccgggatgagctcagccgcggccgaccactgggcgtggttgctggtgctcagcttcgtgtttggatgcaatgttcttaggatcctcctcccgtccttctcatccttcatgtccagggtgctgcagaaggacgcggagcaggagtcacagatgagagcggagatccaggacatgaagcaggagctctccacagtcaacatgatggacgagtttgccagatatgccaggctggaaagaaagatcaacaagatgacggataagctcaaaacccatgtgaaagctcggacagctcaattagccaagataaaatgggtgataagtgtcgctttctacgtattgcaggtggtgttggaattacctgttggattttagtctgtaacaaagttgtcgctattgtgcttcatccgttcagctgaacaggaggatggatacagccgcgaggctaaaaaacggatttcctcttcctagcttaaaatctgatttacactgttttgttttttaagaaacaaaagtgcatagtttagatttttttttggttgaatatgtttgttcttggactttatgagatagtcttataagaatcacgattttctacacctgtcattgagccaagaaagtccagtttatgacacgtatgtactagtgaacaccgtcctcgatctgtacgaaatgtgaaatgtttagggacatctccatgctgtcacttgtgatttgccctcttatgtattttggtcatattgccaactggaaagtcaaaattttctaacaactttaagtaagttctttgaagacttagtgctgtttttaatccagtttagaaagtaacttaattttaataccgctactaaaaattcgaaaatttcttctttaatcacattcaatatggttaaaagaacaacactaattgacattgcgtgggctttttctccctttgtttaaaatgtcatttgttgagcaagagttgtatagtattatctacttacttgaggctgttaatttttcattacagtgttttgtaaatgtatccacgagaccatgatgcattgttttgtgctcaacttgtgttttgtatttaaagcattttgaatgaagtgtattttataagcatttaatatttatgctctttagaatggaacacagaaaacaaaccttataagtcctgattaaattaatctgaaccaataacctgtgtggcctacaaagtataattctattaaatgttccttaaaacacttttttctaattaaaatctttgcaaatgcttgtgtaacttcctgccttacagctacttgtttgctgtgagccacccgcaactgacaagtggctgttaactgagtcaccatatcccagtaaagctgaattttctcactaaaaaaaacaa

SEQ ID NO: 422233 - DNA, 1125 bp, Homo sapiens
gagacaccctcaggcgactggcgggtcgcggcttccaagctctaaatggagagttgtccctactgtgcggcaggcggaggagacctgtggtgttggaattacctgttggattttagtctgtaacaaagttgtcgctattgtgcttcatccgttcagctgaacaggaggatggatacagccgcgaggctaaaaaacggatttcctcttcctagcttaaaatctgatttacactgttttgttttttaagaaacaaaagtgcatagtttagatttttttttggttgaatatgtttgttcttggactttatgagatagtcttataagaatcacgattttctacacctgtcattgagccaagaaagtccagtttatgacacgtatgtactagtgaacaccgtcctcgatctgtacgaaatgtgaaatgtttagggacatctccatgctgtcacttgtgatttgccctcttatgtattttggtcatattgccaactggaaagtcaaaattttctaacaactttaagtaagttctttgaagacttagtgctgtttttaatccagtttagaaagtaacttaattttaataccgctactaaaaattcgaaaatttcttctttaatcacattcaatatggttaaaagaacaacactaattgacattgcgtgggctttttctccctttgtttaaaatgtcatttgttgagcaagagttgtatagtattatctacttacttgaggctgttaatttttcattacagtgttttgtaaatgtatccacgagaccatgatgcattgttttgtgctcaacttgtgttttgtatttaaagcattttgaatgaagtgtattttataagcatttaatatttatgctctttagaatggaacacagaaaacaaaccttataagtcctgattaaattaatctgaaccaataacctgtgtggcctacaaagtataattctattaaatgttccttaaaacacttttttctaattaaaatctttgcaaatgcttgtgtaacttcctgccttacagctacttgtttgctgtgagccacccgcaactgacaagtggctgttaactgagtcaccatatcccagtaaagctgaattttctcactaaaaaaaacaa

SEQ ID NO: 422234 - DNA, 1137 bp, Homo sapiens
gcggccgccgcggggccccggcggcgggggcacggtcccccgcgaggggggcccgggcaccaaaatgggtgataagtgtcgctttctacgtattgcaggtggtgttggaattacctgttggattttagtctgtaacaaagttgtcgctattgtgcttcatccgttcagctgaacaggaggatggatacagccgcgaggctaaaaaacggatttcctcttcctagcttaaaatctgatttacactgttttgttttttaagaaacaaaagtgcatagtttagatttttttttggttgaatatgtttgttcttggactttatgagatagtcttataagaatcacgattttctacacctgtcattgagccaagaaagtccagtttatgacacgtatgtactagtgaacaccgtcctcgatctgtacgaaatgtgaaatgtttagggacatctccatgctgtcacttgtgatttgccctcttatgtattttggtcatattgccaactggaaagtcaaaattttctaacaactttaagtaagttctttgaagacttagtgctgtttttaatccagtttagaaagtaacttaattttaataccgctactaaaaattcgaaaatttcttctttaatcacattcaatatggttaaaagaacaacactaattgacattgcgtgggctttttctccctttgtttaaaatgtcatttgttgagcaagagttgtatagtattatctacttacttgaggctgttaatttttcattacagtgttttgtaaatgtatccacgagaccatgatgcattgttttgtgctcaacttgtgttttgtatttaaagcattttgaatgaagtgtattttataagcatttaatatttatgctctttagaatggaacacagaaaacaaaccttataagtcctgattaaattaatctgaaccaataacctgtgtggcctacaaagtataattctattaaatgttccttaaaacacttttttctaattaaaatctttgcaaatgcttgtgtaacttcctgccttacagctacttgtttgctgtgagccacccgcaactgacaagtggctgttaactgagtcaccatatcccagtaaagctgaattttctcactaaaaaaaacaa

SEQ ID NO: 422235 - DNA, 1166 bp, Homo sapiens
cgagcggccgcccgggcaggtacacttaccatgttacgacttgtctcctctatataaatgcgtaggggttttagttaaatgtcctttgaagtatacttgaggagggtgacgggcggtgtgtacgcgggtggtgttggaattacctgttggattttagtctgtaacaaagttgtcgctattgtgcttcatccgttcagctgaacaggaggatggatacagccgcgaggctaaaaaacggatttcctcttcctagcttaaaatctgatttacactgttttgttttttaagaaacaaaagtgcatagtttagatttttttttggttgaatatgtttgttcttggactttatgagatagtcttataagaatcacgattttctacacctgtcattgagccaagaaagtccagtttatgacacgtatgtactagtgaacaccgtcctcgatctgtacgaaatgtgaaatgtttagggacatctccatgctgtcacttgtgatttgccctcttatgtattttggtcatattgccaactggaaagtcaaaattttctaacaactttaagtaagttctttgaagacttagtgctgtttttaatccagtttagaaagtaacttaattttaataccgctactaaaaattcgaaaatttcttctttaatcacattcaatatggttaaaagaacaacactaattgacattgcgtgggctttttctccctttgtttaaaatgtcatttgttgagcaagagttgtatagtattatctacttacttgaggctgttaatttttcattacagtgttttgtaaatgtatccacgagaccatgatgcattgttttgtgctcaacttgtgttttgtatttaaagcattttgaatgaagtgtattttataagcatttaatatttatgctctttagaatggaacacagaaaacaaaccttataagtcctgattaaattaatctgaaccaataacctgtgtggcctacaaagtataattctattaaatgttccttaaaacacttttttctaattaaaatctttgcaaatgcttgtgtaacttcctgccttacagctacttgtttgctgtgagccacccgcaactgacaagtggctgttaactgagtcaccatatcccagtaaagctgaattttctcactaaaaaaaacaa

SEQ ID NO: 422236 - DNA, 1180 bp, Homo sapiens
cccgcgagggcgacgcagttcgcaggcgcgtcggcgcgcctgttctggggcgcttggcttcaccgcgcaggcgcggtcgccgctgttgttgtggtccccatggagctgccgtagcggacccagcacagccaggagcgtccgggatgagctcagccgcggccgaccactgggcgtggttgctggtgctcagcttcgtgtttggatgcaatgttcttaggatcctcctcccgtccttctcatccttcatgtccagggtgctgcagaaggacgcggagcaggagtcacagatgagagcggagatccaggacatgaagcaggagctctccacagtcaacatgatggacgagtttgccagatatgccaggctggaaagaaagatcaacaagatgacggataagctcaaaacccatgtgaaagctcggacagctcaattagccaagataaaatgggtgataagtgtcgctttctacgtattgcaggctgccctgatgatctcactcatttggaagtattattctgtccctgtggctgtcgtgccgagtaaatggataacccctctagaccgcctggtagcctttcctactagagtagcaggtgacgatggcttaatagaatttaccacagttactttagagtctccgaaagcatggctggtggaggcctgactgggaggcaggggatgcgactccttactttgcaaaggctcctctgagccttttgcaacaccaggacttgattggtcagttttcaagacatagcctgatccaaagagttcttccatgagactgcttttcttatctctgaaagttgtatccttcacttttattctggaagacttaccaaatgagggctcatacccactgtcagaatgctctagctccatttcctctctgttactgagatgcttgcctgtactatgactgtacctcatgttgccggcattggctggcccccctgaagcaggaagcccatgatgcaggttttcagttgcttctgtgaatgagtaatgtcttctttgtctgagggggcctttcgtgtagggagcagtgcctttgccaagtgtgtcatccacaccatttctctgcatgcttcttttaaacttttctcttactagaacatcttcttgattgctttctctttcaggatgaataacttcaattatttttggtggtagttcttg

SEQ ID NO: 422237 - DNA, 1060 bp, Homo sapiens
cccgcgagggcgacgcagttcgcaggcgcgtcggcgcgcctgttctggggcgcttggcttcaccgcgcaggcgcggtcgccgctgttgttgtggtccccatggagctgccgtagcggacccagcacagccaggagcgtccgggatgagctcagccgcggccgaccactgggcgtggttgctggtgctcagcttcgtgtttggatgcaatgttcttaggatcctcctcccgtccttctcatccttcatgtccagggtgctgcagaaggacgcggagcaggagtcacagatgagagcggagatccaggacatgaagcaggagctctccacagtcaacatgatggacgagtttgccagatatgccaggctggaaagaaagatcaacaagatgacggataagctcaaaacccatggtactgtgtcccttgcagcctggaggcttcatgagagcggatgaatagagaagtctgtatgtgaagattagtagaatacatactttgcttcttggatgttctgaatattgatggaaacttaagttatctggaggaaactcagtaataagtattactttcctcttatttgctggtgaacctttgctttctaagcacagaaatatctaagatcctctcagattttcctcagagccaactctttaaaattttaagctaactcttaaaaattgtaggttttcatttttaaattcatcacttttctgagagaagcccagaaaaaaagtctcacagtggattcccagaggcttttgttccactctctagaaaaatgcccagcagtgtcctcttctgagtgtcacctcccgggtccagtgtcctgtgatgaagagcgctttctcagggcagcccgtgtgctgagggaccccggtcacagtgtgtgcacagtcagagagctgtctctgtggctaggaaaacagacagaggggcctgtccaggcccaggacaagctggactcccaccaggggttcgtgtactgtgcacactgggaaataaggaggaaaatttagtcctgttggtaagtggtaactgtattatacaaagaatctttgat

SEQ ID NO: 422238 - DNA, 529 bp, Homo sapiens
tatataagatataatagataaaaacagaaagaaagataaaaaatagaagataatctacagacagtacagtggccttggtcttggaaactgaagggagaaggtctggcccccagggtggggctctcctttccctcccccagccccgccgtcagcactggccctctgtgaggttcgatacttgaacgccccctgccctgtgccttggacctgggcaaagctaggaggaggaaacagcacaactcacagtttgagctggggggtggtcttggcaaggctcctgtctgtacccctccctaaccttctcaaaagaggtgcacagcctctcgggtgacttggaaactcctggacaaattccattctaacttattttgacatgtatacaaaccaactgtttagagattccacttgtgcaaagccctactgtgtttttatgttcctgtttaaaagagaagtttacttagcaataattataaataaatgaatattctttagtgaggtgactgcaaatgcttctttccccagctcttgg

SEQ ID NO: 422239 - DNA, 485 bp, Homo sapiens
  misc_feature (93)..(94): n is a, c, g, or t
tacatcacagcaagtgacttctcagaggggaaaagccaagctccagacaaggagtgttgttaaaatgtatcttatttcctttgttttaatatnnaaccccgccgtcagcactggccctctgtgaggttcgatacttgaacgccccctgccctgtgccttggacctgggcaaagctaggaggaggaaacagcacaactcacagtttgagctggggggtggtcttggcaaggctcctgtctgtacccctccctaaccttctcaaaagaggtgcacagcctctcgggtgacttggaaactcctggacaaattccattctaacttattttgacatgtatacaaaccaactgtttagagattccacttgtgcaaagccctactgtgtttttatgttcctgtttaaaagagaagtttacttagcaataattataaataaatgaatattctttagtgaggtgactgcaaatgcttctttccccagctcttgg

SEQ ID NO: 422240 - DNA, 3669 bp, Homo sapiens
ctgcctgggccagagccttgcccacagagtgtgggttcgagccaccccacctggcccccctgagtgaccccgaggcccccagcatggagtccccggagcctgtcaagccggaacagggcttcgtgtggcaggaggccagtgagttcgaggctgacacggcgggttcgaccgtggaacgccacaagaaggcccagctggatcggctggacatcaacgtgcagattgacgactcctatctggtggaggcgggcgaccgccagaagcgctggcagtgccgcatgtgcgagaagtcctacacgtccaagtacaacctggtgacgcacatcctgggccacaacggcatcaagccacactcgtgcccacactgcagcaagctcttcaagcagcccagccacctgcagacgcacctgctgacgcaccagggcacccggccccacaagtgccaggtatgccacaaggccttcacgcagaccagccacctcaagcgccacatgctgctgcactcggaggtcaagccctacagctgccacttctgcggccgcggcttcgcctaccccagcgagctcaaggcccacgaagtgaagcatgagagtggccgctgccatgtctgcgtcgagtgcggcctggacttctccaccctgacccagctcaagcgccacctggcctcccaccagggccccaccctctaccagtgcctcgagtgtgacaagtccttccactaccgcagccagttgcagaaccacatgctcaagcaccagaacgtgcgacccttcgtgtgcactgaatgcggcatggagttcagccagattcaccacctcaagcagcactccctcacccacaagggcgtgaaggagttcaagtgcgaggtgtgtggccgggagttcaccctacaggcgaacatgaagcggcacatgctgatccacaccagcgtccggccctaccagtgccacatctgcttcaagacctttgtacagaagcagactctcaagacccacatgattgtacactcgcccgtgaagccattcaaatgcaaggtgtgcgggaagtccttcaaccgcatgtacaacctgctgggccacatgcacctgcacgccggcagcaagcccttcaagtgcccctactgctccagcaagtttaatctcaagggcaacctgagccggcacatgaaggtcaagcatggcgtcatggacatcggcctggacagccaaggtgggtgggccaagcgcaatggacagagcaggaatgataccaacatgacgcactcaggagcctcctgcccagttagaggagtggggaggctggccaaggctgagacttcgttggggtgggctcaggtctggaaggggggtaccctggaaggccatgatgacaataacgatgggatatttatgtcttcttcaaaggacttaaatgagatcacgtaaacaatataataaaaatcataactaacatttattgagtgctaactgtgtgccaggcctttattaactcatgtgatcctcaaagcgaggttggctctgtcattgtcatcgttttacagatgcagaaactgaagaacagagaacttagatagctcatgcaagatgacaacacagcaggaggtgacagacactttatttcgttaccgtgagataatatttcaaataagtgtatgggaaagaaagttagaaaggggaaaaaatggcagccggaaagataagggagagccaggtgaggtcccaactccaagtacaccatgggaggtcctaagcaagggacatgcagaggggagatctgagcttcccagcaaccaaggcaaaaaagtgtcaatcagtcacactcttcacaagtgcctgccagagactataacccacatactcatgaaagggccagacagccctgacgttaagatctgggagaaattttaggagaggatcctatgcctcagcagttcgtagaagtttcagaggctgtcagaaaacatcccaagtgttagcggtagcctttccctccagcagtggtcagtacttaaagcatttctgttgggtgacagcaaagctgttagcctctctggcctcatggtggggagggactgctgtggagactccacaggaaggagggagccaacagcgctacagggaggctccttctacagttgggagctatttctggtgctctggctgggcatgatggctcacacctataatcctggcactttgggaggccgaggcaggaggatcccttaaggccaggagtttgataccaaaccaggcaacatagtgagacctggtctctacaaaaatatttttaaattagctgggtgtggtggcgtgtgcctataatctcagctacttgggagtctaaggcaggaagatcacttgagcccaggagttcaaggctgtagtgaactgtgatcggaccacggcactccagcctgcgtggcaaagcaagaccctatcgccaaattataataaagaaattctggtgtgcctctgagtcacaccagctgggaacatgctttggcagtaaccaggtgagctgacttgccacgtgggattatttactggaatgcagtcaggcacgcgggaacagctgcagtagcttaactctggttttggaacagctgaccagtgaatggcctgggttttctggcagaaacaggtatctcagttgttttgttttgtttttcagttgtctattaaggttgcttccagtagacgagaatgaaaccccgtcggctgctcttggtagctccttgctactcaaaatgtggtaggaggatgagcagcctcggccccacctgggatcttgctggcctctcagctccacccacacctgctgagtcagactctacacttcaaaaagatctctgggccatttgttgcagtcaagtttgagacccactggaccagactagtgcctcagagtctcctggagggcttgttgaaacaaagtgctggccccacccccagagtttctgattcagtagatctggggtggggtctgagacgctgcctttcccacaagttcccagttcttagcaaagcagccgctggttcagggacctcatgttgagaacctttgatccagactgcagagggctggctggcaaatcagctgcatgttgggagtcacctgaggaatgttttaaatgctgatgcctgagtttggacctgaggttcaaatgtaagtgatctggaatgtggcctgggatcaggatttttgtaaagcactttgggtgagtccatgtgcagtagattttgagagctgtattctagtggatctgccctgttgctaacccaccagaaggaaccagagcagaacgtgcccttttggaaataactgggaccatgaagagactgtcagtgttacagctcttttagaatttgttaggctgggcgtactggctcacgcctataatcccaacactttgggaggcaaatcccaaggtgggcagatcacctgaggttgggagttcgagaccagcctggccaacatgatgaaaccccgtctctactaaaaatacaaaaattagctgggcgtgttggcacatgcgtgtaatcccagctactcgggaggctgaggcaggagaatcacttgaacctgggaggcagaggttgcagtgagccgagattgtgtcactgcactccagcctgggtgacagagtgagactttgactcaaaaaaaaaa

SEQ ID NO: 422241 - DNA, 2623 bp, Homo sapiens
ctgcctgggccagagccttgcccacagagtgtgggttcgagccaccccacctggcccccctgagtgaccccgaggcccccagcatggagtccccggagcctgtcaagccggaacagggcttcgtgtggcaggaggccagtgagttcgaggctgacacggcgggttcgaccgtggaacgccacaagaaggcccagctggatcggctggacatcaacgtgcagattgacgactcctatctggtggaggcgggcgaccgccagaagcgctggcagtgccgcatgtgcgagaagtcctacacgtccaagtacaacctggtgacgcacatcctgggccacaacggcatcaagccacactcgtgcccacactgcagcaagctcttcaagcagcccagccacctgcagacgcacctgctgacgcaccagggcacccggccccacaagtgccaggtatgccacaaggccttcacgcagaccagccacctcaagcgccacatgctgctgcactcggaggtcaagccctacagctgccacttctgcggccgcggcttcgcctaccccagcgagctcaaggcccacgaagtgaagcatgagagtggccgctgccatgtctgcgtcgagtgcggcctggacttctccaccctgacccagctcaagcgccacctggcctcccaccagggccccaccctctaccagtgcctcgagtgtgacaagtccttccactaccgcagccagttgcagaaccacatgctcaagcaccagaacgtgcgacccttcgtgtgcactgaatgcggcatggagttcagccagattcaccacctcaagcagcactccctcacccacaagggcgtgaaggagttcaagtgcgaggtgtgtggccgggagttcaccctacaggcgaacatgaagcggcacatgctgatccacaccagcgtccggccctaccagtgccacatctgcttcaagacctttgtacagaagcagactctcaagacccacatgattgtacactcgcccgtgaagccattcaaatgcaaggtgtgcgggaagtccttcaaccgcatgtacaacctgctgggccacatgcacctgcacgccggcagcaagcccttcaagtgcccctactgctccagcaagtttaatctcaagggcaacctgagccggcacatgaaggtcaagcatggcgtcatggacatcggcctggacagccaaggtgggtgggccaagcgcaatggacagagcaggaatgataccaacatgacgcactcaggagcctcctgcccagttagaggagtggggaggctggccaaggctgagacttcgttggggtgggctcaggtctggaaggggggtaccctggaaggccatgatgacaataacgatgggatatttatgtcttcttcaaaggacttaaatgagatcacgtaaacaatataataaaaatcataactaacatttattgagtgctaactgtgtgccaggcctttattaactcatgtgatcctcaaagcgaggttggctctgtcattgtcatcgttttacagatgcagaaactgaagaacagagaacttagatagctcatgcaagatgacaacacagcaggaggtgacagacactttatttcgttaccgtgagataatatttcaaataagtgtatgggaaagaaagttagaaaggggaaaaaatggcagccggaaagataagggagagccaggtgaggtcccaactccaagtacaccatgggaggtcctaagcaagggacatgcagaggggagatctgagcttcccagcaaccaaggcaaaaaagtgtcaatcagtcacactcttcacaagtgcctgcggtgggaggaaccaatctgcagcgcagccacccccaaggctggatccttaagtgaaggaccaagccaggcctcagggtgactgtgatcaggactgaggggtggacaaggtggcccaagtatggcttccagaccccgaagccccacgacctcccaggtgcccgccatgatgaccctcaggtggcagtgaccccgtcactgtataagacattttctcctgctgagcagaaggcatcatcccctgcaactacctcttcccacgtctttctcccctggtaccaaaaagaaccctgtacctctcctcctcctcctccctcctgccagtgcagtggccttggtcttggaaactgaagggagaaggtctggcccccagggtggggctctcctttccctcccccagccccgccgtcagcactggccctctgtgaggttcgatacttgaacgccccctgccctgtgccttggacctgggcaaagctaggaggaggaaacagcacaactcacagtttgagctggggggtggtcttggcaaggctcctgtctgtacccctccctaaccttctcaaaagaggtgcacagcctctcgggtgacttggaaactcctggacaaattccattctaacttattttgacatgtatacaaaccaactgtttagagattccacttgtgcaaagccctactgtgtttttatgttcctgtttaaaagagaagtttacttagcaataattataaataaatgaatattctttagtgaggtgactgcaaatgcttctttccccagctcttgg

SEQ ID NO: 422242 - DNA, 3775 bp, Homo sapiens
ctgcctgggccagagccttgcccacagagtgtgggttcgagccaccccacctggcccccctgagtgaccccgaggcccccagcatggagtccccggagcctgtcaagccggaacagggcttcgtgtggcaggaggccagtgagttcgaggctgacacggcgggttcgaccgtggaacgccacaagaaggcccagctggatcggctggacatcaacgtgcagattgacgactcctatctggtggaggcgggcgaccgccagaagcgctggcagtgccgcatgtgcgagaagtcctacacgtccaagtacaacctggtgacgcacatcctgggccacaacggcatcaagccacactcgtgcccacactgcagcaagctcttcaagcagcccagccacctgcagacgcacctgctgacgcaccagggcacccggccccacaagtgccaggtatgccacaaggccttcacgcagaccagccacctcaagcgccacatgctgctgcactcggaggtcaagccctacagctgccacttctgcggccgcggcttcgcctaccccagcgagctcaaggcccacgaagtgaagcatgagagtggccgctgccatgtctgcgtcgagtgcggcctggacttctccaccctgacccagctcaagcgccacctggcctcccaccagggccccaccctctaccagtgcctcgagtgtgacaagtccttccactaccgcagccagttgcagaaccacatgctcaagcaccagaacgtgcgacccttcgtgtgcactgaatgcggcatggagttcagccagattcaccacctcaagcagcactccctcacccacaagggcgtgaaggagttcaagtgcgaggtgtgtggccgggagttcaccctacaggcgaacatgaagcggcacatgctgatccacaccagcgtccggccctaccagtgccacatctgcttcaagacctttgtacagaagcagactctcaagacccacatgattgtacactcgcccgtgaagccattcaaatgcaaggtgtgcgggaagtccttcaaccgcatgtacaacctgctgggccacatgcacctgcacgccggcagcaagcccttcaagtgcccctactgctccagcaagtttaatctcaagggcaacctgagccggcacatgaaggtcaagcatggcgtcatggacatcggcctggacagccaagaccccatgatggagctgacaggcactgacccttcagagctcgacggccagcaggagatggaggacttcgaggagaacgcctacagctatgcgagcgtggacagcagcgccgaggccagtgtcctcactgaacaggccatgaaagagatggcctactacaacgtgctatagcgcaagctgggccacccctaacgggggccgggggcgagggcatgggggtgagacccatgggctgcaggctgcacctcctgcagccgagaaacaagctactgccccactgttctgagccctccctccccgagtcatttgcaccactagggacctttagaccaaatggagactgtactactggccccggctgtgagccagcacaggcccaggcatcccagcaagggaaggagaacacgcgaggcccagatctgggtctccctggcctgcttccgtggggagtgggagaagtggggccactggggacaggtcacaagggcaccggccctcggggtctctccaggcccagcagagctcttcaggggtcctgacactggaagaagagaccacttgagccatgtctttttcacggccaactcctgcctctaaggatgtctgagctcccctctggccagtactgcccacctctaccttgtccaggcccccttccccgccctgtcgacggaccgccaggcagggcactctgccttctacctcccggggtctcccatgcgctcctcaagccaggtgtgcacgtggccctggccctggcctgcaggacagctggggggcacccagcccccagaagacccctgtcctacatccctttctggaagtgagtgtccctacagtggattgcaacacatgtcgtccacttcgaccctagctggagtgcctcaccagggggcccactaggaacaaagccaggacaggcccgcgtcaggcacacactaacaaaaccagaagcatggggcagggcagggcggagtgagggctcacaggggaccaagaagggctgtccttggggggggcccaggaccacctgtcggggagggggaccgcagtcatttctcattcctcagtgtccaccttgcgacggggatagccacgagtcagcagcttcccggaaagagcaacgtattttaaaaaggaaagtaaagcccacagagggaaatcaagggtttttttgagcaaagggggtcttctgaaggtaacttattatttttttctttccaactgtgtgtcacctatgaccttttctgatggagatgcattttctttttccaagcgtaagcttcctaatgtgctgtgcgtgcttcctacccacccaccccgagcagcctggccgggcaggactggggctccatggggactgtcaccctggccctggaggtgcagccgctggcagcagcctcagcaggctggggtgggaggcaggagaaggcagagctgggaagccctccacccctgcctggctcctgcagtcgctgacttgctctgtcccatgtcccatcctcggctgtcagggctgctgactctgctcagccaacagctagctccctcgctcgcctgctctcttcccctctgttcccacgccagctcctgcccctggaaccagagatgacaggcccagggcagtgaatagcacattcaggaactctagggcacccggacccccccacccacttgcctcctgaggcctcagtggggaggggcaagcaggggtcttccccaaaggcacagatgaagccactagcttcagcctagaaacccggagaagggaacagcctgcggtgggaggaaccaatctgcagcgcagccacccccaaggctggatccttaagtgaaggaccaagccaggcctcagggtgactgtgatcaggactgaggggtggacaaggtggcccaagtatggcttccagaccccgaagccccacgacctcccaggtgcccgccatgatgaccctcaggtggcagtgaccccgtcactgtataagacattttctcctgctgagcagaaggcatcatcccctgcaactacctcttcccacgtctttctcccctggtaccaaaaagaaccctgtacctctcctcctcctcctccctcctgccagtgcagtggccttggtcttggaaactgaagggagaaggtctggcccccagggtggggctctcctttccctcccccagccccgccgtcagcactggccctctgtgaggttcgatacttgaacgccccctgccctgtgccttggacctgggcaaagctaggaggaggaaacagcacaactcacagtttgagctggggggtggtcttggcaaggctcctgtctgtacccctccctaaccttctcaaaagaggtgcacagcctctcgggtgacttggaaactcctggacaaattccattctaacttattttgacatgtatacaaaccaactgtttagagattccacttgtgcaaagccctactgtgtttttatgttcctgtttaaaagagaagtttacttagcaataattataaataaatgaatattctttagtgaggtgactgcaaatgcttctttccccagctcttgg

SEQ ID NO: 422243 - DNA, 3557 bp, Homo sapiens
ctgcctgggccagagccttgcccacagagtgtgggttcgagccaccccacctggcccccctgagtgaccccgaggcccccagcatggagtccccggagcctgtcaagccggaacagggcttcgtgtggcaggaggccagtgagttcgaggctgacacggcgggttcgaccgtggaacgccacaagaaggcccagctggatcggctggacatcaacgtgcagattgacgactcctatctggtggaggcgggcgaccgccagaagcgctggcagtgccgcatgtgcgagaagtcctacacgtccaagtacaacctggtgacgcacatcctgggccacaacggcatcaagccacactcgtgcccacactgcagcaagctcttcaagcagcccagccacctgcagacgcacctgctgacgcaccagggcacccggccccacaagtgccaggtatgccacaaggccttcacgcagaccagccacctcaagcgccacatgctgctgcactcggaggtcaagccctacagctgccacttctgcggccgcggcttcgcctaccccagcgagctcaaggcccacgaagtgaagcatgagagtggccgctgccatgtctgcgtcgagtgcggcctggacttctccaccctgacccagctcaagcgccacctggcctcccaccagggccccaccctctaccagtgcctcgagtgtgacaagtccttccactaccgcagccagttgcagaaccacatgctcaagcaccagaacgtgcgacccttcgtgtgcactgaatgcggcatggagttcagccagattcaccacctcaagcagcactccctcacccacaagggcgtgaaggagttcaagtgcgaggtgtgtggccgggagttcaccctacaggcgaacatgaagcggcacatgctgatccacaccagcgtccggccctaccagtgccacatctgcttcaagacctttgtacagaagcagactctcaagacccacatgattgtacactcgcccgtgaagccattcaaatgcaaggtgtgcgggaagtccttcaaccgcatgtacaacctgctgggccacatgcacctgcacgccggcagcaagcccttcaagtgcccctactgctccagcaagtttaatctcaagggcaacctgagccggcacatgaaggtcaagcatggcgtcatggacatcggcctggacagccaagaccccatgatggagctgacaggcactgacccttcagagctcgacggccagcaggagatggaggacttcgaggagaacgcctacagctatgcgagcgtggacagcagcgccgaggccagtgtcctcactgaacaggccatgaaagagatggcctactacaacgtgctatagcgcaagctgggccacccctaacgggggccgggggcgagggcatgggggtgagacccatgggctgcaggctgcacctcctgcagccgagaaacaagctactgccccactgttctgagccctccctccccgagtcatttgcaccactagggacctttagaccaaatggagactgtactactggccccggctgtgagccagcacaggcccaggcatcccagcaagggaaggagaacacgcgaggcccagatctgggtctccctggcctgcttccgtggggagtgggagaagtggggccactggggacaggtcacaagggcaccggccctcggggtctctccaggcccagcagagctcttcaggggtcctgacactggaagaagagaccacttgagccatgtctttttcacggccaactcctgcctctaaggatgtctgagctcccctctggccagtactgcccacctctaccttgtccaggcccccttccccgccctgtcgacggaccgccaggcagggcactctgccttctacctcccggggtctcccatgcgctcctcaagccaggtgtgcacgtggccctggccctggcctgcaggacagctggggggcacccagcccccagaagacccctgtcctacatccctttctggaagtgagtgtccctacagtggattgcaacacatgtcgtccacttcgaccctagctggagtgcctcaccagggggcccactaggaacaaagccaggacaggcccgcgtcaggcacacactaacaaaaccagaagcatggggcagggcagggcggagtgagggctcacaggggaccaagaagggctgtccttggggggggcccaggaccacctgtcggggagggggaccgcagtcatttctcattcctcagtgtccaccttgcgacggggatagccacgagtcagcagcttcccggaaagagcaacgtattttaaaaaggaaagtaaagcccacagagggaaatcaagggtttttttgagcaaagggggtcttctgaaggtaacttattatttttttctttccaactgtgtgtcacctatgaccttttctgatggagatgcattttctttttccaagcgtaagcttcctaatgtgctgtgcgtgcttcctacccacccaccccgagcagcctggccgggcaggactggggctccatggggactgtcaccctggccctggaggtgcagccgctggcagcagcctcagcaggctggggtgggaggcaggagaaggcagagctgggaagccctccacccctgcctggctcctgcagtcgctgacttgctctgtcccatgtcccatcctcggctgtcagggctgctgactctgctcagccaacagctagctccctcgctcgcctgctctcttcccctctgttcccacgccagctcctgcccctggaaccagagatgacaggcccagggcagtgaatagcacattcaggaactctagggcacccggacccccccacccacttgcctcctgaggcctcagtggggaggggcaagcaggggtcttccccaaaggcacagatgaagccactagcttcagcctagaaacccggagaagggaacagcctgcggtgggaggaaccaatctgcagcgcagccacccccaaggctggatccttaagtgaaggaccaagccaggcctcagggtgactgtgatcaggactgaggggtggacaaagtggccttggtcttggaaactgaagggagaaggtctggcccccagggtggggctctcctttccctcccccagccccgccgtcagcactggccctctgtgaggttcgatacttgaacgccccctgccctgtgccttggacctgggcaaagctaggaggaggaaacagcacaactcacagtttgagctggggggtggtcttggcaaggctcctgtctgtacccctccctaaccttctcaaaagaggtgcacagcctctcgggtgacttggaaactcctggacaaattccattctaacttattttgacatgtatacaaaccaactgtttagagattccacttgtgcaaagccctactgtgtttttatgttcctgtttaaaagagaagtttacttagcaataattataaataaatgaatattctttagtgaggtgactgcaaatgcttctttccccagctcttgg

SEQ ID NO: 422244 - DNA, 2245 bp, Homo sapiens
ctgcctgggccagagccttgcccacagagtgtgggttcgagccaccccacctggcccccctgagtgaccccgaggcccccagcatggagtccccggagcctgtcaagccggaacagggcttcgtgtggcaggaggccagtgagttcgaggctgacacggcgggttcgaccgtggaacgccacaagaaggcccagctggatcggctggacatcaacgtgcagattgacgactcctatctggtggaggcgggcgaccgccagaagcgctggcagtgccgcatgtgcgagaagtcctacacgtccaagtacaacctggtgacgcacatcctgggccacaacggcatcaagccacactcgtgcccacactgcagcaagctcttcaagcagcccagccacctgcagacgcacctgctgacgcaccagggcacccggccccacaagtgccaggtatgccacaaggccttcacgcagaccagccacctcaagcgccacatgctgctgcactcggaggtcaagccctacagctgccacttctgcggccgcggcttcgcctaccccagcgagctcaaggcccacgaagtgaagcatgagagtggccgctgccatgtctgcgtcgagtgcggcctggacttctccaccctgacccagctcaagcgccacctggcctcccaccagggccccaccctctaccagtgcctcgagtgtgacaagtccttccactaccgcagccagttgcagaaccacatgctcaagcaccagaacgtgcgacccttcgtgtgcactgaatgcggcatggagttcagccagattcaccacctcaagcagcactccctcacccacaagggcgtgaaggagttcaagtgcgaggtgtgtggccgggagttcaccctacaggcgaacatgaagcggcacatgctgatccacaccagcgtccggccctaccagtgccacatctgcttcaagacctttgtacagaagcagactctcaagacccacatgattgtacactcgcccgtgaagccattcaaatgcaaggtgtgcgggaagtccttcaaccgcatgtacaacctgctgggccacatgcacctgcacgccggcagcaagcccttcaagtgcccctactgctccagcaagtttaatctcaagggcaacctgagccggcacatgaaggtcaagcatggcgtcatggacatcggcctggacagccaaggtgggtgggccaagcgcaatggacagagcaggaatgataccaacatgacgcactcaggagcctcctgcccagttagaggagtggggaggctggccaaggctgagacttcgttggggtgggctcaggtctggaaggggggtaccctggaaggccatgatgacaataacgatgggatatttatgtcttcttcaaaggacttaaatgagatcacgtaaacaatataataaaaatcataactaacatttattgagtgctaactgtgtgccaggcctttattaactcatgtgatcctcaaagcgaggttggctctgtcattgtcatcgttttacagatgcagaaactgaagaacagagaacttagatagctcatgcaagatgacaacacagcaggaggtgacagacactttatttcgttaccgtgagataatatttcaaataagtgtatgggaaagaaagttagaaaggggaaaaaatggcagccggaaagataagggagagccaggtgaggtcccaactccaagtacaccatgggaggtcctaagcaagggacatgcagaggggagatctgagcttcccagcaaccaaggcaaaaaagtgtcaatcagtcacactcttcacaagtgcctgccagagactataacccacatactcatgaaagggccagacagccctgacgttaagatctgggagaaattttaggagaggatcctatgcctcagcagttcgtagaagtttcagaggctgtcagaaaacatcccaagtgttagcggtagcctttccctccagcagtggtcagtacttaaagcatttctgttgggtgacagcaaagctgttagcctctctggcctcatggtggggagggactgctgtggagactccacaggaaggagggagccaacagcgctacagggaggctccttctacagttgggagctatttctggtgctctggctgagccaccgtgctcagccgatgctattttagcaagcatgtattgagcacctactggctttcagtcaatcaagctcaaccttccg

SEQ ID NO: 422245 - DNA, 3333 bp, Homo sapiens
  misc_feature (3264)..(3264): n is a, c, g, or t
  misc_feature (3269)..(3269): n is a, c, g, or t
  misc_feature (3333)..(3333): n is a, c, g, or t
ctgcctgggccagagccttgcccacagagtgtgggttcgagccaccccacctggcccccctgagtgaccccgaggcccccagcatggagtccccggagcctgtcaagccggaacagggcttcgtgtggcaggaggccagtgagttcgaggctgacacggcgggttcgaccgtggaacgccacaagaaggcccagctggatcggctggacatcaacgtgcagattgacgactcctatctggtggaggcgggcgaccgccagaagcgctggcagtgccgcatgtgcgagaagtcctacacgtccaagtacaacctggtgacgcacatcctgggccacaacggcatcaagccacactcgtgcccacactgcagcaagctcttcaagcagcccagccacctgcagacgcacctgctgacgcaccagggcacccggccccacaagtgccaggtatgccacaaggccttcacgcagaccagccacctcaagcgccacatgctgctgcactcggaggtcaagccctacagctgccacttctgcggccgcggcttcgcctaccccagcgagctcaaggcccacgaagtgaagcatgagagtggccgctgccatgtctgcgtcgagtgcggcctggacttctccaccctgacccagctcaagcgccacctggcctcccaccagggccccaccctctaccagtgcctcgagtgtgacaagtccttccactaccgcagccagttgcagaaccacatgctcaagcaccagaacgtgcgacccttcgtgtgcactgaatgcggcatggagttcagccagattcaccacctcaagcagcactccctcacccacaagggcgtgaaggagttcaagtgcgaggtgtgtggccgggagttcaccctacaggcgaacatgaagcggcacatgctgatccacaccagcgtccggccctaccagtgccacatctgcttcaagacctttgtacagaagcagactctcaagacccacatgattgtacactcgcccgtgaagccattcaaatgcaaggtgtgcgggaagtccttcaaccgcatgtacaacctgctgggccacatgcacctgcacgccggcagcaagcccttcaagtgcccctactgctccagcaagtttaatctcaagggcaacctgagccggcacatgaaggtcaagcatggcgtcatggacatcggcctggacagccaagaccccatgatggagctgacaggcactgacccttcagagctcgacggccagcaggagatggaggacttcgaggagaacgcctacagctatgcgagcgtggacagcagcgccgaggccagtgtcctcactgaacaggccatgaaagagatggcctactacaacgtgctatagcgcaagctgggccacccctaacgggggccgggggcgagggcatgggggtgagacccatgggctgcaggctgcacctcctgcagccgagaaacaagctactgccccactgttctgagccctccctccccgagtcatttgcaccactagggacctttagaccaaatggagactgtactactggccccggctgtgagccagcacaggcccaggcatcccagcaagggaaggagaacacgcgaggcccagatctgggtctccctggcctgcttccgtggggagtgggagaagtggggccactggggacaggtcacaagggcaccggccctcggggtctctccaggcccagcagagctcttcaggggtcctgacactggaagaagagaccacttgagccatgtctttttcacggccaactcctgcctctaaggatgtctgagctcccctctggccagtactgcccacctctaccttgtccaggcccccttccccgccctgtcgacggaccgccaggcagggcactctgccttctacctcccggggtctcccatgcgctcctcaagccaggtgtgcacgtggccctggccctggcctgcaggacagctggggggcacccagcccccagaagacccctgtcctacatccctttctggaagtgagtgtccctacagtggattgcaacacatgtcgtccacttcgaccctagctggagtgcctcaccagggggcccactaggaacaaagccaggacaggcccgcgtcaggcacacactaacaaaaccagaagcatggggcagggcagggcggagtgagggctcacaggggaccaagaagggctgtccttggggggggcccaggaccacctgtcggggagggggaccgcagtcatttctcattcctcagtgtccaccttgcgacggggatagccacgagtcagcagcttcccggaaagagcaacgtattttaaaaaggaaagtaaagcccacagagggaaatcaagggtttttttgagcaaagggggtcttctgaaggtaacttattatttttttctttccaactgtgtgtcacctatgaccttttctgatggagatgcattttctttttccaagcgtaagcttcctaatgtgctgtgcgtgcttcctacccacccaccccgagcagcctggccgggcaggactggggctccatggggactgtcaccctggccctggaggtgcagccgctggcagcagcctcagcaggctggggtgggaggcaggagaaggcagagctgggaagccctccacccctgcctggctcctgcagtcgctgacttgctctgtcccatgtcccatcctcggctgtcagggctgctgactctgctcagccaacagctagctccctcgctcgcctgctctcttcccctctgttcccacgccagctcctgcccctggaaccagagatgacaggcccagggcagtgaatagcacattcaggaactctagggcacccggacccccccacccacttgcctcctgaggcctcagtggggaggggcaagcaggggtcttccccaaaggcacagatgaagccactagcttcagcctagaaacccggagaagggaacagcctgcggtgggaggaaccaatctgcagcgcagccacccccaaggctggatccttaagtgaaggaccaagccaggcctcagggtgactgtgatcaggactgaggggtggacaaggtggcccaagtatggcttccagaccccgaagccccacgacctcccaggtgcccgccatgatgaccctcaggtggcagtgaccccgtcactgtataagacattttctcctgctgagcagaaggcatcatcccctgcaactacctcttcccacgtctttctccctgtacngaccntgtacttctctctctcctctgcatgcatgctgggctgactgaggaggctgcccgtggcttcttn

SEQ ID NO: 422246 - DNA, 1144 bp, Homo sapiens
taaaactttaggaaattagtaccagacttttatattggtcaacagcaaaatgaacattactactcagcctccaacacatgcagtttgcctataccagggatcctgtcaaaatatacaccacttatagcttcttaagtgcagttatcatagagcacagtccctgacatcacacagctgcagagatgaataaacaaagaggaacctactcagaagtgagtctggcccaggacccaaagaggcagcaaaggaaacttaagggcaataaaatctccatttcaggaaccaaacaggaaatattccaagtagaattaaaccttcaaaatgcttcttcggatcatcaagggaatgacaagacatatcactgcaaaggtttactgccacctccagagaagctcactgctgaggtcctaggaatcatttgcattgtcctgatggccactgtgttaaaaacaatagttcttattccttgtattggagtactggagcagaacaatttttccctgaatagaagaatgcagaaagcacgtcattgtggccattgtcctgaggagtggattacatattccaacagttgttattacattggtaaggaaagaagaacttgggaagaaagagtttgctggcctgtgcttcgaagaactctgatctgctttctatagataatgaggaagaaatggtaagacgtaaatgtttcaacactttactaaaagcttatttctgtcaatatcatatttgtagaaatcatccatatgtttatacatatatttacttcatatatttttaagtctgtgtagtattcaactgacttcataatatttttatattcatatactgttaatgcacatttggttatttccagttttgcttttcatggaaacccatgcttctataaatgtttttatcacaaaataaatataaagaaaactaagcatgtcatggtcatgcatattgatcacaaagtgaatggattcatgatacagggcagatcatgaaatagaagtttccagccccagcagtcctgctcctgtgtatgccttcctcacttttcctgcctcctctccaaacctttgtattgatgtttaatgtgataaataagctttgcctgttccagaatttatgtcaagggaatcatacaatgtgtatt

SEQ ID NO: 422247 - DNA, 926 bp, Homo sapiens
taaaactttaggaaattagtaccagacttttatattggtcaacagcaaaatgaacattactactcagcctccaacacatgcagtttgcctataccagggatcctgtcaaaatatacaccacttatagcttcttaagtgcagttatcatagagcacagtccctgacatcacacagctgcagagatgaataaacaaagaggaacctactcagaagtgagtctggcccaggacccaaagaggcagcaaaggaaacttaagggcaataaaatctccatttcaggaaccaaacaggaaatattccaagtagaattaaaccttcaaaatgcttcttcggatcatcaagggaatgacaagacatatcactgcaaaggtttactgccacctccagagaagctcactgctgaggtcctaggaatcatttgcattgtcctgatggccactgtgttaaaaacaatagttcttattccttgtattggagtactggagcagaacaatttttccctgaatagaagaatgcagaaagcacgtcattgtggccattgtcctgaggagtggattacatattccaacagttgttattacattggtaaggaaagaagaacttgggaagaaagagtttgctggcctgtgcttcgaagaactctgatctgctttctatagataatgaggaagaaatggtaagacgtaaatgtttcaacactttactaaaagcttatttctgtcaatatcatatttgtagaaatcatccatatgtttatacatatatttacttcatatatttttaagtctgtgtagtattcaactgacttcataatatttttatattcatatactgttaatgcacatttggttatttccagttttgcttttcatggaaacccatgcttctataaatgtttttatcacaaaataaatataaagaaaact

SEQ ID NO: 422248 - DNA, 980 bp, Homo sapiens
taaaactttaggaaattagtaccagacttttatattggtcaacagcaaaatgaacattactactcagcctccaacacatgcagtttgcctataccagggatcctgtcaaaatatacaccacttatagcttcttaagtgcagttatcatagagcacagtccctgacatcacacagctgcagagatgaataaacaaagaggaacctactcagaagtgagtctggcccaggacccaaagaggcagcaaaggaaacttaagggcaataaaatctccatttcaggaaccaaacaggaaatattccaagtagaattaaaccttcaaaatgcttcttcggatcatcaagggaatgacaagacatatcactgcaaaggtttactgccacctccagagaagctcactgctgaggtcctaggaatcatttgcattgtcctgatggccactgtgttaaaaacaatagttcttattccttgtattggagtactggagcagaacaatttttccctgaatagaagaatgcagaaagcacgtcattgtggccattgtcctgaggagtggattacatattccaacagttgttattacattggtaaggaaagaagaacttgggaagaaagagtttgctggcctgtgcttcgaagaactctgatctgctttctatagataatgaggaagaaatggaatcctttgtgcattgaagactttagattcctctctgcggtagacgtgcacttataagtatttgatggggtggattcgtggtcggaggtctcgacacagctgggagatgagtgaatttcataattataacttggatctgaagaagagtgatttttcaacacgatggcaaaagcaaagatgtccagtagtcaaaagcaaatgtagagaaaatgcatctccattttttttctgctgcttcatcgctgtagccatgggaatccgtttcattattatggtaacaatatggagtgctgtattcctaaa

SEQ ID NO: 422249 - DNA, 800 bp, Homo sapiens
cgcaagatttaaaagataaaattagcagggtatggtaatgcattaggtatgaaatacagtgagggatctaagctggcaccaaggaatctggtttgggtgtgactatgttgaagatggcaaagtgaactaagattgggcataaaaaaagaccagaaaggtgatgaaacccatttgggatatgctttatttatggtgcctataagacacccaaacagaaatatgtgaaaggtcagggctagggatagagatcagaatatcattcggacaatgaaagatcgttataaccttaggagatagaaggggctgacatggcataaggataatgtggagagaggtgctgagggctaaggaaggaattcagggaaatatcactgctcaaagggtggactgaggaggaggagcccttaaattatcctgggaagcaacagtcaggatggcctgatggagaagcaggagcaagtggagagggcagggagagccttgtgcctgtgtactgactgaggggaagggacctctacatgattctgcccccttggaattagggcaagaacaggaagacagtgagcctgctgccaaagactaggaggatagcggatgctggtgatgcagagtactcaccatcctttctcacctcagatatccgccttgctcagcagcaatcacaaatacctgagcccacataagatatttctcacctagataagaaagccaaaacttctcctttaaattcacccaacaccactcacctcagaaattccctatgtggaaagcagcagcctctcctatggaagcatgaactg

SEQ ID NO: 422250 - DNA, 825 bp, Homo sapiens
aaacaggctccaaaagcttgttacttgcttgtagtcaaacagaaggcagagctgcgaatcaaatccaggtttgtctcgacatgccactagctcatacttcccttggatcagccactaaatggctttcactccagtgagcagcgaccagcaccagaattatggaacatttatcaacagcctaaaataaagacaacacgaggagaatttggttgcttatatagattcaaggtacaatcctgctggattctggaagaaatatcacagtgtgcatgcacagaagtacgaccatgtgaagaggtagcaagagagcagcaatctacaagccaaggaaagaggccacagaggaaaccaaccctgccagcatcttgatcttggacttccagcttccagaactaaccagggaccccactcccatgccgacagtatgggctgctgtcttcaggaccattgcaaggctgcaggaagacttagaggcatcatcctgccttggcttctggttgccaaggtgttctgcctgataccaactttgtcagcagtcaccaactagccatgcttttcccttgaaggcacatgtagattgcctaaccatccacaccaggcaaacaattcttcaaatgtcatgccctttgcacttctgttcagatccagccttagagaagcttgtgaagcaatgactgttttaattggtctcctgggtacccaggcctaatcctttaccaagtcactagttatcccatgttccttatctgtctgtctatccatctatccttccatcctcatccaatacttacagaatgcctatggctgcaaatacaaggatgactg

SEQ ID NO: 422251 - DNA, 342 bp, Homo sapiens
  misc_feature (22)..(22): n is a, c, g, or t
gactcctagaggatccccagcnggggaacaatcacttcatcagaaaaaaaaaattgtcagtgatatgtgaatgaaatgacatttctattttttctgatgaagtgatagataatacaatctaaagtgactttagcaatgtgcttgacttttacttctctctctcaggggatggactatttgggttctcggcaatacgttcaccgggacttggcagcaagaaatgtccttgttgagagtgaacaccaagtgttgttcccgtagcggggaacaatcacttggaaagctcattgattttgtatatgttccacgcgtgtacccctctgcatccagatcccatgtttc

SEQ ID NO: 422252 - DNA, 830 bp, Homo sapiens
aaacaggctccaaaagcttgttacttgcttgtagtcaaacagaaggcagagctgcgaatcaaatccagcaccagaattatggaacatttatcaacagcctaaaataaagacaacacgaggagaatttggttgcttatatagattcaaggtacaatcctgctggattctgggattacaggactgtagacaaaagagaaatcatcatggactgttcactggacaaaatttcatggagaggagaagacctttggcggttcatggatgttctataataagttaggtaactaacaggctaactttcttgagcacctacactgtgtagggcactgtactggtacttctcataccttctctcattcatataatcctctgaggtaggtgttatcctctctacagcagggaaaatcaatacccagagaaggggagagacgtccatggcacacaggagaggacagagccaagaatgaatataggacaccagtgccccaactcttaaccactaccatacacggttttataaagtaaattttaaaagtcgactttaaaacatgtatgcaacattgtgtccagtctcccaaaacaaaagaacaatgagcgttcccttttcccttgatgtgtgggcaggtctgtagagtagtacaagaagagattatgttctgcattctcacttcaacaagaaagtcctggtccaccaataatacctttaagcttcaggataattgtgaaaaggccaactagttaatcaaacattttcccaaacttaagaaaaacaccaagaaggaatataagtacaggggacattagaggataagctcataagggctggacta

SEQ ID NO: 422253 - DNA, 5074 bp, Homo sapiens
cgcggcggccgcggagtatcctggagctgcagacagtgcgggcctgcgcccagtcccggctgtcctcgccgcgacccctcctcagccctgggcgcgcgcacgctggggccccgcggggctggccgcctagcgagcctgccggtcgaccccagccagcgcagcgacggggcgctgcctggcccaggcgcacacggaagtgcgcttctctgaagtagctttggaaagtagagaagaaaatccagtttgcttcttggagaacactggacagctgaataaatgcagtatctaaatataaaagaggactgcaatgccatggctttctgtgctaaaatgaggagctccaagaagactgaggtgaacctggaggcccctgagccaggggtggaagtgatcttctatctgtcggacagggagcccctccggctgggcagtggagagtacacagcagaggaactgtgcatcagggctgcacaggcatgccgtatctctcctctttgtcacaacctctttgccctgtatgacgagaacaccaagctctggtatgctccaaatcgcaccatcaccgttgatgacaagatgtccctccggctccactaccggatgaggttctatttcaccaattggcatggaaccaacgacaatgagcagtcagtgtggcgtcattctccaaagaagcagaaaaatggctacgagaaaaaaaagattccagatgcaacccctctccttgatgccagctcactggagtatctgtttgctcagggacagtatgatttggtgaaatgcctggctcctattcgagaccccaagaccgagcaggatggacatgatattgagaacgagtgtctagggatggctgtcctggccatctcacactatgccatgatgaagaagatgcagttgccagaactgcccaaggacatcagctacaagcgatatattccagaaacattgaataagtccatcagacagaggaaccttctcaccaggatgcggataaataatgttttcaaggatttcctaaaggaatttaacaacaagaccatttgtgacagcagcgtgtccacgcatgacctgaaggtgaaatacttggctaccttggaaactttgacaaaacattacggtgctgaaatatttgagacttccatgttactgatttcatcagaaaatgagatgaattggtttcattcgaatgacggtggaaacgttctctactacgaagtgatggtgactgggaatcttggaatccagtggaggcataaaccaaatgttgtttctgttgaaaaggaaaaaaataaactgaagcggaaaaaactggaaaataaacacaagaaggatgaggagaaaaacaagatccgggaagagtggaacaatttttcttacttccctgaaatcactcacattgtaataaaggagtctgtggtcagcattaacaagcaggacaacaagaaaatggaactgaagctctcttcccacgaggaggccttgtcctttgtgtccctggtagatggctacttccggctcacagcagatgcccatcattacctctgcaccgacgtggcccccccgttgatcgtccacaacatacagaatggctgtcatggtccaatctgtacagaatacgccatcaataaattgcggcaagaaggaagcgaggaggggatgtacgtgctgaggtggagctgcaccgactttgacaacatcctcatgaccgtcacctgctttgagaagtctgagcaggtgcagggtgcccagaagcagttcaagaactttcagatcgaggtgcagaagggccgctacagtctgcacggttcggaccgcagcttccccagcttgggagacctcatgagccacctcaagaagcagatcctgcgcacggataacatcagcttcatgctaaaacgctgctgccagcccaagccccgagaaatctccaacctgctggtggctactaagaaagcccaggagtggcagcccgtctaccccatgagccagctgagtttcgatcggatcctcaagaaggatctggtgcagggcgagcaccttgggagaggcacgagaacacacatctattctgggaccctgatggattacaaggatgacgaaggaacttctgaagagaagaagataaaagtgatcctcaaagtcttagaccccagccacagggatatttccctggccttcttcgaggcagccagcatgatgagacaggtctcccacaaacacatcgtgtacctctatggcgtctgtgtccgcgacgtggagaatatcatggtggaagagtttgtggaagggggtcctctggatctcttcatgcaccggaaaagcgatgtccttaccacaccatggaaattcaaagttgccaaacagctggccagtgccctgagctacttggaggataaagacctggtccatggaaatgtgtgtactaaaaacctcctcctggcccgtgagggcatcgacagtgagtgtggcccattcatcaagctcagtgaccccggcatccccattacggtgctgtctaggcaagaatgcattgaacgaatcccatggattgctcctgagtgtgttgaggactccaagaacctgagtgtggctgctgacaagtggagctttggaaccacgctctgggaaatctgctacaatggcgagatccccttgaaagacaagacgctgattgagaaagagagattctatgaaagccggtgcaggccagtgacaccatcatgtaaggagctggctgacctcatgacccgctgcatgaactatgaccccaatcagaggcctttcttccgagccatcatgagagacattaataagcttgaagagcagaatccagatattgtttcagaaaaaaaaccagcaactgaagtggaccccacacattttgaaaagcgcttcctaaagaggatccgtgacttgggagagggccactttgggaaggttgagctctgcaggtatgaccccgaaggggacaatacaggggagcaggtggctgttaaatctctgaagcctgagagtggaggtaaccacatagctgatctgaaaaaggaaatcgagatcttaaggaacctctatcatgagaacattgtgaagtacaaaggaatctgcacagaagacggaggaaatggtattaagctcatcatggaatttctgccttcgggaagccttaaggaatatcttccaaagaataagaacaaaataaacctcaaacagcagctaaaatatgccgttcagatttgtaaggggatggactatttgggttctcggcaatacgttcaccgggacttggcagcaagaaatgtccttgttgagagtgaacaccaagtgaaaattggagacttcggtttaaccaaagcaattgaaaccgataaggagtattacaccgtcaaggatgaccgggacagccctgtgttttggtatgctccagaatgtttaatgcaatctaaattttatattgcctctgacgtctggtcttttggagtcactctgcatgagctgctgacttactgtgattcagattctagtcccatggctttgttcctgaaaatgataggcccaacccatggccagatgacagtcacaagacttgtgaatacgttaaaagaaggaaaacgcctgccgtgcccacctaactgtccagatgaggtttatcaacttatgaggaaatgctgggaattccaaccatccaatcggacaagctttcagaaccttattgaaggatttgaagcacttttaaaataagaagcatgaataacatttaaattccacagattatcaagtccttctcctgcaacaaatgcccaagtcattttttaaaaatttctaatgaaagaagtttgtgttctgtccaaaaagtcactgaactcatacttcagtacatatacatgtataaggcacactgtagtgcttaatatgtgtaaggacttcctctttaaatttggtaccagtaacttagtgacacataatgacaaccaaaatatttgaaagcacttaagcactcctccttgtggaaagaatataccaccatttcatctggctagttcaccatcacaactgcattaccaaaaggggatttttgaaaacgaggagttgaccaaaataatatctgaagatgattgcttttccctgctgccagctgatctgaaatgttttgctggcacattaatcatagataaagaaagattgatggacttagccctcaaatttcagtatctatacagtactagaccatgcattcttaaaatattagataccaggtagtatatattgtttctgtacaaaaatgactgtattctctcaccagtaggacttaaactttgtttctccagtggcttagctcctgttcctttgggtgatcactagcacccatttttgagaaagctggttctacatggggggatagctgtggaatagataatttgctgcatgttaattctcaagaactaagcctgtgccagtgctttcctaagcagtatacctttaatcagaactcattcccagaacctggatgctattacacatgcttttaagaaacgtcaatgtatatccttttataactctaccactttggggcaagctattccagcactggttttgaatgctgtatgcaaccagtctgaataccacatacgctgcactgttcttagagggtttccatacttaccaccgatctacaagggttgatccctgtttttaccatcaatcatcaccctgtggtgcaacacttgaaagacccggctagaggcactatggacttcaggatccactagacagttttcagtttgcttggaggtagctgggtaatcaaaaatgtttagtcattgattcaatgtgaacgattacggtctttatgaccaagagtctgaaaatctttttgttatgctgtttagtattcgtttgatattgttacttttcacctgttgagcccaaattcaggattggttcagtggcagcaatgaagttgccatttaaatttgttcatagcctacatcaccaaggtctctgtgtcaaacctgtggccactctatatgcactttgtttactctttatacaaataaatatactaaagacttta

SEQ ID NO: 422254 - DNA, 5576 bp, Homo sapiens
  misc_feature (5576)..(5576): n is a, c, g, or t
cgcggcggccgcggagtatcctggagctgcagacagtgcgggcctgcgcccagtcccggctgtcctcgccgcgacccctcctcagccctgggcgcgcgcacgctggggccccgcggggctggccgcctagcgagcctgccggtcgaccccagccagcgcagcgacggggcgctgcctggcccaggcgcacacggaagtgcgcttctctgaagtagctttggaaagtagagaagaaaatccagtttgcttcttggagaacactggacagctgaataaatgcagtatctaaatataaaagaggactgcaatgccatggctttctgtgctaaaatgaggagctccaagaagactgaggtgaacctggaggcccctgagccaggggtggaagtgatcttctatctgtcggacagggagcccctccggctgggcagtggagagtacacagcagaggaactgtgcatcagggctgcacaggcatgccgtatctctcctctttgtcacaacctctttgccctgtatgacgagaacaccaagctctggtatgctccaaatcgcaccatcaccgttgatgacaagatgtccctccggctccactaccggatgaggttctatttcaccaattggcatggaaccaacgacaatgagcagtcagtgtggcgtcattctccaaagaagcagaaaaatggctacgagaaaaaaaagattccagatgcaacccctctccttgatgccagctcactggagtatctgtttgctcagggacagtatgatttggtgaaatgcctggctcctattcgagaccccaagaccgagcaggatggacatgatattgagaacgagtgtctagggatggctgtcctggccatctcacactatgccatgatgaagaagatgcagttgccagaactgcccaaggacatcagctacaagcgatatattccagaaacattgaataagtccatcagacagaggaaccttctcaccaggatgcggataaataatgttttcaaggatttcctaaaggaatttaacaacaagaccatttgtgacagcagcgtgtccacgcatgacctgaaggtgaaatacttggctaccttggaaactttgacaaaacattacggtgctgaaatatttgagacttccatgttactgatttcatcagaaaatgagatgaattggtttcattcgaatgacggtggaaacgttctctactacgaagtgatggtgactgggaatcttggaatccagtggaggcataaaccaaatgttgtttctgttgaaaaggaaaaaaataaactgaagcggaaaaaactggaaaataaacacaagaaggatgaggagaaaaacaagatccgggaagagtggaacaatttttcttacttccctgaaatcactcacattgtaataaaggagtctgtggtcagcattaacaagcaggacaacaagaaaatggaactgaagctctcttcccacgaggaggccttgtcctttgtgtccctggtagatggctacttccggctcacagcagatgcccatcattacctctgcaccgacgtggcccccccgttgatcgtccacaacatacagaatggctgtcatggtccaatctgtacagaatacgccatcaataaattgcggcaagaaggaagcgaggaggggatgtacgtgctgaggtggagctgcaccgactttgacaacatcctcatgaccgtcacctgctttgagaagtctgagcaggtgcagggtgcccagaagcagttcaagaactttcagatcgaggtgcagaagggccgctacagtctgcacggttcggaccgcagcttccccagcttgggagacctcatgagccacctcaagaagcagatcctgcgcacggataacatcagcttcatgctaaaacgctgctgccagcccaagccccgagaaatctccaacctgctggtggctactaagaaagcccaggagtggcagcccgtctaccccatgagccagctgagtttcgatcggatcctcaagaaggatctggtgcagggcgagcaccttgggagaggcacgagaacacacatctattctgggaccctgatggattacaaggatgacgaaggaacttctgaagagaagaagataaaagtgatcctcaaagtcttagaccccagccacagggatatttccctggccttcttcgaggcagccagcatgatgagacaggtctcccacaaacacatcgtgtacctctatggcgtctgtgtccgcgacgtggagaatatcatggtggaagagtttgtggaagggggtcctctggatctcttcatgcaccggaaaagcgatgtccttaccacaccatggaaattcaaagttgccaaacagctggccagtgccctgagctacttggaggataaagacctggtccatggaaatgtgtgtactaaaaacctcctcctggcccgtgagggcatcgacagtgagtgtggcccattcatcaagctcagtgaccccggcatccccattacggtgctgtctaggcaagaatgcattgaacgaatcccatggattgctcctgagtgtgttgaggactccaagaacctgagtgtggctgctgacaagtggagctttggaaccacgctctgggaaatctgctacaatggcgagatccccttgaaagacaagacgctgattgagaaagagagattctatgaaagccggtgcaggccagtgacaccatcatgtaaggagctggctgacctcatgacccgctgcatgaactatgaccccaatcagaggcctttcttccgagccatcatgagagacattaataagcttgaagagcagaatccagatattgtttcagaaaaaaaaccagcaactgaagtggaccccacacattttgaaaagcgcttcctaaagaggatccgtgacttgggagagggccactttgggaaggttgagctctgcaggtatgaccccgaaggggacaatacaggggagcaggtggctgttaaatctctgaagcctgagagtggaggtaaccacatagctgatctgaaaaaggaaatcgagatcttaaggaacctctatcatgagaacattgtgaagtacaaaggaatctgcacagaagacggaggaaatggtattaagctcatcatggaatttctgccttcgggaagccttaaggaatatcttccaaagaataagaacaaaataaacctcaaacagcagctaaaatatgccgttcagatttgtaaggggatggactatttgggttctcggcaatacgttcaccgggacttggcagcaagaaatgtccttgttgagagtgaacaccaagtgaaaattggagacttcggtttaaccaaagcaattgaaaccgataaggagtattacaccgtcaaggatgaccgggacagccctgtgttttggtatgctccagaatgtttaatgcaatctaaattttatattgcctctgacgtctggtcttttggagtcactctgcatgagctgctgacttactgtgattcagattctagtcccatggctttgttcctgaaaatgataggcccaacccatggccagatgacagtcacaagacttgtgaatacgttaaaagaaggaaaacgcctgccgtgcccacctaactgtccagatgaggtttatcaacttatgaggaaatgctgggaattccaaccatccaatcggacaagctttcagaaccttattgaaggatttgaagcacttttaaaataagaagcatgaataacatttaaattccacagattatcaagtccttctcctgcaacaaatgcccaagtcattttttaaaaatttctaatgaaagaagtttgtgttctgtccaaaaagtcactgaactcatacttcagtacatatacatgtataaggcacactgtagtgcttaatatgtgtaaggacttcctctttaaatttggtaccagtaacttagtgacacataatgacaaccaaaatatttgaaagcacttaagcactcctccttgtggaaagaatataccaccatttcatctggctagttcaccatcacaactgcattaccaaaaggggatttttgaaaacgaggagttgaccaaaataatatctgaagatgattgcttttccctgctgccagctgatctgaaatgttttgctggcacattaatcatagataaagaaagattgatggacttagccctcaaatttcagtatctatacagtactagaccatgcattcttaaaatattagataccaggtagtatatattgtttctgtacaaaaatgactgtattctctcaccagtaggacttaaactttgtttctccagtggcttagctcctgttcctttgggtgatcactagcacccatttttgagaaagctggttctacatggggggatagctgtggaatagataatttgctgcatgttaattctcaagaactaagcctgtgccagtgctttcctaagcagtatacctttaatcagaactcattcccagaacctggatgctattacacatgcttttaagaaacgtcaatgtatatccttttataactctaccactttggggcaagctattccagcactggttttgaatgctgtatgcaaccagtctgaataccacatacgctgcactgttcttagagggtttccatacttaccaccgatctacaagggttgatccctgtttttaccatcaatcatcaccctgtggtgcaacacttgaaagacccggctagaggcactatggacttcaggatccactagacagttttcagtttgcttggaggtagctgggtaatcaaaaatgtttagtcattgattcaatgtgaacgattacggtctttatgaccaagagtctgaaaatctttttgttatgctgtttagtattcgtttgatattgttacttttcacctgttgagcccaaattcaggattggttcagtggcagcaatgaagttgccatttaaatttgttcatagcctacatcaccaaggtctctgtgtcaaacctgtggccactctatatgcactttgtttactctttatacaaataaatatactaaagactttaaaaagaaaaaaaaaaaaaaaaaaaaaaaaaaaaaaaaaaaacaaaaaaaaaaaaaacacacgaacacgcaaacacaaacccaacaaccgagagacaacacaacaaaagcaaagaacaaaaaacaaaaaggtgtggccggcgcgctcgcgcgccccaagaagcatctacaccaccaaacgagctgcggtcggagaggcgcgctgagcacccatattagaagtgaacaagtaagccaagagcgctaacgacgtggcatacaaagagagtcaccgctcgtcgtccgacacccaaccctgcgtcggggcgtggaaccacccaaccaaaaaaaacacaacgaggcggccgatgcacgacaaggtgccggcgtcagcagaagcaccacacacacagggagctacgccggtcgtcgagaaccacgtccagggggatacaacacagaaaggagaggacgacaacgagccgcaactacaataataaaccccaggccccgacgggcagaagn

SEQ ID NO: 422255 - DNA, 4768 bp, Homo sapiens
  misc_feature (4678)..(4678): n is a, c, g, or t
  misc_feature (4684)..(4684): n is a, c, g, or t
cgcggcggccgcggagtatcctggagctgcagacagtgcgggcctgcgcccagtcccggctgtcctcgccgcgacccctcctcagccctgggcgcgcgcacgctggggccccgcggggctggccgcctagcgagcctgccggtcgaccccagccagcgcagcgacggggcgctgcctggcccaggcgcacacggaagtgcgcttctctgaagtagctttggaaagtagagaagaaaatccagtttgcttcttggagaacactggacagctgaataaatgcagtatctaaatataaaagaggactgcaatgccatggctttctgtgctaaaatgaggagctccaagaagactgaggtgaacctggaggcccctgagccaggggtggaagtgatcttctatctgtcggacagggagcccctccggctgggcagtggagagtacacagcagaggaactgtgcatcagggctgcacaggcatgccgtatctctcctctttgtcacaacctctttgccctgtatgacgagaacaccaagctctggtatgctccaaatcgcaccatcaccgttgatgacaagatgtccctccggctccactaccggatgaggttctatttcaccaattggcatggaaccaacgacaatgagcagtcagtgtggcgtcattctccaaagaagcagaaaaatggctacgagaaaaaaaagattccagatgcaacccctctccttgatgccagctcactggagtatctgtttgctcagggacagtatgatttggtgaaatgcctggctcctattcgagaccccaagaccgagcaggatggacatgatattgagaacgagtgtctagggatggctgtcctggccatctcacactatgccatgatgaagaagatgcagttgccagaactgcccaaggacatcagctacaagcgatatattccagaaacattgaataagtccatcagacagaggaaccttctcaccaggatgcggataaataatgttttcaaggatttcctaaaggaatttaacaacaagaccatttgtgacagcagcgtgtccacgcatgacctgaaggtgaaatacttggctaccttggaaactttgacaaaacattacggtgctgaaatatttgagacttccatgttactgatttcatcagaaaatgagatgaattggtttcattcgaatgacggtggaaacgttctctactacgaagtgatggtgactgggaatcttggaatccagtggaggcataaaccaaatgttgtttctgttgaaaaggaaaaaaataaactgaagcggaaaaaactggaaaataaacacaagaaggatgaggagaaaaacaagatccgggaagagtggaacaatttttcttacttccctgaaatcactcacattgtaataaaggagtctgtggtcagcattaacaagcaggacaacaagaaaatggaactgaagctctcttcccacgaggaggccttgtcctttgtgtccctggtagatggctacttccggctcacagcagatgcccatcattacctctgcaccgacgtggcccccccgttgatcgtccacaacatacagaatggctgtcatggtccaatctgtacagaatacgccatcaataaattgcggcaagaaggaagcgaggaggggatgtacgtgctgaggtggagctgcaccgactttgacaacatcctcatgaccgtcacctgctttgagaagtctgagcaggtgcagggtgcccagaagcagttcaagaactttcagatcgaggtgcagaagggccgctacagtctgcacggttcggaccgcagcttccccagcttgggagacctcatgagccacctcaagaagcagatcctgcgcacggataacatcagcttcatgctaaaacgctgctgccagcccaagccccgagaaatctccaacctgctggtggctactaagaaagcccaggagtggcagcccgtctaccccatgagccagctgagtttcgatcggatcctcaagaaggatctggtgcagggcgagcaccttgggagaggcacgagaacacacatctattctgggaccctgatggattacaaggatgacgaaggaacttctgaagagaagaagataaaagtgatcctcaaagtcttagaccccagccacagggatatttccctggccttcttcgaggcagccagcatgatgagacaggtctcccacaaacacatcgtgtacctctatggcgtctgtgtccgcgacgtggagaatatcatggtggaagagtttgtggaagggggtcctctggatctcttcatgcaccggaaaagcgatgtccttaccacaccatggaaattcaaagttgccaaacagctggccagtgccctgagctacttggaggataaagacctggtccatggaaatgtgtgtactaaaaacctcctcctggcccgtgagggcatcgacagtgagtgtggcccattcatcaagctcagtgaccccggcatccccattacggtgctgtctaggcaagaatgcattgaacgaatcccatggattgctcctgagtgtgttgaggactccaagaacctgagtgtggctgctgacaagtggagctttggaaccacgctctgggaaatctgctacaatggcgagatccccttgaaagacaagacgctgattgagaaagagagattctatgaaagccggtgcaggccagtgacaccatcatgtaaggagctggctgacctcatgacccgctgcatgaactatgaccccaatcagaggcctttcttccgagccatcatgagagacattaataagcttgaagagcagaatccagatattgtttcagaaaaaaaaccagcaactgaagtggaccccacacattttgaaaagcgcttcctaaagaggatccgtgacttgggagagggccactttgggaaggttgagctctgcaggtatgaccccgaaggggacaatacaggggagcaggtggctgttaaatctctgaagcctgagagtggaggtaaccacatagctgatctgaaaaaggaaatcgagatcttaaggaacctctatcatgagaacattgtgaagtacaaaggaatctgcacagaagacggaggaaatggtattaagctcatcatggaatttctgccttcgggaagccttaaggaatatcttccaaagaataagaacaaaataaacctcaaacagcagctaaaatatgccgttcagatttgtaaggggatggactatttgggttctcggcaatacgttcaccgggacttggcagcaagaaatgtccttgttgagagtgaacaccaagtgaaaattggagacttcggtttaaccaaagcaattgaaaccgataaggagtattacaccgtcaaggatgaccgggacagccctgtgttttggtatgctccagaatgtttaatgcaatctaaattttatattgcctctgacgtctggtcttttggagtcactctgcatgagctgctgacttactgtgattcagattctagtcccatggctttgttcctgaaaatgataggcccaacccatggccagatgacagtcacaagacttgtgaatacgttaaaagaaggaaaacgcctgccgtgcccacctaactgtccagatgaggtttatcaacttatgaggaaatgctgggaattccaaccatccaatcggacaagctttcagaaccttattgaaggatttgaagcacttttaaaataagaagcatgaataacatttaaattccacagattatcaagtccttctcctgcaacaaatgcccaagtcattttttaaaaatttctaatgaaagaagtttgtgttctgtccaaaaagtcactgaactcatacttcagtacatatacatgtataaggcacactgtagtgcttaatatgtgtaaggacttcctctttaaatttggtaccagtaacttagtgacacataatgacaaccaaaatatttgaaagcacttaagcactcctccttgtggaaagaatataccaccatttcatctggctagttcaccatcacaactgcattaccaaaaggggatttttgaaaacgaggagttgaccaaaataatatctgaagatgattgcttttccctgctgccagctgatctgaaatgttttgctggcacattaatcatagataaagaaagattgatggacttagccctcaaatttcagtatctatacagtactagaccatgcattcttaaaatattagataccaggtagtatatattgtttctgtacaaaaatgactgtattctctcaccagtaggacttaaactttgtttctccagtggcttagctcctgttcctttgggtgatcactagcacccatttttgagaaagctggttctacatggggggatagctgtggaatagataatttgctgcatgttaattctcaagaactaagcctgtgccagtgctttcctaagcagtatacctttaatcagaactcattcccagaacctggatgctattacacatgcttttaagaaacgtcaatgtatatccttttataactctaccactttggggcaagctattccagcactggttttgaatgcaaaagaggacagaggataaataaaacacacacgcctgcatatacaacaactagatacattataatgaaatttaaggnaatganagacaaaaagcaaattctaagagtttccaacaaggaagagtaggtcacctataaaggggtacatcggaatgtcatcatatacct

SEQ ID NO: 422256 - DNA, 2063 bp, Homo sapiens
gtgatgggaaaggcgatgatctagaaatgtagatgtgatcagatgtaaaatgtttgtatgtctagcaagtgattgtgccccgacatagcggggaacaatcacttcatcagaaaaaaaaaattgtcagtgatatgtgaatgaaatgacatttctattttttctgatgaagtgatagataatacaatctaaagtgactttagcaatgtgcttgacttttacttctctctctcaggggatggactatttgggttctcggcaatacgttcaccgggacttggcagcaagaaatgtccttgttgagagtgaacaccaagtgaaaattggagacttcggtttaaccaaagcaattgaaaccgataaggagtattacaccgtcaaggatgaccgggacagccctgtgttttggtatgctccagaatgtttaatgcaatctaaattttatattgcctctgacgtctggtcttttggagtcactctgcatgagctgctgacttactgtgattcagattctagtcccatggctttgttcctgaaaatgataggcccaacccatggccagatgacagtcacaagacttgtgaatacgttaaaagaaggaaaacgcctgccgtgcccacctaactgtccagatgaggtttatcaacttatgaggaaatgctgggaattccaaccatccaatcggacaagctttcagaaccttattgaaggatttgaagcacttttaaaataagaagcatgaataacatttaaattccacagattatcaagtccttctcctgcaacaaatgcccaagtcattttttaaaaatttctaatgaaagaagtttgtgttctgtccaaaaagtcactgaactcatacttcagtacatatacatgtataaggcacactgtagtgcttaatatgtgtaaggacttcctctttaaatttggtaccagtaacttagtgacacataatgacaaccaaaatatttgaaagcacttaagcactcctccttgtggaaagaatataccaccatttcatctggctagttcaccatcacaactgcattaccaaaaggggatttttgaaaacgaggagttgaccaaaataatatctgaagatgattgcttttccctgctgccagctgatctgaaatgttttgctggcacattaatcatagataaagaaagattgatggacttagccctcaaatttcagtatctatacagtactagaccatgcattcttaaaatattagataccaggtagtatatattgtttctgtacaaaaatgactgtattctctcaccagtaggacttaaactttgtttctccagtggcttagctcctgttcctttgggtgatcactagcacccatttttgagaaagctggttctacatggggggatagctgtggaatagataatttgctgcatgttaattctcaagaactaagcctgtgccagtgctttcctaagcagtatacctttaatcagaactcattcccagaacctggatgctattacacatgcttttaagaaacgtcaatgtatatccttttataactctaccactttggggcaagctattccagcactggttttgaatgctgtatgcaaccagtctgaataccacatacgctgcactgttcttagagggtttccatacttaccaccgatctacaagggttgatccctgtttttaccatcaatcatcaccctgtggtgcaacacttgaaagacccggctagaggcactatggacttcaggatccactagacagttttcagtttgcttggaggtagctgggtaatcaaaaatgtttagtcattgattcaatgtgaacgattacggtctttatgaccaagagtctgaaaatctttttgttatgctgtttagtattcgtttgatattgttacttttcacctgttgagcccaaattcaggattggttcagtggcagcaatgaagttgccatttaaatttgttcatagcctacatcaccaaggtctctgtgtcaaacctgtggccactctatatgcactttgtttactctttatacaaataaatatactaaagacttta

SEQ ID NO: 422257 - DNA, 1996 bp, Homo sapiens
  misc_feature (22)..(22): n is a, c, g, or t
gactcctagaggatccccagcnggggaacaatcacttcatcagaaaaaaaaaattgtcagtgatatgtgaatgaaatgacatttctattttttctgatgaagtgatagataatacaatctaaagtgactttagcaatgtgcttgacttttacttctctctctcaggggatggactatttgggttctcggcaatacgttcaccgggacttggcagcaagaaatgtccttgttgagagtgaacaccaagtgaaaattggagacttcggtttaaccaaagcaattgaaaccgataaggagtattacaccgtcaaggatgaccgggacagccctgtgttttggtatgctccagaatgtttaatgcaatctaaattttatattgcctctgacgtctggtcttttggagtcactctgcatgagctgctgacttactgtgattcagattctagtcccatggctttgttcctgaaaatgataggcccaacccatggccagatgacagtcacaagacttgtgaatacgttaaaagaaggaaaacgcctgccgtgcccacctaactgtccagatgaggtttatcaacttatgaggaaatgctgggaattccaaccatccaatcggacaagctttcagaaccttattgaaggatttgaagcacttttaaaataagaagcatgaataacatttaaattccacagattatcaagtccttctcctgcaacaaatgcccaagtcattttttaaaaatttctaatgaaagaagtttgtgttctgtccaaaaagtcactgaactcatacttcagtacatatacatgtataaggcacactgtagtgcttaatatgtgtaaggacttcctctttaaatttggtaccagtaacttagtgacacataatgacaaccaaaatatttgaaagcacttaagcactcctccttgtggaaagaatataccaccatttcatctggctagttcaccatcacaactgcattaccaaaaggggatttttgaaaacgaggagttgaccaaaataatatctgaagatgattgcttttccctgctgccagctgatctgaaatgttttgctggcacattaatcatagataaagaaagattgatggacttagccctcaaatttcagtatctatacagtactagaccatgcattcttaaaatattagataccaggtagtatatattgtttctgtacaaaaatgactgtattctctcaccagtaggacttaaactttgtttctccagtggcttagctcctgttcctttgggtgatcactagcacccatttttgagaaagctggttctacatggggggatagctgtggaatagataatttgctgcatgttaattctcaagaactaagcctgtgccagtgctttcctaagcagtatacctttaatcagaactcattcccagaacctggatgctattacacatgcttttaagaaacgtcaatgtatatccttttataactctaccactttggggcaagctattccagcactggttttgaatgctgtatgcaaccagtctgaataccacatacgctgcactgttcttagagggtttccatacttaccaccgatctacaagggttgatccctgtttttaccatcaatcatcaccctgtggtgcaacacttgaaagacccggctagaggcactatggacttcaggatccactagacagttttcagtttgcttggaggtagctgggtaatcaaaaatgtttagtcattgattcaatgtgaacgattacggtctttatgaccaagagtctgaaaatctttttgttatgctgtttagtattcgtttgatattgttacttttcacctgttgagcccaaattcaggattggttcagtggcagcaatgaagttgccatttaaatttgttcatagcctacatcaccaaggtctctgtgtcaaacctgtggccactctatatgcactttgtttactctttatacaaataaatatactaaagacttta

SEQ ID NO: 422258 - DNA, 1455 bp, Homo sapiens
tgttgttacttctttctttttacgaggtttatcaacttatgaggaaatgctgggaattccaaccatccaatcggacaagctttcagaaccttattgaaggatttgaagcacttttaaaataagaagcatgaataacatttaaattccacagattatcaagtccttctcctgcaacaaatgcccaagtcattttttaaaaatttctaatgaaagaagtttgtgttctgtccaaaaagtcactgaactcatacttcagtacatatacatgtataaggcacactgtagtgcttaatatgtgtaaggacttcctctttaaatttggtaccagtaacttagtgacacataatgacaaccaaaatatttgaaagcacttaagcactcctccttgtggaaagaatataccaccatttcatctggctagttcaccatcacaactgcattaccaaaaggggatttttgaaaacgaggagttgaccaaaataatatctgaagatgattgcttttccctgctgccagctgatctgaaatgttttgctggcacattaatcatagataaagaaagattgatggacttagccctcaaatttcagtatctatacagtactagaccatgcattcttaaaatattagataccaggtagtatatattgtttctgtacaaaaatgactgtattctctcaccagtaggacttaaactttgtttctccagtggcttagctcctgttcctttgggtgatcactagcacccatttttgagaaagctggttctacatggggggatagctgtggaatagataatttgctgcatgttaattctcaagaactaagcctgtgccagtgctttcctaagcagtatacctttaatcagaactcattcccagaacctggatgctattacacatgcttttaagaaacgtcaatgtatatccttttataactctaccactttggggcaagctattccagcactggttttgaatgctgtatgcaaccagtctgaataccacatacgctgcactgttcttagagggtttccatacttaccaccgatctacaagggttgatccctgtttttaccatcaatcatcaccctgtggtgcaacacttgaaagacccggctagaggcactatggacttcaggatccactagacagttttcagtttgcttggaggtagctgggtaatcaaaaatgtttagtcattgattcaatgtgaacgattacggtctttatgaccaagagtctgaaaatctttttgttatgctgtttagtattcgtttgatattgttacttttcacctgttgagcccaaattcaggattggttcagtggcagcaatgaagttgccatttaaatttgttcatagcctacatcaccaaggtctctgtgtcaaacctgtggccactctatatgcactttgtttactctttatacaaataaatatactaaagacttta

SEQ ID NO: 422259 - DNA, 3797 bp, Homo sapiens
cgcggcggccgcggagtatcctggagctgcagacagtgcgggcctgcgcccagtcccggctgtcctcgccgcgacccctcctcagccctgggcgcgcgcacgctggggccccgcggggctggccgcctagcgagcctgccggtcgaccccagccagcgcagcgacggggcgctgcctggcccaggcgcacacggaagtgcgcttctctgaagtagctttggaaagtagagaagaaaatccagtttgcttcttggagaacactggacagctgaataaatgcagtatctaaatataaaagaggactgcaatgccatggctttctgtgctaaaatgaggagctccaagaagactgaggtgaacctggaggcccctgagccaggggtggaagtgatcttctatctgtcggacagggagcccctccggctgggcagtggagagtacacagcagaggaactgtgcatcagggctgcacaggcatgccgtatctctcctctttgtcacaacctctttgccctgtatgacgagaacaccaagctctggtatgctccaaatcgcaccatcaccgttgatgacaagatgtccctccggctccactaccggatgaggttctatttcaccaattggcatggaaccaacgacaatgagcagtcagtgtggcgtcattctccaaagaagcagaaaaatggctacgagaaaaaaaagattccagatgcaacccctctccttgatgccagctcactggagtatctgtttgctcagggacagtatgatttggtgaaatgcctggctcctattcgagaccccaagaccgagcaggatggacatgatattgagaacgagtgtctagggatggctgtcctggccatctcacactatgccatgatgaagaagatgcagttgccagaactgcccaaggacatcagctacaagcgatatattccagaaacattgaataagtccatcagacagaggaaccttctcaccaggatgcggataaataatgttttcaaggatttcctaaaggaatttaacaacaagaccatttgtgacagcagcgtgtccacgcatgacctgaaggtgaaatacttggctaccttggaaactttgacaaaacattacggtgctgaaatatttgagacttccatgttactgatttcatcagaaaatgagatgaattggtttcattcgaatgacggtggaaacgttctctactacgaagtgatggtgactgggaatcttggaatccagtggaggcataaaccaaatgttgtttctgttgaaaaggaaaaaaataaactgaagcggaaaaaactggaaaataaacacaagaaggatgaggagaaaaacaagatccgggaagagtggaacaatttttcttacttccctgaaatcactcacattgtaataaaggagtctgtggtcagcattaacaagcaggacaacaagaaaatggaactgaagctctcttcccacgaggaggccttgtcctttgtgtccctggtagatggctacttccggctcacagcagatgcccatcattacctctgcaccgacgtggcccccccgttgatcgtccacaacatacagaatggctgtcatggtccaatctgtacagaatacgccatcaataaattgcggcaagaaggaagcgaggaggggatgtacgtgctgaggtggagctgcaccgactttgacaacatcctcatgaccgtcacctgctttgagaagtctgagcaggtgcagggtgcccagaagcagttcaagaactttcagatcgaggtgcagaagggccgctacagtctgcacggttcggaccgcagcttccccagcttgggagacctcatgagccacctcaagaagcagatcctgcgcacggataacatcagcttcatgctaaaacgctgctgccagcccaagccccgagaaatctccaacctgctggtggctactaagaaagcccaggagtggcagcccgtctaccccatgagccagctgagtttcgatcggatcctcaagaaggatctggtgcagggcgagcaccttgggagaggcacgagaacacacatctattctgggaccctgatggattacaaggatgacgaaggaacttctgaagagaagaagataaaagtgatcctcaaagtcttagaccccagccacagggatatttccctggccttcttcgaggcagccagcatgatgagacaggtctcccacaaacacatcgtgtacctctatggcgtctgtgtccgcgacgtggagaatatcatggtggaagagtttgtggaagggggtcctctggatctcttcatgcaccggaaaagcgatgtccttaccacaccatggaaattcaaagttgccaaacagctggccagtgccctgagctacttggaggataaagacctggtccatggaaatgtgtgtactaaaaacctcctcctggcccgtgagggcatcgacagtgagtgtggcccattcatcaagctcagtgaccccggcatccccattacggtgctgtctaggcaagaatgcattgaacgaatcccatggattgctcctgagtgtgttgaggactccaagaacctgagtgtggctgctgacaagtggagctttggaaccacgctctgggaaatctgctacaatggcgagatccccttgaaagacaagacgctgattgagaaagagagattctatgaaagccggtgcaggccagtgacaccatcatgtaaggagctggctgacctcatgacccgctgcatgaactatgaccccaatcagaggcctttcttccgagccatcatgagagacattaataagcttgaagagcagaatccagatattgtttcagaaaaaaaaccagcaactgaagtggaccccacacattttgaaaagcgcttcctaaagaggatccgtgacttgggagagggccactttgggaaggttgagctctgcaggtatgaccccgaaggggacaatacaggggagcaggtggctgttaaatctctgaagcctgagagtggaggtaaccacatagctgatctgaaaaaggaaatcgagatcttaaggaacctctatcatgagaacattgtgaagtacaaaggaatctgcacagaagacggaggaaatggtattaagctcatcatggaatttctgccttcgggaagccttaaggaatatcttccaaagaataagaacaaaataaacctcaaacagcagctaaaatatgccgttcagatttgtaaggggatggactatttgggttctcggcaatacgttcaccgggacttggcagcaagaaatgtccttgttgagagtgaacaccaagtgaaaattggagacttcggtttaaccaaagcaattgaaaccgataaggagtattacaccgtcaaggatgaccgggacagccctgtgttttggtatgctccagaatgtttaatgcaatctaaattttatattgcctctgacgtctggtcttttggagtcactctgcatgagctgctgacttactgtgattcagattctagtcccatggctttgttcctgaaaatgataggcccaacccatggccagatgacagtcacaagacttgtgaatacgttaaaagaaggaaaacgcctgccgtgcccacctaactgtccagatgaggtttatcaacttatgaggaaatgctgggaattccaaccatccaatcggacaagctttcagaaccttattgaaggatttgaagcacttttaaatgttattcatgcttcttattttaaaaggtcgacgcggccgcgaatttagtagtagtagta

SEQ ID NO: 422260 - DNA, 1036 bp, Homo sapiens
caccatctactagggcattattatgcgagaattttcgataacaaggtgttgaccacgattatatcttaatattcttgcctttccccgtggtgtgtaattttttctccctaaattgctggcacattaatcatagataaagaaagattgatggacttagccctcaaatttcagtatctatacagtactagaccatgcattcttaaaatattagataccaggtagtatatattgtttctgtacaaaaatgactgtattctctcaccagtaggacttaaactttgtttctccagtggcttagctcctgttcctttgggtgatcactagcacccatttttgagaaagctggttctacatggggggatagctgtggaatagataatttgctgcatgttaattctcaagaactaagcctgtgccagtgctttcctaagcagtatacctttaatcagaactcattcccagaacctggatgctattacacatgcttttaagaaacgtcaatgtatatccttttataactctaccactttggggcaagctattccagcactggttttgaatgctgtatgcaaccagtctgaataccacatacgctgcactgttcttagagggtttccatacttaccaccgatctacaagggttgatccctgtttttaccatcaatcatcaccctgtggtgcaacacttgaaagacccggctagaggcactatggacttcaggatccactagacagttttcagtttgcttggaggtagctgggtaatcaaaaatgtttagtcattgattcaatgtgaacgattacggtctttatgaccaagagtctgaaaatctttttgttatgctgtttagtattcgtttgatattgttacttttcacctgttgagcccaaattcaggattggttcagtggcagcaatgaagttgccatttaaatttgttcatagcctacatcaccaaggtctctgtgtcaaacctgtggccactctatatgcactttgtttactctttatacaaataaatatactaaagacttta

SEQ ID NO: 422261 - DNA, 2275 bp, Homo sapiens
cgcggcggccgcggagtatcctggagctgcagacagtgcgggcctgcgcccagtcccggctgtcctcgccgcgacccctcctcagccctgggcgcgcgcacgctggggccccgcggggctggccgcctagcgagcctgccggtcgaccccagccagcgcagcgacggggcgctgcctggcccaggcgcacacggaagtgcgcttctctgaagtagctttggaaagtagagaagaaaatccagtttgcttcttggagaacactggacagctgaataaatgcagtatctaaatataaaagaggactgcaatgccatggctttctgtgctaaaatgaggagctccaagaagactgaggtgaacctggaggcccctgagccaggggtggaagtgatcttctatctgtcggacagggagcccctccggctgggcagtggagagtacacagcagaggaactgtgcatcagggctgcacaggcatgccgtatctctcctctttgtcacaacctctttgccctgtatgacgagaacaccaagctctggtatgctccaaatcgcaccatcaccgttgatgacaagatgtccctccggctccactaccggatgaggttctatttcaccaattggcatggaaccaacgacaatgagcagtcagtgtggcgtcattctccaaagaagcagaaaaatggctacgagaaaaaaaagattccagatgcaacccctctccttgatgccagctcactggagtatctgtttgctcagggacagtatgatttggtgaaatgcctggctcctattcgagaccccaagaccgagcaggatggacatgatattgagaacgagtgtctagggatggctgtcctggccatctcacactatgccatgatgaagaagatgcagttgccagaactgcccaaggacatcagctacaagcgatatattccagaaacattgaataagtccatcagacagaggaaccttctcaccaggatgcggataaataatgttttcaaggatttcctaaaggaatttaacaacaagaccatttgtgacagcagcgtgtccacgcatgacctgaaggtgaaatacttggctaccttggaaactttgacaaaacattacggtgctgaaatatttgagacttccatgttactgatttcatcagaaaatgagatgaattggtttcattcgaatgacggtggaaacgttctctactacgaagtgatggtgactgggaatcttggaatccagtggaggcataaaccaaatgttgtttctgttgaaaaggaaaaaaataaactgaagcggaaaaaactggaaaataaacacaagaaggatgaggagaaaaacaagatccgggaagagtggaacaatttttcttacttccctgaaatcactcacattgtaataaaggagtctgtggtcagcattaacaagcaggacaacaagaaaatggaactgaagctctcttcccacgaggaggccttgtcctttgtgtccctggtagatggctacttccggctcacagcagatgcccatcattacctctgcaccgacgtggcccccccgttgatcgtccacaacatacagaatggctgtcatggtccaatctgtacagaatacgccatcaataaattgcggcaagaaggaagcgaggaggggatgtacgtgctgaggtggagctgcaccgactttgacaacatcctcatgaccgtcacctgctttgagaagtctgagcaggtgcagggtgcccagaagcagttcaagaactttcagatcgaggtgcagaagggccgctacagtctgcacggttcggaccgcagcttccccagcttgggagacctcatgagccacctcaagaagcagatcctgcgcacggataacatcagcttcatgctaaaacgctgctgccagcccaagccccgagaaatctccaacctgctggtggctactaagaaagcccaggagtggcagcccgtctaccccatgagccagctgagtttcgatcggatcctcaagaaggatctggtgcagggcgagcaccttgggagaggcacgagaacacacatctattctgggaccctgatggattacaaggatgacgaaggaacttctgaagagaagaagataaaagtgatcctcaaagtcttagaccccagccacagggatatttccctggccttcttcgaggcagccagcatgatgagacaggtctcccacaaactcttccaccatgatattctccacgtcgcggacacagacgccatagaggtacacg

SEQ ID NO: 422262 - DNA, 1382 bp, Homo sapiens
  misc_feature (1343)..(1343): n is a, c, g, or t
cgcggcggccgcggagtatcctggagctgcagacagtgcgggcctgcgcccagtcccggctgtcctcgccgcgacccctcctcagccctgggcgcgcgcacgctggggccccgcggggctggccgcctagcgagcctgccggtcgaccccagccagcgcagcgacggggcgctgcctggcccaggcgcacacggaagtgcgcttctctgaagtagctttggaaagtagagaagaaaatccagtttgcttcttggagaacactggacagctgaataaatgcagtatctaaatataaaagaggactgcaatgccatggctttctgtgctaaaatgaggagctccaagaagactgaggtgaacctggaggcccctgagccaggggtggaagtgatcttctatctgtcggacagggagcccctccggctgggcagtggagagtacacagcagaggaactgtgcatcagggctgcacaggcatgccgtatctctcctctttgtcacaacctctttgccctgtatgacgagaacaccaagctctggtatgctccaaatcgcaccatcaccgttgatgacaagatgtccctccggctccactaccggatgaggttctatttcaccaattggcatggaaccaacgacaatgagcagtcagtgtggcgtcattctccaaagaagcagaaaaatggctacgagaaaaaaaagattccagatgcaacccctctccttgatgccagctcactggagtatctgtttgctcagggacagtatgatttggtgaaatgcctggctcctattcgagaccccaagaccgagcaggatggacatgatattgagaacgagtgtctagggatggctgtcctggccatctcacactatgccatgatgaagaagatgcagttgccagaactgcccaaggacatcagctacaagcgatatattccagaaacattgaataagtccatcagacagaggaaccttctcaccaggatgcggataaataatgttttcaaggatttcctaaaggaatttaacaacaagaccatttgtgacagcagcgtgtccacgcatgacctgaaggtgaaatacttggctaccttggaaactttgacaaaacattacggtgctgaaatatttgagacttccatgttactgatttcatcagaaaatgagatgaattggtttcattcgaatgacggtggaaacgttctctactacgaagtgatggtgactgggaatcttggaatccagtggaggcataaaccaaatgttgtttctgttgaaaaggaaaaaaataaactgaagcggaaaaaactggaaaataaacaaggagtcggccgaaagtnttttttgttttcatctcctgtgcgccccacgccccgcgt

SEQ ID NO: 422263 - DNA, 846 bp, Homo sapiens
cgcaagatttaaaagataaaattagcagggtatggtaatgcattaggtatgaaatacagtgagggatctaagctggcaccaaggaatctggtttgggtgtgactatgttgaagatgcctttgggtgatcactagcacccatttttgagaaagctggttctacatggggggatagctgtggaatagataatttgctgcatgttaattctcaagaactaagcctgtgccagtgctttcctaagcagtatacctttaatcagaactcattcccagaacctggatgctattacacatgcttttaagaaacgtcaatgtatatccttttataactctaccactttggggcaagctattccagcactggttttgaatgctgtatgcaaccagtctgaataccacatacgctgcactgttcttagagggtttccatacttaccaccgatctacaagggttgatccctgtttttaccatcaatcatcaccctgtggtgcaacacttgaaagacccggctagaggcactatggacttcaggatccactagacagttttcagtttgcttggaggtagctgggtaatcaaaaatgtttagtcattgattcaatgtgaacgattacggtctttatgaccaagagtctgaaaatctttttgttatgctgtttagtattcgtttgatattgttacttttcacctgttgagcccaaattcaggattggttcagtggcagcaatgaagttgccatttaaatttgttcatagcctacatcaccaaggtctctgtgtcaaacctgtggccactctatatgcactttgtttactctttatacaaataaatatactaaagacttta

SEQ ID NO: 422264 - DNA, 500 bp, Homo sapiens
gtgatgggaaaggcgatgatctagaaatgtagatgtgatcagatgtaaaatgtttgtatgtctagcaagtgattgtgccccgacatagcggggaacaatcacttcatcagaaaaaaaaaattgtcagtgatatgtgaatgaaatgacatttctattttttctgatgaagtgatagataatacaatctaaagtgactttagcaatgtgcttgacttttacttctctctctcaggggatggactatttgggttctcggcaatacgttcaccgggacttggcagcaagaaatgtccttgttgagagtgaacaccaagtgttgttcccgtagcggggaacaatcacttgaatctttacctttgggaactagcattcacaaaatggtgaatactaactcttatcctgatttgctacaagaaactagtctagaatgagcagtgtaatttttagcactacactctttctatgcttcacacattacagacttgaagatgaagattctg

SEQ ID NO: 422265 - DNA, 672 bp, Homo sapiens
aaacaggctccaaaagcttgttacttgcttgtagtcaaacagaaggcagagctgcgaatcaaatccaggtttgtctcgacatgccactagctcatacttcccttggatcagccactaaatggctttcactccagtgagcagcgaccagcaccagaattatggaacatttatcaacagcctaaaataaagacaacacgaggagaatttggttgcttatatagattcaaggtacaatcctgctggattctggaagaaatatcacagtgtgcatgcacagaagtacgaccatgtgaagaggtagcaagagagcagcaatctacaagccaaggaaagaggccacagaggaaaccaaccctgccagcatcttgatcttggacttccagcttccagaactaaccagggaccccactcccatgccgacagtatgggctgctgtcttcaggaccattgcaagtgtccttcacggttcggttcacatttcacaagccccatgaagtctatctggattttcgatggatgtcttgccttttcctctacacactacaggaagagtggccacccctgccaagggcctagtatagtaccctatacatgtagctgatcagttgattgttactgatcatatgtatcctgcatcatgttataaaaaattaacacagtgcttggcacata

SEQ ID NO: 422266 - DNA, 511 bp, Homo sapiens
cccccccgttgatcgtccacaacatacagaatggctgtcatggtccaatctggttggtcctagaaccttatcagttgcctttggtgtgcagagagcccgtgttttagtgatggggcatgtcatcattgtttaggtcaggccagttgaccatgctgcctggtacttgttggctgtcctcctttcctccctgctgtccaagctctggtcaggccttcctgtaatctcctaccatcctctttgcagcagcccctcaatgctgcttctttacttggatctctcttcatagtttaaccccctcacctctccatagctgatcaagaagtactacactttctgatttcttgctgtgtcaaacaatgtgggcaattcaagaaacactgaacacagctgagcgtgctgccatgtgcctgtagtttcagctccttgagaggctgaggtgggaggatcacttgagcccaggagttcaattctagcctgggcaacatagcaatatcccatctctaaaatatat

SEQ ID NO: 422267 - DNA, 619 bp, Homo sapiens
tacctgaatgtcaagagctaaaaaacaaaacaaacaaacaaacaaaaatacttttctcagtttttgccaattgggcgtgtactggggccctccttcaacacttagccaggctttcactgagcttaggaatcagctgtgatgaaacctgaagtttttaatcatgtcttttctgagcaagcatcttgccctgggcacatgcatggctggctaaattccctgcattcacaggtgcttctgattgtcctaacttcccaaagaaactctgttctcaaattttttgcccaagccttaggtggtttattgcatgtctcaactgtgaccttttgcctcaggccttgttcttctaccttatgatgattcaagcaatgcctgctgcttttccaatctgggttagttcagagttaggcaaacagaggtgagcattttgtgccagtccttcacgtacagacaggttaaaaccgatctacacaataatttgcaaataaggtctgctttgctccctctagaaccagggaccccactcccatgccgacagtatgggctgctgtcttcaggaccattgcaaggtaaggtgtggaataacagcaaataaaaatgccacaaaactttcctaccattt

SEQ ID NO: 422268 - DNA, 5049 bp, Homo sapiens
agttcagagttaggcaaacagaggtgagcattttgtgccagtccttcacgtacagacaggttaaaaccgatctacacaataatttgcaaataaggtctgctttgctccctctagaaccagggaccccactcccatgccgacagtatgggctgctgtcttcaggaccattgcaagcgcttctctgaagtagctttggaaagtagagaagaaaatccagtttgcttcttggagaacactggacagctgaataaatgcagtatctaaatataaaagaggactgcaatgccatggctttctgtgctaaaatgaggagctccaagaagactgaggtgaacctggaggcccctgagccaggggtggaagtgatcttctatctgtcggacagggagcccctccggctgggcagtggagagtacacagcagaggaactgtgcatcagggctgcacaggcatgccgtatctctcctctttgtcacaacctctttgccctgtatgacgagaacaccaagctctggtatgctccaaatcgcaccatcaccgttgatgacaagatgtccctccggctccactaccggatgaggttctatttcaccaattggcatggaaccaacgacaatgagcagtcagtgtggcgtcattctccaaagaagcagaaaaatggctacgagaaaaaaaagattccagatgcaacccctctccttgatgccagctcactggagtatctgtttgctcagggacagtatgatttggtgaaatgcctggctcctattcgagaccccaagaccgagcaggatggacatgatattgagaacgagtgtctagggatggctgtcctggccatctcacactatgccatgatgaagaagatgcagttgccagaactgcccaaggacatcagctacaagcgatatattccagaaacattgaataagtccatcagacagaggaaccttctcaccaggatgcggataaataatgttttcaaggatttcctaaaggaatttaacaacaagaccatttgtgacagcagcgtgtccacgcatgacctgaaggtgaaatacttggctaccttggaaactttgacaaaacattacggtgctgaaatatttgagacttccatgttactgatttcatcagaaaatgagatgaattggtttcattcgaatgacggtggaaacgttctctactacgaagtgatggtgactgggaatcttggaatccagtggaggcataaaccaaatgttgtttctgttgaaaaggaaaaaaataaactgaagcggaaaaaactggaaaataaacacaagaaggatgaggagaaaaacaagatccgggaagagtggaacaatttttcttacttccctgaaatcactcacattgtaataaaggagtctgtggtcagcattaacaagcaggacaacaagaaaatggaactgaagctctcttcccacgaggaggccttgtcctttgtgtccctggtagatggctacttccggctcacagcagatgcccatcattacctctgcaccgacgtggcccccccgttgatcgtccacaacatacagaatggctgtcatggtccaatctgtacagaatacgccatcaataaattgcggcaagaaggaagcgaggaggggatgtacgtgctgaggtggagctgcaccgactttgacaacatcctcatgaccgtcacctgctttgagaagtctgagcaggtgcagggtgcccagaagcagttcaagaactttcagatcgaggtgcagaagggccgctacagtctgcacggttcggaccgcagcttccccagcttgggagacctcatgagccacctcaagaagcagatcctgcgcacggataacatcagcttcatgctaaaacgctgctgccagcccaagccccgagaaatctccaacctgctggtggctactaagaaagcccaggagtggcagcccgtctaccccatgagccagctgagtttcgatcggatcctcaagaaggatctggtgcagggcgagcaccttgggagaggcacgagaacacacatctattctgggaccctgatggattacaaggatgacgaaggaacttctgaagagaagaagataaaagtgatcctcaaagtcttagaccccagccacagggatatttccctggccttcttcgaggcagccagcatgatgagacaggtctcccacaaacacatcgtgtacctctatggcgtctgtgtccgcgacgtggagaatatcatggtggaagagtttgtggaagggggtcctctggatctcttcatgcaccggaaaagcgatgtccttaccacaccatggaaattcaaagttgccaaacagctggccagtgccctgagctacttggaggataaagacctggtccatggaaatgtgtgtactaaaaacctcctcctggcccgtgagggcatcgacagtgagtgtggcccattcatcaagctcagtgaccccggcatccccattacggtgctgtctaggcaagaatgcattgaacgaatcccatggattgctcctgagtgtgttgaggactccaagaacctgagtgtggctgctgacaagtggagctttggaaccacgctctgggaaatctgctacaatggcgagatccccttgaaagacaagacgctgattgagaaagagagattctatgaaagccggtgcaggccagtgacaccatcatgtaaggagctggctgacctcatgacccgctgcatgaactatgaccccaatcagaggcctttcttccgagccatcatgagagacattaataagcttgaagagcagaatccagatattgtttcagaaaaaaaaccagcaactgaagtggaccccacacattttgaaaagcgcttcctaaagaggatccgtgacttgggagagggccactttgggaaggttgagctctgcaggtatgaccccgaaggggacaatacaggggagcaggtggctgttaaatctctgaagcctgagagtggaggtaaccacatagctgatctgaaaaaggaaatcgagatcttaaggaacctctatcatgagaacattgtgaagtacaaaggaatctgcacagaagacggaggaaatggtattaagctcatcatggaatttctgccttcgggaagccttaaggaatatcttccaaagaataagaacaaaataaacctcaaacagcagctaaaatatgccgttcagatttgtaaggggatggactatttgggttctcggcaatacgttcaccgggacttggcagcaagaaatgtccttgttgagagtgaacaccaagtgaaaattggagacttcggtttaaccaaagcaattgaaaccgataaggagtattacaccgtcaaggatgaccgggacagccctgtgttttggtatgctccagaatgtttaatgcaatctaaattttatattgcctctgacgtctggtcttttggagtcactctgcatgagctgctgacttactgtgattcagattctagtcccatggctttgttcctgaaaatgataggcccaacccatggccagatgacagtcacaagacttgtgaatacgttaaaagaaggaaaacgcctgccgtgcccacctaactgtccagatgaggtttatcaacttatgaggaaatgctgggaattccaaccatccaatcggacaagctttcagaaccttattgaaggatttgaagcacttttaaaataagaagcatgaataacatttaaattccacagattatcaagtccttctcctgcaacaaatgcccaagtcattttttaaaaatttctaatgaaagaagtttgtgttctgtccaaaaagtcactgaactcatacttcagtacatatacatgtataaggcacactgtagtgcttaatatgtgtaaggacttcctctttaaatttggtaccagtaacttagtgacacataatgacaaccaaaatatttgaaagcacttaagcactcctccttgtggaaagaatataccaccatttcatctggctagttcaccatcacaactgcattaccaaaaggggatttttgaaaacgaggagttgaccaaaataatatctgaagatgattgcttttccctgctgccagctgatctgaaatgttttgctggcacattaatcatagataaagaaagattgatggacttagccctcaaatttcagtatctatacagtactagaccatgcattcttaaaatattagataccaggtagtatatattgtttctgtacaaaaatgactgtattctctcaccagtaggacttaaactttgtttctccagtggcttagctcctgttcctttgggtgatcactagcacccatttttgagaaagctggttctacatggggggatagctgtggaatagataatttgctgcatgttaattctcaagaactaagcctgtgccagtgctttcctaagcagtatacctttaatcagaactcattcccagaacctggatgctattacacatgcttttaagaaacgtcaatgtatatccttttataactctaccactttggggcaagctattccagcactggttttgaatgctgtatgcaaccagtctgaataccacatacgctgcactgttcttagagggtttccatacttaccaccgatctacaagggttgatccctgtttttaccatcaatcatcaccctgtggtgcaacacttgaaagacccggctagaggcactatggacttcaggatccactagacagttttcagtttgcttggaggtagctgggtaatcaaaaatgtttagtcattgattcaatgtgaacgattacggtctttatgaccaagagtctgaaaatctttttgttatgctgtttagtattcgtttgatattgttacttttcacctgttgagcccaaattcaggattggttcagtggcagcaatgaagttgccatttaaatttgttcatagcctacatcaccaaggtctctgtgtcaaacctgtggccactctatatgcactttgtttactctttatacaaataaatatactaaagacttta

SEQ ID NO: 422269 - DNA, 3081 bp, Homo sapiens
ctgggatttgcaagcctcttcacagggtagcacagcctggcgagcaccttgggagaggcacgagaacacacatctattctgggaccctgatggattacaaggatgacgaaggaacttctgaagagaagaagataaaagtgatcctcaaagtcttagaccccagccacagggatatttccctggccttcttcgaggcagccagcatgatgagacaggtctcccacaaacacatcgtgtacctctatggcgtctgtgtccgcgacgtggagaatatcatggtggaagagtttgtggaagggggtcctctggatctcttcatgcaccggaaaagcgatgtccttaccacaccatggaaattcaaagttgccaaacagctggccagtgccctgagctacttggaggataaagacctggtccatggaaatgtgtgtactaaaaacctcctcctggcccgtgagggcatcgacagtgagtgtggcccattcatcaagctcagtgaccccggcatccccattacggtgctgtctaggcaagaatgcattgaacgaatcccatggattgctcctgagtgtgttgaggactccaagaacctgagtgtggctgctgacaagtggagctttggaaccacgctctgggaaatctgctacaatggcgagatccccttgaaagacaagacgctgattgagaaagagagattctatgaaagccggtgcaggccagtgacaccatcatgtaaggagctggctgacctcatgacccgctgcatgaactatgaccccaatcagaggcctttcttccgagccatcatgagagacattaataagcttgaagagcagaatccagatattgtttcagaaaaaaaaccagcaactgaagtggaccccacacattttgaaaagcgcttcctaaagaggatccgtgacttgggagagggccactttgggaaggttgagctctgcaggtatgaccccgaaggggacaatacaggggagcaggtggctgttaaatctctgaagcctgagagtggaggtaaccacatagctgatctgaaaaaggaaatcgagatcttaaggaacctctatcatgagaacattgtgaagtacaaaggaatctgcacagaagacggaggaaatggtattaagctcatcatggaatttctgccttcgggaagccttaaggaatatcttccaaagaataagaacaaaataaacctcaaacagcagctaaaatatgccgttcagatttgtaaggggatggactatttgggttctcggcaatacgttcaccgggacttggcagcaagaaatgtccttgttgagagtgaacaccaagtgaaaattggagacttcggtttaaccaaagcaattgaaaccgataaggagtattacaccgtcaaggatgaccgggacagccctgtgttttggtatgctccagaatgtttaatgcaatctaaattttatattgcctctgacgtctggtcttttggagtcactctgcatgagctgctgacttactgtgattcagattctagtcccatggctttgttcctgaaaatgataggcccaacccatggccagatgacagtcacaagacttgtgaatacgttaaaagaaggaaaacgcctgccgtgcccacctaactgtccagatgaggtttatcaacttatgaggaaatgctgggaattccaaccatccaatcggacaagctttcagaaccttattgaaggatttgaagcacttttaaaataagaagcatgaataacatttaaattccacagattatcaagtccttctcctgcaacaaatgcccaagtcattttttaaaaatttctaatgaaagaagtttgtgttctgtccaaaaagtcactgaactcatacttcagtacatatacatgtataaggcacactgtagtgcttaatatgtgtaaggacttcctctttaaatttggtaccagtaacttagtgacacataatgacaaccaaaatatttgaaagcacttaagcactcctccttgtggaaagaatataccaccatttcatctggctagttcaccatcacaactgcattaccaaaaggggatttttgaaaacgaggagttgaccaaaataatatctgaagatgattgcttttccctgctgccagctgatctgaaatgttttgctggcacattaatcatagataaagaaagattgatggacttagccctcaaatttcagtatctatacagtactagaccatgcattcttaaaatattagataccaggtagtatatattgtttctgtacaaaaatgactgtattctctcaccagtaggacttaaactttgtttctccagtggcttagctcctgttcctttgggtgatcactagcacccatttttgagaaagctggttctacatggggggatagctgtggaatagataatttgctgcatgttaattctcaagaactaagcctgtgccagtgctttcctaagcagtatacctttaatcagaactcattcccagaacctggatgctattacacatgcttttaagaaacgtcaatgtatatccttttataactctaccactttggggcaagctattccagcactggttttgaatgctgtatgcaaccagtctgaataccacatacgctgcactgttcttagagggtttccatacttaccaccgatctacaagggttgatccctgtttttaccatcaatcatcaccctgtggtgcaacacttgaaagacccggctagaggcactatggacttcaggatccactagacagttttcagtttgcttggaggtagctgggtaatcaaaaatgtttagtcattgattcaatgtgaacgattacggtctttatgaccaagagtctgaaaatctttttgttatgctgtttagtattcgtttgatattgttacttttcacctgttgagcccaaattcaggattggttcagtggcagcaatgaagttgccatttaaatttgttcatagcctacatcaccaaggtctctgtgtcaaacctgtggccactctatatgcactttgtttactctttatacaaataaatatactaaagacttta

SEQ ID NO: 422270 - DNA, 2064 bp, Homo sapiens
agcggggaacaatcacttgtgaaaaaagtattaaagcaaagagccactcagtctggcgacgccgccgccaagtgattgttccccgctagcggggaacaatcacttcatcagaaaaaaaaaattgtcagtgatatgtgaatgaaatgacatttctattttttctgatgaagtgatagataatacaatctaaagtgactttagcaatgtgcttgacttttacttctctctctcaggggatggactatttgggttctcggcaatacgttcaccgggacttggcagcaagaaatgtccttgttgagagtgaacaccaagtgaaaattggagacttcggtttaaccaaagcaattgaaaccgataaggagtattacaccgtcaaggatgaccgggacagccctgtgttttggtatgctccagaatgtttaatgcaatctaaattttatattgcctctgacgtctggtcttttggagtcactctgcatgagctgctgacttactgtgattcagattctagtcccatggctttgttcctgaaaatgataggcccaacccatggccagatgacagtcacaagacttgtgaatacgttaaaagaaggaaaacgcctgccgtgcccacctaactgtccagatgaggtttatcaacttatgaggaaatgctgggaattccaaccatccaatcggacaagctttcagaaccttattgaaggatttgaagcacttttaaaataagaagcatgaataacatttaaattccacagattatcaagtccttctcctgcaacaaatgcccaagtcattttttaaaaatttctaatgaaagaagtttgtgttctgtccaaaaagtcactgaactcatacttcagtacatatacatgtataaggcacactgtagtgcttaatatgtgtaaggacttcctctttaaatttggtaccagtaacttagtgacacataatgacaaccaaaatatttgaaagcacttaagcactcctccttgtggaaagaatataccaccatttcatctggctagttcaccatcacaactgcattaccaaaaggggatttttgaaaacgaggagttgaccaaaataatatctgaagatgattgcttttccctgctgccagctgatctgaaatgttttgctggcacattaatcatagataaagaaagattgatggacttagccctcaaatttcagtatctatacagtactagaccatgcattcttaaaatattagataccaggtagtatatattgtttctgtacaaaaatgactgtattctctcaccagtaggacttaaactttgtttctccagtggcttagctcctgttcctttgggtgatcactagcacccatttttgagaaagctggttctacatggggggatagctgtggaatagataatttgctgcatgttaattctcaagaactaagcctgtgccagtgctttcctaagcagtatacctttaatcagaactcattcccagaacctggatgctattacacatgcttttaagaaacgtcaatgtatatccttttataactctaccactttggggcaagctattccagcactggttttgaatgctgtatgcaaccagtctgaataccacatacgctgcactgttcttagagggtttccatacttaccaccgatctacaagggttgatccctgtttttaccatcaatcatcaccctgtggtgcaacacttgaaagacccggctagaggcactatggacttcaggatccactagacagttttcagtttgcttggaggtagctgggtaatcaaaaatgtttagtcattgattcaatgtgaacgattacggtctttatgaccaagagtctgaaaatctttttgttatgctgtttagtattcgtttgatattgttacttttcacctgttgagcccaaattcaggattggttcagtggcagcaatgaagttgccatttaaatttgttcatagcctacatcaccaaggtctctgtgtcaaacctgtggccactctatatgcactttgtttactctttatacaaataaatatactaaagacttta

SEQ ID NO: 422271 - DNA, 4041 bp, Homo sapiens
cgcggcggccgcggagtatcctggagctgcagacagtgcgggcctgcgcccagtcccggctgtcctcgccgcgacccctcctcagccctgggcgcgcgcacgctggggccccgcggggctggccgcctagcgagcctgccggtcgaccccagccagcgcagcgacggggcgctgcctggcccaggcgcacacggaagtgcgcttctctgaagtagctttggaaagtagagaagaaaatccagtttgcttcttggagaacactggacagctgaataaatgcagtatctaaatataaaagaggactgcaatgccatggctttctgtgctaaaatgaggagctccaagaagactgaggtgaacctggaggcccctgagccaggggtggaagtgatcttctatctgtcggacagggagcccctccggctgggcagtggagagtacacagcagaggaactgtgcatcagggctgcacaggcatgccgtatctctcctctttgtcacaacctctttgccctgtatgacgagaacaccaagctctggtatgctccaaatcgcaccatcaccgttgatgacaagatgtccctccggctccactaccggatgaggttctatttcaccaattggcatggaaccaacgacaatgagcagtcagtgtggcgtcattctccaaagaagcagaaaaatggctacgagaaaaaaaagattccagatgcaacccctctccttgatgccagctcactggagtatctgtttgctcagggacagtatgatttggtgaaatgcctggctcctattcgagaccccaagaccgagcaggatggacatgatattgagaacgagtgtctagggatggctgtcctggccatctcacactatgccatgatgaagaagatgcagttgccagaactgcccaaggacatcagctacaagcgatatattccagaaacattgaataagtccatcagacagaggaaccttctcaccaggatgcggataaataatgttttcaaggatttcctaaaggaatttaacaacaagaccatttgtgacagcagcgtgtccacgcatgacctgaaggtgaaatacttggctaccttggaaactttgacaaaacattacggtgctgaaatatttgagacttccatgttactgatttcatcagaaaatgagatgaattggtttcattcgaatgacggtggaaacgttctctactacgaagtgatggtgactgggaatcttggaatccagtggaggcataaaccaaatgttgtttctgttgaaaaggaaaaaaataaactgaagcggaaaaaactggaaaataaacacaagaaggatgaggagaaaaacaagatccgggaagagtggaacaatttttcttacttccctgaaatcactcacattgtaataaaggagtctgtggtcagcattaacaagcaggacaacaagaaaatggaactgaagctctcttcccacgaggaggccttgtcctttgtgtccctggtagatggctacttccggctcacagcagatgcccatcattacctctgcaccgacgtggcccccccgttgatcgtccacaacatacagaatggctgtcatggtccaatctgtacagaatacgccatcaataaattgcggcaagaaggaagcgaggaggggatgtacgtgctgaggtggagctgcaccgactttgacaacatcctcatgaccgtcacctgctttgagaagtctgagcaggtgcagggtgcccagaagcagttcaagaactttcagatcgaggtgcagaagggccgctacagtctgcacggttcggaccgcagcttccccagcttgggagacctcatgagccacctcaagaagcagatcctgcgcacggataacatcagcttcatgctaaaacgctgctgccagcccaagccccgagaaatctccaacctgctggtggctactaagaaagcccaggagtggcagcccgtctaccccatgagccagctgagtttcgatcggatcctcaagaaggatctggtgcagggcgagcaccttgggagaggcacgagaacacacatctattctgggaccctgatggattacaaggatgacgaaggaacttctgaagagaagaagataaaagtgatcctcaaagtcttagaccccagccacagggatatttccctggccttcttcgaggcagccagcatgatgagacaggtctcccacaaacacatcgtgtacctctatggcgtctgtgtccgcgacgtggagaatatcatggtggaagagtttgtggaagggggtcctctggatctcttcatgcaccggaaaagcgatgtccttaccacaccatggaaattcaaagttgccaaacagctggccagtgccctgagctacttggaggataaagacctggtccatggaaatgtgtgtactaaaaacctcctcctggcccgtgagggcatcgacagtgagtgtggcccattcatcaagctcagtgaccccggcatccccattacggtgctgtctaggcaagaatgcattgaacgaatcccatggattgctcctgagtgtgttgaggactccaagaacctgagtgtggctgctgacaagtggagctttggaaccacgctctgggaaatctgctacaatggcgagatccccttgaaagacaagacgctgattgagaaagagagattctatgaaagccggtgcaggccagtgacaccatcatgtaaggagctggctgacctcatgacccgctgcatgaactatgaccccaatcagaggcctttcttccgagccatcatgagagacattaataagcttgaagagcagaatccagatattgtttcagaaaaaaaaccagcaactgaagtggaccccacacattttgaaaagcgcttcctaaagaggatccgtgacttgggagagggccactttgggaaggttgagctctgcaggtatgaccccgaaggggacaatacaggggagcaggtggctgttaaatctctgaagcctgagagtggaggtaaccacatagctgatctgaaaaaggaaatcgagatcttaaggaacctctatcatgagaacattgtgaagtacaaaggaatctgcacagaagacggaggaaatggtattaagctcatcatggaatttctgccttcgggaagccttaaggaatatcttccaaagaataagaacaaaataaacctcaaacagcagctaaaatatgccgttcagatttgtaaggggatggactatttgggttctcggcaatacgttcaccgggacttggcagcaagaaatgtccttgttgagagtgaacaccaagtgaaaattggagacttcggtttaaccaaagcaattgaaaccgataaggagtattacaccgtcaaggatgaccgggacagccctgtgttttggtaactgaatcaaaccactaggttttatcaatgcttcatagagtttacactgttttaataggccctttctggctatattaatgtgtctcattcctctggcctgactcaaggttagagaaggtttagaacatttggaattgattgatatttatcttcaagaaacacacctttcagcctgtttcattgaaagcagcctatataaatgactgagcttcatatgacaccgtcttccaaggaatgaaagaaatctaaccaccagctcaacattcctagcttcccaggagagggcattcatctgatgcagttcttaaaactgtgagcaggtggagagaatctagttcctttcttaaacacattcctgcagagggaggctgtaggacagagtgggcattgcagattcagggaactcctggacagagcagagcaaaacctacgggagacctggctgtctcatgaatcaccagaggttcccaggttagaaggccacacactggctacaaccatgtctcagccaggaacactgtccaggggagaggctgcttacatctctaccgcaccctgccacgtaaccacataacgacataaccaatcagcactcccctaggtgcatcctacatggacacaa

SEQ ID NO: 422272 - DNA, 2031 bp, Homo sapiens
cgcggcggccgcggagtatcctggagctgcagacagtgcgggcctgcgcccagtcccggctgtcctcgccgcgacccctcctcagccctgggcgcgcgcacgctggggccccgcggggctggccgcctagcgagcctgccggtcgaccccagccagcgcagcgacggggcgctgcctggcccaggcgcacacggaagtgcgcttctctgaagtagctttggaaagtagagaagaaaatccagtttgcttcttggagaacactggacagctgaataaatgcagtatctaaatataaaagaggactgcaatgccatggctttctgtgctaaaatgaggagctccaagaagactgaggtgaacctggaggcccctgagccaggggtggaagtgatcttctatctgtcggacagggagcccctccggctgggcagtggagagtacacagcagaggaactgtgcatcagggctgcacaggcatgccgtatctctcctctttgtcacaacctctttgccctgtatgacgagaacaccaagctctggtatgctccaaatcgcaccatcaccgttgatgacaagatgtccctccggctccactaccggatgaggttctatttcaccaattggcatggaaccaacgacaatgagcagtcagtgtggcgtcattctccaaagaagcagaaaaatggctacgagaaaaaaaagattccagatgcaacccctctccttgatgccagctcactggagtatctgtttgctcagggacagtatgatttggtgaaatgcctggctcctattcgagaccccaagaccgagcaggatggacatgatattgagaacgagtgtctagggatggctgtcctggccatctcacactatgccatgatgaagaagatgcagttgccagaactgcccaaggacatcagctacaagcgatatattccagaaacattgaataagtccatcagacagaggaaccttctcaccaggatgcggataaataatgttttcaaggatttcctaaaggaatttaacaacaagaccatttgtgacagcagcgtgtccacgcatgacctgaaggtgaaatacttggctaccttggaaactttgacaaaacattacggtgctgaaatatttgagacttccatgttactgatttcatcagaaaatgagatgaattggtttcattcgaatgacggtggaaacgttctctactacgaagtgatggtgactgggaatcttggaatccagtggaggcataaaccaaatgttgtttctgttgaaaaggaaaaaaataaactgaagcggaaaaaactggaaaataaacacaagaaggatgaggagaaaaacaagatccgggaagagtggaacaatttttcttacttccctgaaatcactcacattgtaataaaggagtctgtggtcagcattaacaagcaggacaacaagaaaatggaactgaagctctcttcccacgaggaggccttgtcctttgtgtccctggtagatggctacttccggctcacagcagatgcccatcattacctctgcaccgacgtggcccccccgttgatcgtccacaacatacagaatggctgtcatggtccaatctgtacagaatacgccatcaataaattgcggcaagaaggaagcgaggaggggatgtacgtgctgaggtggagctgcaccgactttgacaacatcctcatgaccgtcacctgctttgagaagtctgagcaggtgcagggtgcccagaagcagttcaagaactttcagatcgaggtgcagaagggccgctacagtctgcacggttcggaccgcagcttccccagcttgggagacctcatgagccacctcaagaagcagatcctgcgcacggataacatcagcttcatgctaaaacgctgctgccagcccaagccccgaggttcgtctccctgtgccagagccaggctgtatcccatcagtaatgtgctgagacccagatcgaccaaaacacgctgactgacttaaacaaagtggaccctccccaca

SEQ ID NO: 422273 - DNA, 1200 bp, Homo sapiens
cgcggcggccgcggagtatcctggagctgcagacagtgcgggcctgcgcccagtcccggctgtcctcgccgcgacccctcctcagccctgggcgcgcgcacgctggggccccgcggggctggccgcctagcgagcctgccggtcgaccccagccagcgcagcgacggggcgctgcctggcccaggcgcacacggaagtgcgcttctctgaagtagctttggaaagtagagaagaaaatccagtttgcttcttggagaacactggacagctgaataaatgcagtatctaaatataaaagaggactgcaatgccatggctttctgtgctaaaatgaggagctccaagaagactgaggtgaacctggaggcccctgagccaggggtggaagtgatcttctatctgtcggacagggagcccctccggctgggcagtggagagtacacagcagaggaactgtgcatcagggctgcacaggcatgccgtatctctcctctttgtcacaacctctttgccctgtatgacgagaacaccaagctctggtatgctccaaatcgcaccatcaccgttgatgacaagatgtccctccggctccactaccggatgaggttctatttcaccaattggcatggaaccaacgacaatgagcagtcagtgtggcgtcattctccaaagaagcagaaaaatggctacgagaaaaaaaagattccagatgcaacccctctccttgatgccagctcactggagtatctgtttgctcaggtaggaagtttgggcccaggagaagctggagtttgtgggatgggagaggcattgtagagctcagaccccctgctgcagctgaacttggtggtgctagagtgctttaaggcctgttctgggtaagttcttgccacacctggacttgccccaagtgaggagaaaaaaggcagcatttcagctttccaagaggctggttatccagcttgtgggctttggggcttcctttctttcctattcctttccttttccccacctcctaccattttatttttcatccgtattaatagccttatgtgcagaggtcagagggaagctctgcttgttagaagatgtaattcaacagggctgaagaaggcacttctcagcagccgtagtaatgtctggggaggaaggagatggccactctgtcactggtggtaggatagaaagattagacgctag

SEQ ID NO: 422274 - DNA, 902 bp, Homo sapiens
  misc_feature (835)..(835): n is a, c, g, or t
  misc_feature (838)..(839): n is a, c, g, or t
  misc_feature (846)..(847): n is a, c, g, or t
cccgggcgcggggccttttaacccctgcagacccaggaccggccgggccgccccaagacgaacgccgcagggctgggctcagcccaagccagacggcgagagtcgcaccgaggtggaagctgggggcgcggcctcgccggggccaggaaaggggcggggccgggtggggcccggggaggagcctgtgcgccccgccctccgtgacgcgccgcggcccccgcgcatataagtgggcgcgtcggacgcgtgggtcgaccccgcgcgcgcctctctgtcgtggcgcggcttcccgcggtcttctctgcaaatgggctccgtggcctagcgcccccgtccccgccacccgtgatcgtgcgccgaggcccgcgaggggtcgccgcccagatcccaccagccagcaagctaaagcatggcggccatcccctccagcggctcgctcgtggccacccacgactactaccggcgccgcctgggttccacttccagcaacagctcctgcagcagtaccgagtgccccggggaagccattccccaccccccaggtctccccaaggctgacccgggtcattggtgggccagcttctttttcgggaagtccaccctcccgttcatggccacggtgttggagtccgcagagcactcggaacctccccaggcctccagcagcatgaccgcctgtggcctggctcgggacgccccgaggaagcagcccggcggtcagtccagcacagccagcgctgggcccccgtcctgacctgagcggttaccaccagccccaggcctgcggaggcgctagtccaccagagcccctccccgcccctctccggcggagagngannagaagannaaaagagagaaaacaaaacaaaaaacaaaaccaaaaagaaaaagacgaaccaagc

SEQ ID NO: 422275 - DNA, 1120 bp, Homo sapiens
  misc_feature (18)..(18): n is a, c, g, or t
ggtacaccgggtgccgcnagaggcccgcgaggggtcgccgcccagatcccaccagccagcaagctaaagcatggcggccatcccctccagcggctcgctcgtggccacccacgactactaccggcgccgcctgggttccacttccagcaacagctcctgcagcagtaccgagtgccccggggaagccattccccaccccccaggtctccccaaggctgacccgggtcattggtgggccagcttctttttcgggaagtccaccctcccgttcatggccacggtgttggagtccgcagagcactcggaacctccccaggcctccagcagcatgaccgcctgtggcctggctcgggacgccccgaggaagcagcccggcggtcagtccagcacagccagcgctgggcccccgtcctgacctgagcggttaccaccagccccaggcctgcggaggcgctagtccaccagagcccctccccgcccctctacggggccagacgaagagcgaagcgacgggacggcagagacaaggagaaccgcagcacacaacgacagagaagacccaagcacaaccacgcacacaacaacaccaacacaacacaaaacacacagcacaagccacagccaaactacaaacagacacggccacaacacaacacacaaacacacacgaccacacacgagacccgataaaacagaagaaaccagacgcaaaacacggaacgacagacggcacaacaaaccgagagcacagaggggaccgcacatcggcacagacacacacaagacacaccaacacgagccgacccaagcaggagaatacacacacacaacaccccaccccacacggcgcccagcccaccgaccgacctccccctcccaacaacgacgcacaccagagccacgaacgcgcccaccccacacgcaccacacacactcaccacccccacaactcacaccacaccgaggccacccactgtacaaaccaagaggcgaaaaacaaaacaggacaaacatacaaagcacacgacgacaacaaaccctccaatacgcgacacgcacaccaacaagacgccacaaacgaaaccccaacaccagccaacacggacaacccagacacccc

SEQ ID NO: 422276 - DNA, 1242 bp, Homo sapiens
  misc_feature (1154)..(1154): n is a, c, g, or t
  misc_feature (1156)..(1157): n is a, c, g, or t
  misc_feature (1167)..(1168): n is a, c, g, or t
  misc_feature (1170)..(1170): n is a, c, g, or t
  misc_feature (1175)..(1175): n is a, c, g, or t
  misc_feature (1184)..(1185): n is a, c, g, or t
  misc_feature (1188)..(1189): n is a, c, g, or t
  misc_feature (1200)..(1200): n is a, c, g, or t
  misc_feature (1207)..(1208): n is a, c, g, or t
  misc_feature (1211)..(1213): n is a, c, g, or t
  misc_feature (1220)..(1221): n is a, c, g, or t
cccgggcgcggggccttttaacccctgcagacccaggaccggccgggccgccccaagacgaacgccgcagggctgggctcagcccaagccagacggcgagagtcgcaccgaggtggaagctgggggcgcggcctcgccggggccaggaaaggggcggggccgggtggggcccggggaggagcctgtgcgccccgccctccgtgacgcgccgcggcccccgcgcatataagtgggcgcgtcggacgcgtgggtcgaccccgcgcgcgcctctctgtcgtggcgcggcttcccgcggtcttctctgcaaatgggctccgtggcctagcgcccccgtccccgccacccgtgatcgtgcgccgaggcccgcgaggggtcgccgcccagatcccaccagccagcaagctaaagcatggcggccatcccctccagcggctcgctcgtggccacccacgactactaccggcgccgcctgggttccacttccagcaacagctcctgcagcagtaccgagtgccccggggaagccattccccaccccccaggtctccccaaggctgacccgggtcattggtgggccagcttctttttcgggaagtccaccctcccgttcatggccacggtgttggagtccgcagagcactcggaacctccccaggcctccagcagcatgaccgcctgtggcctggctcgggacgccccgaggaagcagcccggcggtcagtccagcacagccagcgctgggcccccgtcctgacctgagcggttaccaccagccccaggcctgcggaggcgctagtccaccagagcccctccccgcccctctccccactccgcatccctcgcccccctccccacctcccaccccccaccctgtaaactaggcggctgcagcaagcagaccttcgcatcaacacagcagacaccaaaaaccagtgagagccccgctctctaccgcccggccccagcactcgctagctttcctgacacctggaactgtgcacctggcaccaagcggaaaataaactccaagcagcacagtagccccgatggtgtgtgcctgagctgtgtggcccgaggttccaaaaaaaaaaaaaaaaaaaaaaaaaaaaaaaaaaaaaaaaaaaggggggtttttttaaaaggcccccgggggntnnaaattttggnntnggccnttttttaanncannaaaaaaatttnccccttnnttnnnttttttnngggggttttttttaccagaaa

SEQ ID NO: 422277 - DNA, 1696 bp, Homo sapiens
  misc_feature (1695)..(1695): n is a, c, g, or t
cccgggcgcggggccttttaacccctgcagacccaggaccggccgggccgccccaagacgaacgccgcagggctgggctcagcccaagccagacggcgagagtcgcaccgaggtggaagctgggggcgcggcctcgccggggccaggaaaggggcggggccgggtggggcccggggaggagcctgtgcgccccgccctccgtgacgcgccgcggcccccgcgcatataagtgggcgcgtcggacgcgtgggtcgaccccgcgcgcgcctctctgtcgtggcgcggcttcccgcggtcttctctgcaaatgggctccgtggcctagcgcccccgtccccgccacccgtgatcgtgcgccgaggcccgcgaggggtcgccgcccagatcccaccagccagcaagctaaagcatggcggccatcccctccagcggctcgctcgtggccacccacgactactaccggcgccgcctgggttccacttccagcaacagctcctgcagcagtaccgagtgccccggggaagccattccccaccccccaggtctccccaaggctgacccgggtcattggtgggccagcttctttttcgggaagtccaccctcccgttcatggccacggtgttggagtccgcagagcactcggaacctccccaggcctccagcagcatgaccgcctgtggcctggctcgggacgccccgaggaagcagcccggcggtcagtccagcacagccagcgctgggcccccgtcctgacctgagcggttaccaccagccccaggcctgcggaggcgctagtccaccagagcccctccccgcccctctccccactccgcatccctcgcccccctccccacctcccaccccccaccctgtaaactaggcggctgcagcaagcagaccttcgcatcaacacagcagacaccaaaaaccagtgagagccccgctctctaccgcccggccccagcactcgctagctttcctgacacctggaactgtgcacctggcaccaagcggaaaataaactccaagcagcaaaaaaaaaaaaaaaaaaaaaaaaaaaaaaaaaaaaaaaaaaaaaaaaaaaaaaaaaaaaaaaaaaaaaaggggggcggccgcgccccaaatatatattctctctctctcggagagggcgcccacatttttcgcgcgctcacacccgaattttgttgtggaaagagagaggggctccctctatataggggagagcgtcgtcttttattataagccgcgagaggagcgcgggcgcgccgcgcgtttttatacaacaacggttggtagaggtggggacaacagacgcgggaacaacgtggtgaggatcttcttgtgagagaaaaagagcacacctcttctatttgtgggcggggggaggagagaacaattctgtgtggcggcaaaaaactctcctctctctcgagagaatgatttattagaacgctctctctagagggggaatatctttatatacacactattttataagaggtgtgtatatatagaggtgtgtgtgtataaaaacaaaaaggggtgtgtatatatgtgttgtgtgtgcgagtggtgagagagagaaattgtgtgtggtgtatatgagtagggatttatttatattatttgtgatagagaaatattatttatatataacgcggaggggggattttttttttaaaaatattggnt

SEQ ID NO: 422278 - DNA, 1508 bp, Homo sapiens
cccgggcgcggggccttttaacccctgcagacccaggaccggccgggccgccccaagacgaacgccgcagggctgggctcagcccaagccagacggcgagagtcgcaccgaggtggaagctgggggcgcggcctcgccggggccaggaaaggggcggggccgggtggggcccggggaggagcctgtgcgccccgccctccgtgacgcgccgcggcccccgcgcatataagtgggcgcgtcggacgcgtgggtcgaccccgcgcgcgcctctctgtcgtggcgcggcttcccgcggtcttctctgcaaatgggctccgtggcctagcgcccccgtccccgccacccgtgatcgtgcgccgaggcccgcgaggggtcgccgcccagatcccaccagccagcaagctaaagcatggcggccatcccctccagcggctcgctcgtggccacccacgactactaccggcgccgcctgggttccacttccagcaacagctcctgcagcagtaccgagtgccccggggaagccattccccaccccccaggtctccccaaggctgacccgggtcattggtgggccagcttctttttcgggaagtccaccctcccgttcatggccacggtgttggagtccgcagagcactcggaacctccccaggcctccagcagcatgaccgcctgtggcctggctcgggacgccccgaggaagcagcccggcggtcagtccagcacagccagcgctgggcccccgtcctgacctgagcggttaccaccagccccaggcctgcggaggcgctagtccaccagagcccctccccgcccctctccccactccgcatccctcgcccccctccccacctcccaccccccaccctgtaaactaggcggctgcagcaagcagaccttcgcatcaacacagcagacaccaaaaaccagtgagagccccgctctctaccgcccggccccagcactcgctagctttcctgacacctggaactgtgcacctggcaccaagcggaaaataaactccaagcagcaaaaaaaaaaaaaaaaaaaaaaaaaaaaaaaaaaaaaaaaaaaaaaaaaaaaaaaaaaaaaaaaaaaaaagggggggggcaaaaacccccgggggcgccaagccttgacgaccgatccccgggtttttttgggtaaacaaagggcgccctatataggggcgccttctattaataatgaccgacaggcagcgggcacgccgcatttcaaaacagcctgcgcggtggctggggaagacacgcatcgtctcggtagggacactttggtgggacacgaccccccacctctcgtggtgggtgcgaccactatatgtcggacacacccatcatccgtagtaaattatttaagccccttgaggattaaattataaaaactttgcacggttactattggggggtttaccaccagcccgatatgtatcccgggcgcgtgaaaaatttttgctcactgcacagttttttattttacaacaattt

SEQ ID NO: 422279 - DNA, 1195 bp, Homo sapiens
  misc_feature (1107)..(1107): n is a, c, g, or t
  misc_feature (1109)..(1110): n is a, c, g, or t
  misc_feature (1120)..(1121): n is a, c, g, or t
  misc_feature (1123)..(1123): n is a, c, g, or t
  misc_feature (1128)..(1128): n is a, c, g, or t
  misc_feature (1137)..(1138): n is a, c, g, or t
  misc_feature (1141)..(1142): n is a, c, g, or t
  misc_feature (1153)..(1153): n is a, c, g, or t
  misc_feature (1160)..(1161): n is a, c, g, or t
  misc_feature (1164)..(1166): n is a, c, g, or t
  misc_feature (1173)..(1174): n is a, c, g, or t
cccgggcgcggggccttttaacccctgcagacccaggaccggccgggccgccccaagacgaacgccgcagggctgggctcagcccaagccagacggcgagagtcgcaccgaggtggaagctgggggcgcggcctcgccggggccaggaaaggggcggggccgggtggggcccggggaggagcctgtgcgccccgccctccgtgacgcgccgcggcccccgcgcatataagtgggcgcgtcggacgcgtgggtcgaccccgcgcgcgcctctctgtcgtggcgcggcttcccgcggtcttctctgcaaatgggctccgtggcctagcgcccccgtccccgccacccgtgatcgtgcgccgaggcccgcgaggggtcgccgcccagatcccaccagccagcaagctaaagcatggcggccatcccctccagcggctcgctcgtggccacccacgactactaccggcgccgcctgggttccacttccagcaacagctcctgcagcagtaccgagtgccccggggaagccattccccaccccccaggtctccccaaggctgacccgggtcattggtgggccagcttctttttcgggaagtccaccctcccgttcatggccacggtgttggagtccgcagagcactcggaacctccccaggcctccagcagcatgaccgcctgtggcctggctcgggacgccccgaggaagcagcccggcggtcagtccagcacagccagcgctgggcccccgtcctgacctgagcggttaccaccagccccaggcctgcggaggcgctagtccaccagagcccctccccgcccctctccccactccgcatccctcgcccccctccccacctcccaccccccaccctgtaaactaggcggctgcagcaagcagaccttcgcatcaacacagcagacaccaaaaaccagtgagagccccgctctctaccgcccggccccagcactcgctagctttcctgacacctggaactgtgcacctggcaccaagcggaaaataaactccaagcagcaaaaaaaaaaaaaaaaaaaaaaaaaaaaaaaaaaaaaaaaaaaggggggtttttttaaaaggcccccgggggntnnaaattttggnntnggccnttttttaanncannaaaaaaatttnccccttnnttnnnttttttnngggggttttttttaccagaaa

SEQ ID NO: 422280 - DNA, 1262 bp, Homo sapiens
  misc_feature (1174)..(1174): n is a, c, g, or t
  misc_feature (1176)..(1177): n is a, c, g, or t
  misc_feature (1187)..(1188): n is a, c, g, or t
  misc_feature (1190)..(1190): n is a, c, g, or t
  misc_feature (1195)..(1195): n is a, c, g, or t
  misc_feature (1204)..(1205): n is a, c, g, or t
  misc_feature (1208)..(1209): n is a, c, g, or t
  misc_feature (1220)..(1220): n is a, c, g, or t
  misc_feature (1227)..(1228): n is a, c, g, or t
  misc_feature (1231)..(1233): n is a, c, g, or t
  misc_feature (1240)..(1241): n is a, c, g, or t
cccgggcgcggggccttttaacccctgcagacccaggaccggccgggccgccccaagacgaacgccgcagggctgggctcagcccaagccagacggcgagagtcgcaccgaggtggaagctgggggcgcggcctcgccggggccaggaaaggggcggggccgggtggggcccggggaggagcctgtgcgccccgccctccgtgacgcgccgcggcccccgcgcatataagtgggcgcgtcggacgcgtgggtcgaccccgcgcgcgcctctctgtcgtggcgcggcttcccgcggtcttctctgcaaatgggctccgtggcctagcgcccccgtccccgccacccgtgatcgtgcgccgaggcccgcgaggggtcgccgcccagatcccaccagccagcaagctaaagcatggcggccatcccctccagcggctcgctcgtggccacccacgactactaccggcgccgcctgggttccacttccagcaacagctcctgcagcagtaccgagtgccccggggaagccattccccaccccccaggtctccccaaggctgacccgggtcattggtgggccagcttctttttcgggaagtccaccctcccgttcatggccacggtgttggagtccgcagagcactcggaacctccccaggcctccagcagcatgaccgcctgtggcctggctcgggacgccccgaggaagcagcccggcggtcagtccagcacagccagcgctgggcccccgtcctgacctgagcggttaccaccagccccaggcctgcggaggcgctagtccaccagagcccctccccgcccctctccccactccgcatccctcgcccccctccccacctcccaccccccaccctgtaaactaggcggctgcagcaagcagaccttcgcatcaacacagcagacaccaaaaaccagtgagagccccgctctctaccgcccggccccagcactcgcttggctgcttggagtttatttagctttcctgacacctggaactgtgcacctggcaccaagcggaaaataaactccaagcagcacagtagccccgatggtgtgtgcctgagctgtgtggcccgaggttccaaaaaaaaaaaaaaaaaaaaaaaaaaaaaaaaaaaaaaaaaaaggggggtttttttaaaaggcccccgggggntnnaaattttggnntnggccnttttttaanncannaaaaaaatttnccccttnnttnnnttttttnngggggttttttttaccagaaa

SEQ ID NO: 422281 - DNA, 1660 bp, Homo sapiens
  misc_feature (1659)..(1659): n is a, c, g, or t
cccgggcgcggggccttttaacccctgcagacccaggaccggccgggccgccccaagacgaacgccgcagggctgggctcagcccaagccagacggcgagagtcgcaccgaggtggaagctgggggcgcggcctcgccggggccaggaaaggggcggggccgggtggggcccggggaggagcctgtgcgccccgccctccgtgacgcgccgcggcccccgcgcatataagtgggcgcgtcggacgcgtgggtcgaccccgcgcgcgcctctctgtcgtggcgcggcttcccgcggtcttctctgcaaatgggctccgtggcctagcgcccccgtccccgccacccgtgatcgtgcgccgaggcccgcgaggggtcgccgcccagatcccaccagccagcaagctaaagcatggcggccatcccctccagcggctcgctcgtggccacccacgactactaccggcgccgcctgggttccacttccagcaacagctcctgcagcagtaccgagtgccccggggaagccattccccaccccccaggtctccccaaggctgacccgggtcattggtgggccagcttctttttcgggaagtccaccctcccgttcatggccacggtgttggagtccgcagagcactcggaacctccccaggcctccagcagcatgaccgcctgtggcctggctcgggacgccccgaggaagcagcccggcggtcagtccagcacagccagcgctgggcccccgtcctgacctgagcggttaccaccagccccaggcctgcggaggcgctagtccaccagagcccctccccgcccctcccaccccccaccctgtaaactaggcggctgcagcaagcagaccttcgcatcaacacagcagacaccaaaaaccagtgagagccccgctctctaccgcccggccccagcactcgctagctttcctgacacctggaactgtgcacctggcaccaagcggaaaataaactccaagcagcaaaaaaaaaaaaaaaaaaaaaaaaaaaaaaaaaaaaaaaaaaaaaaaaaaaaaaaaaaaaaaaaaaaaaaggggggcggccgcgccccaaatatatattctctctctctcggagagggcgcccacatttttcgcgcgctcacacccgaattttgttgtggaaagagagaggggctccctctatataggggagagcgtcgtcttttattataagccgcgagaggagcgcgggcgcgccgcgcgtttttatacaacaacggttggtagaggtggggacaacagacgcgggaacaacgtggtgaggatcttcttgtgagagaaaaagagcacacctcttctatttgtgggcggggggaggagagaacaattctgtgtggcggcaaaaaactctcctctctctcgagagaatgatttattagaacgctctctctagagggggaatatctttatatacacactattttataagaggtgtgtatatatagaggtgtgtgtgtataaaaacaaaaaggggtgtgtatatatgtgttgtgtgtgcgagtggtgagagagagaaattgtgtgtggtgtatatgagtagggatttatttatattatttgtgatagagaaatattatttatatataacgcggaggggggattttttttttaaaaatattggnt

SEQ ID NO: 422282 - DNA, 1190 bp, Homo sapiens
  misc_feature (1102)..(1102): n is a, c, g, or t
  misc_feature (1104)..(1105): n is a, c, g, or t
  misc_feature (1115)..(1116): n is a, c, g, or t
  misc_feature (1118)..(1118): n is a, c, g, or t
  misc_feature (1123)..(1123): n is a, c, g, or t
  misc_feature (1132)..(1133): n is a, c, g, or t
  misc_feature (1136)..(1137): n is a, c, g, or t
  misc_feature (1148)..(1148): n is a, c, g, or t
  misc_feature (1155)..(1156): n is a, c, g, or t
  misc_feature (1159)..(1161): n is a, c, g, or t
  misc_feature (1168)..(1169): n is a, c, g, or t
cccgggcgcggggccttttaacccctgcagacccaggaccggccgggccgccccaagacgaacgccgcagggctgggctcagcccaagccagacggcgagagtcgcaccgaggtggaagctgggggcgcggcctcgccggggccaggaaaggggcggggccgggtggggcccggggaggagcctgtgcgccccgccctccgtgacgcgccgcggcccccgcgcatataagtgggcgcgtcggacgcgtgggtcgaccccgcgcgcgcctctctgtcgtggcgcggcttcccgcggtcttctctgcaaatgggctccgtggcctagcgcccccgtccccgccacccgtgatcgtgcgccgaggcccgcgaggggtcgccgcccagatcccaccagccagcaagctaaagcatggcggccatcccctccagcggctcgctcgtggccacccacgactactaccggcgccgcctgggttccacttccagcaacagctcctgcagcagtaccgagtgccccggggaagccattccccaccccccaggtctccccaaggctgacccgggtcattggtgggccagcttctttttcgggaagtccaccctcccgttcatggccacggtgttggagtccgcagagcactcggaacctccccaggcctccagcagcatgaccgcctgtggcctggctcgggacgccccgaggaagcagcccggcggtcagtccagcacagccagcgctgggcccccgtcctgacctgagcggttaccaccagccccaggcctgcggaggcgctagtccaccagagcccctccccgcccctctccccactccgcatccctcgcccccctccccacctcccaccccccaccctgtaaactaggcggctgcagcaagcagaccttcgcatcaacacagcagacagctttcctgacacctggaactgtgcacctggcaccaagcggaaaataaactccaagcagcacagtagccccgatggtgtgtgcctgagctgtgtggcccgaggttccaaaaaaaaaaaaaaaaaaaaaaaaaaaaaaaaaaaaaaaaaaaggggggtttttttaaaaggcccccgggggntnnaaattttggnntnggccnttttttaanncannaaaaaaatttnccccttnnttnnnttttttnngggggttttttttaccagaaa

SEQ ID NO: 422283 - DNA, 1008 bp, Homo sapiens
  misc_feature (920)..(920): n is a, c, g, or t
  misc_feature (922)..(923): n is a, c, g, or t
  misc_feature (933)..(934): n is a, c, g, or t
  misc_feature (936)..(936): n is a, c, g, or t
  misc_feature (941)..(941): n is a, c, g, or t
  misc_feature (950)..(951): n is a, c, g, or t
  misc_feature (954)..(955): n is a, c, g, or t
  misc_feature (966)..(966): n is a, c, g, or t
  misc_feature (973)..(974): n is a, c, g, or t
  misc_feature (977)..(979): n is a, c, g, or t
  misc_feature (986)..(987): n is a, c, g, or t
cccgggcgcggggccttttaacccctgcagacccaggaccggccgggccgccccaagacgaacgccgcagggctgggctcagcccaagccagacggcgagagtcgcaccgaggtggaagctgggggcgcggcctcgccggggccaggaaaggggcggggccgggtggggcccggggaggagcctgtgcgccccgccctccgtgacgcgccgcggcccccgcgcatataagtgggcgcgtcggacgcgtgggtcgaccccgcgcgcgcctctctgtcgtggcgcggcttcccgcggtcttctctgcaaatgggctccgtggcctagcgcccccgtccccgccacccgtgatcgtgcgccgaggcccgcgaggggtcgccgcccagatcccaccagccagcaagctaaagcatggcggccatcccctccagcggctcgctcgtggccacccacgactactaccggcgccgcctgggttccacttccagcaacagctcctgcagcagtaccgagtgccccggggaagccattccccaccccccaggtctccccaaggctgacccgggtcattggtgggccagcttctttttcgggaagtccaccctcccgttcatggccacggtgttggagtccgcagagcactcggaacctccccaggcctccagcagcatgaccgcctgtggcctggctcgggacgccccgaggaagcagcccggcggtcagtccagcacagccagcgctgggcccccgtcctgacctgagcggttaccaccagccccaggcctgcggaggcgctagtccaccagagcccctccccgcccctaaaaaaaaaaaaaaaaaaaaaaaaaaaaaaaaaaaaaaaaaaaaaaaaaaaaaaaaaaaaaaaaaaaaaggggggtttttttaaaaggcccccgggggntnnaaattttggnntnggccnttttttaanncannaaaaaaatttnccccttnnttnnnttttttnngggggttttttttaccagaaa

SEQ ID NO: 422284 - DNA, 1025 bp, Homo sapiens
cccgggcgcggggccttttaacccctgcagacccaggaccggccgggccgccccaagacgaacgccgcagggctgggctcagcccaagccagacggcgagagtcgcaccgaggtggaagctgggggcgcggcctcgccggggccaggaaaggggcggggccgggtggggcccggggaggagcctgtgcgccccgccctccgtgacgcgccgcggcccccgcgcatataagtgggcgcgtcggacgcgtgggtcgaccccgcgcgcgcctctctgtcgtggcgcggcttcccgcggtcttctctgcaaatgggctccgtggcctagcgcccccgtccccgccacccgtgatcgtgcgccgaggcccgcgaggggtcgccgcccagatcccaccagccagcaagctaaagcatggcggccatcccctccagcggctcgctcgtggccacccacgactactaccggcgccgcctgggttccacttccagcaacagctcctgcagcagtaccgagtgccccggggaagccattccccaccccccaggtctccccaaggctgacccgggtcattggtgggccagcttctttttcgggaagtccaccctcccgttcatggccacggtgttggagtccgcagagcactcggaacctccccaggcctccagcagcatgaccgcctgtggcctggctcgggacgccccgaggaagcagcccggcggtcagtccagcacagccagcgctgggcccccgtcctgacctgagcggttaccaccagccccaggcctgcggaggcgctagtccaccagagcccctccccgcccctcttccctttttaggtcttgttttccaaactgattttaggtgatagtttcccctctagtcttggctcatttaagaagcacaaacattcaaattaaaaatacaataaattattcattctaaccttagcaaaggtacatggattctgtctaccaaatattaattttacagtgaccacaaaaggttatttggttggcgtccgtagcgg

SEQ ID NO: 422285 - DNA, 1002 bp, Homo sapiens
  misc_feature (32)..(32): n is a, c, g, or t
  misc_feature (35)..(35): n is a, c, g, or t
  misc_feature (914)..(914): n is a, c, g, or t
  misc_feature (916)..(917): n is a, c, g, or t
  misc_feature (927)..(928): n is a, c, g, or t
  misc_feature (930)..(930): n is a, c, g, or t
  misc_feature (935)..(935): n is a, c, g, or t
  misc_feature (944)..(945): n is a, c, g, or t
  misc_feature (948)..(949): n is a, c, g, or t
  misc_feature (960)..(960): n is a, c, g, or t
  misc_feature (967)..(968): n is a, c, g, or t
  misc_feature (971)..(973): n is a, c, g, or t
  misc_feature (980)..(981): n is a, c, g, or t
aaaactaggctaggtacgaggcctgggtggtnacnggtggcgcggcttcccgcggtcttctctgcaaatgggctccgtggcctagcgcccccgtccccgccacccgtgatcgtgcgccgaggcccgcgaggggtcgccgcccagatcccaccagccagcaagctaaagcatggcggccatcccctccagcggctcgctcgtggccacccacgactactaccggcgccgcctgggttccacttccagcaacagctcctgcagcagtaccgagtgccccggggaagccattccccaccccccaggtctccccaaggctgacccgggtcattggtgggccagcttctttttcgggaagtccaccctcccgttcatggccacggtgttggagtccgcagagcactcggaacctccccaggcctccagcagcatgaccgcctgtggcctggctcgggacgccccgaggaagcagcccggcggtcagtccagcacagccagcgctgggcccccgtcctgacctgagcggttaccaccagccccaggcctgcggaggcgctagtccaccagagcccctccccgcccctctccccactccgcatccctcgcccccctccccacctcccaccccccaccctgtaaactaggcggctgcagcaagcagaccttcgcatcaacacagcagacaccaaaaaccagtgagagccccgctctctaccgcccggccccagcactcgctagctttcctgacacctggaactgtgcacctggcaccaagcggaaaataaactccaagcagcacagtagccccgatggtgtgtgcctgagctgtgtggcccgaggttccaaaaaaaaaaaaaaaaaaaaaaaaaaaaaaaaaaaaaaaaaaaggggggtttttttaaaaggcccccgggggntnnaaattttggnntnggccnttttttaanncannaaaaaaatttnccccttnnttnnnttttttnngggggttttttttaccagaaa

SEQ ID NO: 422286 - DNA, 1420 bp, Homo sapiens
  misc_feature (32)..(32): n is a, c, g, or t
  misc_feature (35)..(35): n is a, c, g, or t
  misc_feature (1419)..(1419): n is a, c, g, or t
aaaactaggctaggtacgaggcctgggtggtnacnggtggcgcggcttcccgcggtcttctctgcaaatgggctccgtggcctagcgcccccgtccccgccacccgtgatcgtgcgccgaggcccgcgaggggtcgccgcccagatcccaccagccagcaagctaaagcatggcggccatcccctccagcggctcgctcgtggccacccacgactactaccggcgccgcctgggttccacttccagcaacagctcctgcagcagtaccgagtgccccggggaagccattccccaccccccaggtctccccaaggctgacccgggtcattggtgggccagcttctttttcgggaagtccaccctcccgttcatggccacggtgttggagtccgcagagcactcggaacctccccaggcctccagcagcatgaccgcctgtggcctggctcgggacgccccgaggaagcagcccggcggtcagtccagcacagccagcgctgggcccccgtcctgacctgagcggttaccaccagccccaggcctgcggaggcgctagtccaccagagcccctccccgcccctcccaccccccaccctgtaaactaggcggctgcagcaagcagaccttcgcatcaacacagcagacaccaaaaaccagtgagagccccgctctctaccgcccggccccagcactcgctagctttcctgacacctggaactgtgcacctggcaccaagcggaaaataaactccaagcagcaaaaaaaaaaaaaaaaaaaaaaaaaaaaaaaaaaaaaaaaaaaaaaaaaaaaaaaaaaaaaaaaaaaaaaggggggcggccgcgccccaaatatatattctctctctctcggagagggcgcccacatttttcgcgcgctcacacccgaattttgttgtggaaagagagaggggctccctctatataggggagagcgtcgtcttttattataagccgcgagaggagcgcgggcgcgccgcgcgtttttatacaacaacggttggtagaggtggggacaacagacgcgggaacaacgtggtgaggatcttcttgtgagagaaaaagagcacacctcttctatttgtgggcggggggaggagagaacaattctgtgtggcggcaaaaaactctcctctctctcgagagaatgatttattagaacgctctctctagagggggaatatctttatatacacactattttataagaggtgtgtatatatagaggtgtgtgtgtataaaaacaaaaaggggtgtgtatatatgtgttgtgtgtgcgagtggtgagagagagaaattgtgtgtggtgtatatgagtagggatttatttatattatttgtgatagagaaatattatttatatataacgcggaggggggattttttttttaaaaatattggnt

SEQ ID NO: 422287 - DNA, 903 bp, Homo sapiens
  misc_feature (18)..(18): n is a, c, g, or t
  misc_feature (815)..(815): n is a, c, g, or t
  misc_feature (817)..(818): n is a, c, g, or t
  misc_feature (828)..(829): n is a, c, g, or t
  misc_feature (831)..(831): n is a, c, g, or t
  misc_feature (836)..(836): n is a, c, g, or t
  misc_feature (845)..(846): n is a, c, g, or t
  misc_feature (849)..(850): n is a, c, g, or t
  misc_feature (861)..(861): n is a, c, g, or t
  misc_feature (868)..(869): n is a, c, g, or t
  misc_feature (872)..(874): n is a, c, g, or t
  misc_feature (881)..(882): n is a, c, g, or t
ggtacaccgggtgccgcnagaggcccgcgaggggtcgccgcccagatcccaccagccagcaagctaaagcatggcggccatcccctccagcggctcgctcgtggccacccacgactactaccggcgccgcctgggttccacttccagcaacagctcctgcagcagtaccgagtgccccggggaagccattccccaccccccaggtctccccaaggctgacccgggtcattggtgggccagcttctttttcgggaagtccaccctcccgttcatggccacggtgttggagtccgcagagcactcggaacctccccaggcctccagcagcatgaccgcctgtggcctggctcgggacgccccgaggaagcagcccggcggtcagtccagcacagccagcgctgggcccccgtcctgacctgagcggttaccaccagccccaggcctgcggaggcgctagtccaccagagcccctccccgcccctctccccactccgcatccctcgcccccctccccacctcccaccccccaccctgtaaactaggcggctgcagcaagcagaccttcgcatcaacacagcagacaccaaaaaccagtgagagccccgctctctaccgcccggccccagcactcgctagctttcctgacacctggaactgtgcacctggcaccaagcggaaaataaactccaagcagcacagtagccccgatggtgtgtgcctgagctgtgtggcccgaggttccaaaaaaaaaaaaaaaaaaaaaaaaaaaaaaaaaaaaaaaaaaaggggggtttttttaaaaggcccccgggggntnnaaattttggnntnggccnttttttaanncannaaaaaaatttnccccttnnttnnnttttttnngggggttttttttaccagaaa

SEQ ID NO: 422288 - DNA, 1130 bp, Homo sapiens
  misc_feature (1042)..(1042): n is a, c, g, or t
  misc_feature (1044)..(1045): n is a, c, g, or t
  misc_feature (1055)..(1056): n is a, c, g, or t
  misc_feature (1058)..(1058): n is a, c, g, or t
  misc_feature (1063)..(1063): n is a, c, g, or t
  misc_feature (1072)..(1073): n is a, c, g, or t
  misc_feature (1076)..(1077): n is a, c, g, or t
  misc_feature (1088)..(1088): n is a, c, g, or t
  misc_feature (1095)..(1096): n is a, c, g, or t
  misc_feature (1099)..(1101): n is a, c, g, or t
  misc_feature (1108)..(1109): n is a, c, g, or t
ggcgggctcctctcgggtcgggcgggttgggacggcgcccaccaggttcccgacgtctgggccggggccccgcgcacaaagcgcctttgttccacccgctcggccggtttgggctggttggagccgcccgcgccccgcgcggcgaaggcggtgccgggagctggggagccccgcctcggtaaataacccagcgcggcggctccacccgctggggagcgcccttcatgacggaaggccgctgacccgaggggctcctccacccccatgcgcagatcccaccagccagcaagctaaagcatggcggccatcccctccagcggctcgctcgtggccacccacgactactaccggcgccgcctgggttccacttccagcaacagctcctgcagcagtaccgagtgccccggggaagccattccccaccccccaggtctccccaaggctgacccgggtcattggtgggccagcttctttttcgggaagtccaccctcccgttcatggccacggtgttggagtccgcagagcactcggaacctccccaggcctccagcagcatgaccgcctgtggcctggctcgggacgccccgaggaagcagcccggcggtcagtccagcacagccagcgctgggcccccgtcctgacctgagcggttaccaccagccccaggcctgcggaggcgctagtccaccagagcccctccccgcccctctccccactccgcatccctcgcccccctccccacctcccaccccccaccctgtaaactaggcggctgcagcaagcagaccttcgcatcaacacagcagacaccaaaaaccagtgagagccccgctctctaccgcccggccccagcactcgctagctttcctgacacctggaactgtgcacctggcaccaagcggaaaataaactccaagcagcacagtagccccgatggtgtgtgcctgagctgtgtggcccgaggttccaaaaaaaaaaaaaaaaaaaaaaaaaaaaaaaaaaaaaaaaaaaggggggtttttttaaaaggcccccgggggntnnaaattttggnntnggccnttttttaanncannaaaaaaatttnccccttnnttnnnttttttnngggggttttttttaccagaaa

SEQ ID NO: 422289 - DNA, 1162 bp, Homo sapiens
  misc_feature (1074)..(1074): n is a, c, g, or t
  misc_feature (1076)..(1077): n is a, c, g, or t
  misc_feature (1087)..(1088): n is a, c, g, or t
  misc_feature (1090)..(1090): n is a, c, g, or t
  misc_feature (1095)..(1095): n is a, c, g, or t
  misc_feature (1104)..(1105): n is a, c, g, or t
  misc_feature (1108)..(1109): n is a, c, g, or t
  misc_feature (1120)..(1120): n is a, c, g, or t
  misc_feature (1127)..(1128): n is a, c, g, or t
  misc_feature (1131)..(1133): n is a, c, g, or t
  misc_feature (1140)..(1141): n is a, c, g, or t
cccgggcgcggggccttttaacccctgcagacccaggaccggccgggccgccccaagacgaacgccgcagggctgggctcagcccaagccagacggcgagagtcgcaccgaggtggaagctgggggcgcggcctcgccggggccaggaaaggggcggggccgggtggggcccggggaggagcctgtgcgccccgccctccgtgacgcgccgcggcccccgcgcatataagtgggcgcgtcggacgcgtgggtcgaccccgcgcgcgcctctctgtcgtggcgcggcttcccgcggtcttctctgcaaatgggctccgtggcctagcgcccccgtccccgccacccgtgatcgtgcgccgaggcccgcgaggggtcgccgcccaggccgcctgggttccacttccagcaacagctcctgcagcagtaccgagtgccccggggaagccattccccaccccccaggtctccccaaggctgacccgggtcattggtgggccagcttctttttcgggaagtccaccctcccgttcatggccacggtgttggagtccgcagagcactcggaacctccccaggcctccagcagcatgaccgcctgtggcctggctcgggacgccccgaggaagcagcccggcggtcagtccagcacagccagcgctgggcccccgtcctgacctgagcggttaccaccagccccaggcctgcggaggcgctagtccaccagagcccctccccgcccctctccccactccgcatccctcgcccccctccccacctcccaccccccaccctgtaaactaggcggctgcagcaagcagaccttcgcatcaacacagcagacaccaaaaaccagtgagagccccgctctctaccgcccggccccagcactcgctagctttcctgacacctggaactgtgcacctggcaccaagcggaaaataaactccaagcagcacagtagccccgatggtgtgtgcctgagctgtgtggcccgaggttccaaaaaaaaaaaaaaaaaaaaaaaaaaaaaaaaaaaaaaaaaaaggggggtttttttaaaaggcccccgggggntnnaaattttggnntnggccnttttttaanncannaaaaaaatttnccccttnnttnnnttttttnngggggttttttttaccagaaa

SEQ ID NO: 422290 - DNA, 1320 bp, Homo sapiens
  misc_feature (1232)..(1232): n is a, c, g, or t
  misc_feature (1234)..(1235): n is a, c, g, or t
  misc_feature (1245)..(1246): n is a, c, g, or t
  misc_feature (1248)..(1248): n is a, c, g, or t
  misc_feature (1253)..(1253): n is a, c, g, or t
  misc_feature (1262)..(1263): n is a, c, g, or t
  misc_feature (1266)..(1267): n is a, c, g, or t
  misc_feature (1278)..(1278): n is a, c, g, or t
  misc_feature (1285)..(1286): n is a, c, g, or t
  misc_feature (1289)..(1291): n is a, c, g, or t
  misc_feature (1298)..(1299): n is a, c, g, or t
cccgggcgcggggccttttaacccctgcagacccaggaccggccgggccgccccaagacgaacgccgcagggctgggctcagcccaagccagacggcgagagtcgcaccgaggtggaagctgggggcgcggcctcgccggggccaggaaaggggcggggccgggtggggcccggggaggagcctgtgcgccccgccctccgtgacgcgccgcggcccccgcgcatataagtgggcgcgtcggacgcgtgggtcgaccccgcgcgcgcctctctgtcgtggcgcggcttcccgcggtcttctctgcaaatgggctccgtggcctagcgcccccgtccccgccacccgtgatcgtgcgccgaggcccgcgaggggtcgccgcccagatcccaccagccagcaagctaaagcatggcggccatcccctccagcggctcgctcgtggccacccacgactactaccggcgccgcctgggttccacttccagcaacagctcctgcagcagtaccgagtgccccggggaagccattccccaccccccaggtgagtgcaggatcgcccctttctccccccgctcctccaggagctggcagcatcaagaccccacttcgcttctctcaggtctccccaaggctgacccgggtcattggtgggccagcttctttttcgggaagtccaccctcccgttcatggccacggtgttggagtccgcagagcactcggaacctccccaggcctccagcagcatgaccgcctgtggcctggctcgggacgccccgaggaagcagcccggcggtcagtccagcacagccagcgctgggcccccgtcctgacctgagcggttaccaccagccccaggcctgcggaggcgctagtccaccagagcccctccccgcccctctccccactccgcatccctcgcccccctccccacctcccaccccccaccctgtaaactaggcggctgcagcaagcagaccttcgcatcaacacagcagacaccaaaaaccagtgagagccccgctctctaccgcccggccccagcactcgctagctttcctgacacctggaactgtgcacctggcaccaagcggaaaataaactccaagcagcacagtagccccgatggtgtgtgcctgagctgtgtggcccgaggttccaaaaaaaaaaaaaaaaaaaaaaaaaaaaaaaaaaaaaaaaaaaggggggtttttttaaaaggcccccgggggntnnaaattttggnntnggccnttttttaanncannaaaaaaatttnccccttnnttnnnttttttnngggggttttttttaccagaaa

SEQ ID NO: 422291 - DNA, 1205 bp, Homo sapiens
  misc_feature (1117)..(1117): n is a, c, g, or t
  misc_feature (1119)..(1120): n is a, c, g, or t
  misc_feature (1130)..(1131): n is a, c, g, or t
  misc_feature (1133)..(1133): n is a, c, g, or t
  misc_feature (1138)..(1138): n is a, c, g, or t
  misc_feature (1147)..(1148): n is a, c, g, or t
  misc_feature (1151)..(1152): n is a, c, g, or t
  misc_feature (1163)..(1163): n is a, c, g, or t
  misc_feature (1170)..(1171): n is a, c, g, or t
  misc_feature (1174)..(1176): n is a, c, g, or t
  misc_feature (1183)..(1184): n is a, c, g, or t
cccgggcgcggggccttttaacccctgcagacccaggaccggccgggccgccccaagacgaacgccgcagggctgggctcagcccaagccagacggcgagagtcgcaccgaggtggaagctgggggcgcggcctcgccggggccaggaaaggggcggggccgggtggggcccggggaggagcctgtgcgccccgccctccgtgacgcgccgcggcccccgcgcatataagtgggcgcgtcggacgcgtgggtcgaccccgcgcgcgcctctctgtcgtggcgcggcttcccgcggtcttctctgcaaatgggctccgtggcctagcgcccccgtccccgccacccgtgatcgtgcgccgaggcccgcgaggggtcgccgcccagatcccaccagccagcaagctaaagcatggcggccatcccctccagcggctcgctcgtggccacccacgactactaccggcgccgcctgggttccacttccagcaacagctcctgcagcagtaccgagtgccccggggaagccattccccaccccccagcttctttttcgggaagtccaccctcccgttcatggccacggtgttggagtccgcagagcactcggaacctccccaggcctccagcagcatgaccgcctgtggcctggctcgggacgccccgaggaagcagcccggcggtcagtccagcacagccagcgctgggcccccgtcctgacctgagcggttaccaccagccccaggcctgcggaggcgctagtccaccagagcccctccccgcccctctccccactccgcatccctcgcccccctccccacctcccaccccccaccctgtaaactaggcggctgcagcaagcagaccttcgcatcaacacagcagacaccaaaaaccagtgagagccccgctctctaccgcccggccccagcactcgctagctttcctgacacctggaactgtgcacctggcaccaagcggaaaataaactccaagcagcacagtagccccgatggtgtgtgcctgagctgtgtggcccgaggttccaaaaaaaaaaaaaaaaaaaaaaaaaaaaaaaaaaaaaaaaaaaggggggtttttttaaaaggcccccgggggntnnaaattttggnntnggccnttttttaanncannaaaaaaatttnccccttnnttnnnttttttnngggggttttttttaccagaaa

SEQ ID NO: 422292 - DNA, 1604 bp, Homo sapiens
  misc_feature (1603)..(1603): n is a, c, g, or t
cccgggcgcggggccttttaacccctgcagacccaggaccggccgggccgccccaagacgaacgccgcagggctgggctcagcccaagccagacggcgagagtcgcaccgaggtggaagctgggggcgcggcctcgccggggccaggaaaggggcggggccgggtggggcccggggaggagcctgtgcgccccgccctccgtgacgcgccgcggcccccgcgcatataagtgggcgcgtcggacgcgtgggtcgaccccgcgcgcgcctctctgtcgtggcgcggcttcccgcggtcttctctgcaaatgggctccgtggcctagcgcccccgtccccgccacccgtgatcgtgcgccgaggcccgcgaggggtcgccgcccagatcccaccagccagcaagctaaagcatggcggccatcccctccagcggctcgctcgtggccacccacgactactaccggcgccgcctgggttccacttccagcaacagctcctgcagcagtaccgagtgccccggggaagccattccccaccccccaggtctccccaaggctgacccgggtcattggtgggccagcttctttttcgggaagtccaccctcccgttcatggccacggtgttggagtccgcagagcactcggaacctccccaggcctccagcagcatgaccgcctgtggcctggctcgggacgccccgaggaagcagcccggcggtcagtccagcacagccagcgctgggcccccgtcctgacctgagcggttcccaccccccaccctgtaaactaggcggctgcagcaagcagaccttcgcatcaacacagcagacaccaaaaaccagtgagagccccgctctctaccgcccggccccagcactcgctagctttcctgacacctggaactgtgcacctggcaccaagcggaaaataaactccaagcagcaaaaaaaaaaaaaaaaaaaaaaaaaaaaaaaaaaaaaaaaaaaaaaaaaaaaaaaaaaaaaaaaaaaaaaggggggcggccgcgccccaaatatatattctctctctctcggagagggcgcccacatttttcgcgcgctcacacccgaattttgttgtggaaagagagaggggctccctctatataggggagagcgtcgtcttttattataagccgcgagaggagcgcgggcgcgccgcgcgtttttatacaacaacggttggtagaggtggggacaacagacgcgggaacaacgtggtgaggatcttcttgtgagagaaaaagagcacacctcttctatttgtgggcggggggaggagagaacaattctgtgtggcggcaaaaaactctcctctctctcgagagaatgatttattagaacgctctctctagagggggaatatctttatatacacactattttataagaggtgtgtatatatagaggtgtgtgtgtataaaaacaaaaaggggtgtgtatatatgtgttgtgtgtgcgagtggtgagagagagaaattgtgtgtggtgtatatgagtagggatttatttatattatttgtgatagagaaatattatttatatataacgcggaggggggattttttttttaaaaatattggnt

SEQ ID NO: 422293 - DNA, 1043 bp, Homo sapiens
  misc_feature (955)..(955): n is a, c, g, or t
  misc_feature (957)..(958): n is a, c, g, or t
  misc_feature (968)..(969): n is a, c, g, or t
  misc_feature (971)..(971): n is a, c, g, or t
  misc_feature (976)..(976): n is a, c, g, or t
  misc_feature (985)..(986): n is a, c, g, or t
  misc_feature (989)..(990): n is a, c, g, or t
  misc_feature (1001)..(1001): n is a, c, g, or t
  misc_feature (1008)..(1009): n is a, c, g, or t
  misc_feature (1012)..(1014): n is a, c, g, or t
  misc_feature (1021)..(1022): n is a, c, g, or t
cccgggcgcggggccttttaacccctgcagacccaggaccggccgggccgccccaagacgaacgccgcagggctgggctcagcccaagccagacggcgagagtcgcaccgaggtggaagctgggggcgcggcctcgccggggccaggaaaggggcggggccgggtggggcccggggaggagcctgtgcgccccgccctccgtgacgcgccgcggcccccgcgcatataagtgggcgcgtcggacgcgtgggtcgaccccgcgcgcgcctctctgtcgtggcgcggcttcccgcggtcttctctgcaaatgggctccgtggcctagcgcccccgtccccgccacccgtgatcgtgcgccgaggcccgcgaggggtcgccgcccagatcccaccagccagcaagctaaagcatggcggccatcccctccagcggctcgctcgtggccacccacgactactaccggccagcatgaccgcctgtggcctggctcgggacgccccgaggaagcagcccggcggtcagtccagcacagccagcgctgggcccccgtcctgacctgagcggttaccaccagccccaggcctgcggaggcgctagtccaccagagcccctccccgcccctctccccactccgcatccctcgcccccctccccacctcccaccccccaccctgtaaactaggcggctgcagcaagcagaccttcgcatcaacacagcagacaccaaaaaccagtgagagccccgctctctaccgcccggccccagcactcgctagctttcctgacacctggaactgtgcacctggcaccaagcggaaaataaactccaagcagcacagtagccccgatggtgtgtgcctgagctgtgtggcccgaggttccaaaaaaaaaaaaaaaaaaaaaaaaaaaaaaaaaaaaaaaaaaaggggggtttttttaaaaggcccccgggggntnnaaattttggnntnggccnttttttaanncannaaaaaaatttnccccttnnttnnnttttttnngggggttttttttaccagaaa

SEQ ID NO: 422294 - DNA, 667 bp, Homo sapiens
  misc_feature (579)..(579): n is a, c, g, or t
  misc_feature (581)..(582): n is a, c, g, or t
  misc_feature (592)..(593): n is a, c, g, or t
  misc_feature (595)..(595): n is a, c, g, or t
  misc_feature (600)..(600): n is a, c, g, or t
  misc_feature (609)..(610): n is a, c, g, or t
  misc_feature (613)..(614): n is a, c, g, or t
  misc_feature (625)..(625): n is a, c, g, or t
  misc_feature (632)..(633): n is a, c, g, or t
  misc_feature (636)..(638): n is a, c, g, or t
  misc_feature (645)..(646): n is a, c, g, or t
tgtataagtaaattttgttggaacttgattttatcttgttgtattacttgatatttttaaaattaattaaattttgttaatagtaaaaaagttgtctttttgttttattctataaaactattatattttatattatttataaaattttttattcaatatataaatttcttataaaatttatctttatttttatttttaaaattatatataataataaatattttttatagaaataatttaaattttctccccactccgcatccctcgcccccctccccacctcccaccccccaccctgtaaactaggcggctgcagcaagcagaccttcgcatcaacacagcagacaccaaaaaccagtgagagccccgctctctaccgcccggccccagcactcgctagctttcctgacacctggaactgtgcacctggcaccaagcggaaaataaactccaagcagcacagtagccccgatggtgtgtgcctgagctgtgtggcccgaggttccaaaaaaaaaaaaaaaaaaaaaaaaaaaaaaaaaaaaaaaaaaaggggggtttttttaaaaggcccccgggggntnnaaattttggnntnggccnttttttaanncannaaaaaaatttnccccttnnttnnnttttttnngggggttttttttaccagaaa

SEQ ID NO: 422295 - DNA, 1440 bp, Homo sapiens
  misc_feature (1439)..(1439): n is a, c, g, or t
cccgggcgcggggccttttaacccctgcagacccaggaccggccgggccgccccaagacgaacgccgcagggctgggctcagcccaagccagacggcgagagtcgcaccgaggtggaagctgggggcgcggcctcgccggggccaggaaaggggcggggccgggtggggcccggggaggagcctgtgcgccccgccctccgtgacgcgccgcggcccccgcgcatataagtgggcgcgtcggacgcgtgggtcgaccccgcgcgcgcctctctgtcgtggcgcggcttcccgcggtcttctctgcaaatgggctccgtggcctagcgcccccgtccccgccacccgtgatcgtgcgccgaggcccgcgaggggtcgccgcccagatcccaccagccagcaagctaaagcatggcggccatcccctccagcggctcgctcgtggccacccacgactactaccggcgccgcctgggttccacttccagcaacagctcctgcagcagtaccgagtgccccggggaagccattccccaccccccaggtctccccaaggctgacccgggtcattggtgggccagcttctttttcgggaagtccacccccaccccccaccctgtaaactaggcggctgcagcaagcagaccttcgcatcaacacagcagacaccaaaaaccagtgagagccccgctctctaccgcccggccccagcactcgctagctttcctgacacctggaactgtgcacctggcaccaagcggaaaataaactccaagcagcaaaaaaaaaaaaaaaaaaaaaaaaaaaaaaaaaaaaaaaaaaaaaaaaaaaaaaaaaaaaaaaaaaaaaaggggggcggccgcgccccaaatatatattctctctctctcggagagggcgcccacatttttcgcgcgctcacacccgaattttgttgtggaaagagagaggggctccctctatataggggagagcgtcgtcttttattataagccgcgagaggagcgcgggcgcgccgcgcgtttttatacaacaacggttggtagaggtggggacaacagacgcgggaacaacgtggtgaggatcttcttgtgagagaaaaagagcacacctcttctatttgtgggcggggggaggagagaacaattctgtgtggcggcaaaaaactctcctctctctcgagagaatgatttattagaacgctctctctagagggggaatatctttatatacacactattttataagaggtgtgtatatatagaggtgtgtgtgtataaaaacaaaaaggggtgtgtatatatgtgttgtgtgtgcgagtggtgagagagagaaattgtgtgtggtgtatatgagtagggatttatttatattatttgtgatagagaaatattatttatatataacgcggaggggggattttttttttaaaaatattggnt

SEQ ID NO: 422296 - DNA, 1284 bp, Homo sapiens
  misc_feature (1196)..(1196): n is a, c, g, or t
  misc_feature (1198)..(1199): n is a, c, g, or t
  misc_feature (1209)..(1210): n is a, c, g, or t
  misc_feature (1212)..(1212): n is a, c, g, or t
  misc_feature (1217)..(1217): n is a, c, g, or t
  misc_feature (1226)..(1227): n is a, c, g, or t
  misc_feature (1230)..(1231): n is a, c, g, or t
  misc_feature (1242)..(1242): n is a, c, g, or t
  misc_feature (1249)..(1250): n is a, c, g, or t
  misc_feature (1253)..(1255): n is a, c, g, or t
  misc_feature (1262)..(1263): n is a, c, g, or t
cccgggcgcggggccttttaacccctgcagacccaggaccggccgggccgccccaagacgaacgccgcagggctgggctcagcccaagccagacggcgagagtcgcaccgaggtggaagctgggggcgcggcctcgccggggccaggaaaggggcggggccgggtggggcccggggaggagcctgtgcgccccgccctccgtgacgcgccgcggcccccgcgcatataagtgggcgcgtcggacgcgtgggtcgaccccgcgcgcgcctctctgtcgtggcgcggcttcccgcggtcttctctgcaaatgggctccgtggcctagcgcccccgtccccgccacccgtgatcgtgcgccgaggcccgcgaggggtcgccgcccagatcccaccagccagcaagctaaagcatggcggccatcccctccagcggctcgctcgtggccacccacgactactaccggcgccgcctgggttccacttccagcaacagctcctgcagcagtaccgagtgccccggggaagccattccccaccccccagcttcccccagggttgacccgggtctctttgtgtgtgggccccgttttctttcgcggaggatgctccctccttcgtggattggctcgcccgacggtttggtggtcccgctcgggaagatcgtctgcggtacctctccccacgaggctctcacagtggctgtgagcagcatgaccgcctgtggcctggctcgggacgccccgaggaagcagcccggcggtcagtccagcacagccagcgctgggcccccgtcctgacctgagcggttaccaccagccccaggcctgcggaggcgctagtccaccagagcccctccccgcccctctccccactccgcatccctcgcccccctccccacctcccaccccccaccctgtaaactaggcggctgcagcaagcagaccttcgcatcaacacagcagacaccaaaaaccagtgagagccccgctctctaccgcccggccccagcactcgctagctttcctgacacctggaactgtgcacctggcaccaagcggaaaataaactccaagcagcacagtagccccgatggtgtgtgcctgagctgtgtggcccgaggttccaaaaaaaaaaaaaaaaaaaaaaaaaaaaaaaaaaaaaaaaaaaggggggtttttttaaaaggcccccgggggntnnaaattttggnntnggccnttttttaanncannaaaaaaatttnccccttnnttnnnttttttnngggggttttttttaccagaaa

SEQ ID NO: 422297 - DNA, 866 bp, Homo sapiens
cccgggcgcggggccttttaacccctgcagacccaggaccggccgggccgccccaagacgaacgccgcagggctgggctcagcccaagccagacggcgagagtcgcaccgaggtggaagctgggggcgcggcctcgccggggccaggaaaggggcggggccgggtggggcccggggaggagcctgtgcgccccgccctccgtgacgcgccgcggcccccgcgcatataagtgggcgcgtcggacgcgtgggtcgaccccgcgcgcgcctctctgtcgtggcgcggcttcccgcggtcttctctgcaaatgggctccgtggcctagcgcccccgtccccgccacccgtgatcgtgcgccgaggcccgcgaggggtcgccgcccagatcccaccagccagcaagctaaagcatggcggccatcccctccagcggctcgctcgtggccacccacgactactaccggcgccgcctgggttccacttccagcaacagctcctgcagcagtaccgagtgccccggggaagccattccccaccccccaggtctccccaaggctgacccgggtcattggtgggccagcttctttttcgggaagtccaccctcccgttcatggccacggtgttggagtccgcagagcactcggaacctccccaggcctccagcagcatgaccgcctgtggcctggctcgggacgccccgaggaagcagcccggcggtcagtccagcacagccagcgctgggcccccgtcctgacctgagcggttaagccagtcctggcttgctcaggtctcatggcttgctcaggtctatagatagttgggtggttggtgtaaatgagtgaggcaggagacctgagcaagccagg

SEQ ID NO: 422298 - DNA, 901 bp, Homo sapiens
  misc_feature (900)..(900): n is a, c, g, or t
tgagtccgcgcagacctgaccctgcgtctcgcagctcggttgagcccgccgccgccttctcgggatgcgcggccggggtccgcgcagcggctgcagcaagcagaccttcgcatcaacacagcagacaccaaaaaccagtgagagccccgctctctaccgcccggccccagcactcgctagctttcctgacacctggaactgtgcacctggcaccaagcggaaaataaactccaagcagcaaaaaaaaaaaaaaaaaaaaaaaaaaaaaaaaaaaaaaaaaaaaaaaaaaaaaaaaaaaaaaaaaaaaaaggggggcggccgcgccccaaatatatattctctctctctcggagagggcgcccacatttttcgcgcgctcacacccgaattttgttgtggaaagagagaggggctccctctatataggggagagcgtcgtcttttattataagccgcgagaggagcgcgggcgcgccgcgcgtttttatacaacaacggttggtagaggtggggacaacagacgcgggaacaacgtggtgaggatcttcttgtgagagaaaaagagcacacctcttctatttgtgggcggggggaggagagaacaattctgtgtggcggcaaaaaactctcctctctctcgagagaatgatttattagaacgctctctctagagggggaatatctttatatacacactattttataagaggtgtgtatatatagaggtgtgtgtgtataaaaacaaaaaggggtgtgtatatatgtgttgtgtgtgcgagtggtgagagagagaaattgtgtgtggtgtatatgagtagggatttatttatattatttgtgatagagaaatattatttatatataacgcggaggggggattttttttttaaaaatattggnt

SEQ ID NO: 422299 - DNA, 624 bp, Homo sapiens
aaataaattgttttatatgctggctgaatagctaacaaaatatttgtgttttgatcaaaattaaagcattcaaagaaacctctcccatctccaagaaagccattctggtttcttcaccatctttgagactaaaggccttgaaatattttctgggtatcctgcaagatttttcaagatatacaacctagttttcccaggtattaaggcaacagtctagttctgatgcagagagaaattttaatccagagcactcatgagtgacacatggtcccagaaatgggacagatatggttctgtaatgagacctataccaacaaacaggatgaaaagtttgtctcccacctgctgacatttcttcacttttcagacagcaccagttgcccttgaagcagaaaacagaggtgaaatgaaactagctctccagtatgtcccagagccagtccctggtatgtaatgactttctattcagatttatgtcctttccttatccctcccttctcacagtatttactatgcgttttcaaaggtgaggccctaaagaaacttatcaagttagtaacgtatagaccaaatgagtctattcacagttgtaaataagaaaattctttttttgttattgtggca

SEQ ID NO: 422300 - DNA, 2792 bp, Homo sapiens
tttaaccattctaactttgccttgggatattgaaaattctgaatcagtgaggtatctaaataatttatattttcaaaaaataatgtttattttataattctgagtgtaaaacactatcagaaaagtaatcctcatgctcactaaacaaacctactctaagacactcaacaaccagaacagttttattattgagttgtgtacaaaaatcttgactgtccagatgaaatagtttttcagcctgcagtgtgttagtgatatatctcaaggagatgaaccaataaagtacagactttgtggtctgaagctctgttgtgaaaaaataagctaaaccaattcacactgacagtataatttgattcaagtgcagctccagttcaataaaaactaatgtttttaaaattaactttgttttgtatttggttcaactccttgctagttctctctctatataatttataaaaactgcatgttgctaatctcatgatcctgtgcatgtggactactctgcctttaacttttttacaaaaacatgtttgttcatagattaaataaaagtatgttttcaacttaatgtctaatgttttctgacaattgtaagaataattttgaaatggaaatgctgctgtttagtttccacagtgcctacacaacctgataatccattttctcaccctgacaaactcaaaaggatgagcaagtctgttccagcatttctccaagatgagagtgatgacagagaaacagatacagcatcagaaagcagttaccagctcagcagacacaagaagagcccgagctctttaaccaatcttagcagctcctctggcatgacgtccttgtcttctgtgagtggcagtgtgatgagtgtttatagtggagactttggcaatctggaagttaaaggaaatattcagtttgcaattgaatatgtggagtcactgaaggagttgcatgtttttgtggcccagtgtaaggacttagcagcagcggatgtaaaaaaacagcgttcagacccatatgtaaaggcctatttgctaccagacaaaggcaaaatgggcaagaagaaaacactcgtagtgaagaaaaccttgaatcctgtgtataacgaaatactgcggtataaaattgaaaaacaaatcttaaagacacagaaattgaacctgtccatttggcatcgggatacatttaagcgcaatagtttcctaggggaggtggaacttgatttggaaacatgggactgggataacaaacagaataaacaattgagatggtaccctctgaagcggaagacagcaccagttgcccttgaagcagaaaacagaggtgaaatgaaactagctctccagtatgtcccagagccagtccctggtaaaaagcttcctacaactggagaagtgcacatctgggtgaaggaatgccttgatctaccactgctaaggggaagtcatctaaattcttttgttaaatgtaccatccttccagatacaagtaggaaaagtcgccagaagacaagagctgtagggaaaaccaccaaccctatcttcaaccacactatggtgtatgatgggttcaggcctgaagatctgatggaagcctgtgtagagcttactgtctgggaccattacaaattaaccaaccaatttttgggaggtcttcgtattggctttggaacaggtaaaagttatgggactgaagtggactggatggactctacttcagaggaagttgctctctgggagaagatggtaaactcccccaatacttggattgaagcaacactgcctctcagaatgcttttgattgccaagatttccaaatgagcccaaattccactggctcctccactgaaaactactaaaccggtggaatctgatcttgaaaatctgagtaggtggacaaatatcctcactttctatctattgcacctaaggaatactacacagcatgtaaaagtcaatctgcatgtgcttctttgattacaaggcccaagggatttaaatataacaaaatgtgtaatttgtgactctaatattaaataagatatttgaacaagctaggaaaattgaatttctgctgctgcttcaaagaaaaagctgccccagagcattaaacatggggtattgttaagaagcaaaatgttcttgtttgccatcatgtgtttcacaccacaattctgtgccacagttaagagggtctggtacccttgcaggacctttgtaggttgtgggaaaaagtcgcagaaagatactcaaagtggagcagggaatggagacagacatcagtgatgataaaaaaaaaaatggaccttaagaaactatttactctgtaatctctaataaaatatggaattccatattagggcaatgagactgaaactactggtgtttttctgccttgagaaaacaaacagttaaaacaagcctcaaatgtattttagtgccacccactggccataggtacaattcagttgttggcttgttttgacttaattctaaaataggtctcaagcctgtatttttatgagtttatttttttaaaaccctgcatatatatgattgtttttcttataactttactatatgaaagcagcataagagtagtcacaaacatgttttgcaacaaagttttaattagaatgtaagttgctcagttatactgttcttcttatgtatgtaaaattttcgtattttgtaaaaacccttagaataaattatcatttgatttaaattgtattagaaaattagcgtgacttctcattttaaataaaatattttaggaattctaaacatcta

SEQ ID NO: 422301 - DNA, 4276 bp, Homo sapiens
gggcgacacccgggccgtgccgccagcgtccgtcgggagagtgaaggctcgcaacgccttgcccgggggaaggtaacgcgccgcgcccggggctgcgcggtttgcaccgccaggccgagggctgggggccagaagacaagagagacggcgaggcgcgctccctgcccggcagcgactcggaggtaggtgatgctctgatgctgctgcctcttatgaattgacgacaggtgcagagagagaataaactgtgtctaagactggaccagagagtgagtgtgctggaagccaccataggaacaagcgacctgtttggcaaggaatacagcatccttctgagagcctcttctcgacactatcccacagaccaggacttcctcatgggaaagagcacttaggatcttgctatcagctgccctaaacttttgctgagccaaaataagactttgatgcagaactgaacaagatatttcatttttgtgtgttttaatcttcctggttgcagtcttagttgttcagccctgagaattttgagccacatttgttgctattatttttgcatgcacttttcaaaatgattgacttaagcttcctgactgaagaggaacaagaggccatcatgaaggttttgcagcgggatgctgctctgaagagggccgaagaagagagagtcagacatttgcctgaaaaaattaaggatgaccagcagctgaagaatatgagtggccaatggttttatgaagccaaggcaaaaaggcacagggacaaaatccatggcgcagatatcatcagagcatctatgagaaagaagaggccccagatagcagctgagcagagtaaagacagagaaaatggggcaaaggaaagctgggtgaataatgtcaacaaagatgctttccttcctccagagctggctggcgttgtagaagagccagaagaagatgcagcaccagcaagcccgagttccagtgtggtaaatccagcttccagtgtgattgatatgtcccaggaaaacacaaggaaaccaaatgtgtctccagagaagaggaagaatccgtttaatagctccaagttgccagaaggtcactcatcacaacaaactaaaaatgaacagtcaaaaaatggaagaactggtttatttcagacttcaaaagaggatgaattgtcagagtcaaaagaaaagtcaactgtcgcagatacttcaatccaaaagttagagaaatcaaagcagactttgccaggcctttcaaatgggtcccaaatcaaggctccaatccccaaagccaggaagatgatctacaaatcaactgatttaaacaaagatgataaccagtcttttcctagacaaaggacagactccctgaaagcgagaggggctccgagagggatcctcaagcgcaactccagttccagtagcacagactcagaaacccttcgttataatcacaactttgaacccaaaagcaaaattgtgtcacctggcctaaccatccatgagagaatttctgagaaggagcattctttagaagacaactcttccccaaactccctggagccattaaagcatgtgagattctctgcagtgaaggatgagcttccacagagtcctgggctaatccatggtcgggaagtaggagaatttagtgttttagaatctgacagattgaaaaatggaatggaagatgcaggggacacagaagagtttcagagtgaccctaagccttctcaatacagaaagccttcgctttttcatcaatcaacctcaagcccatatgtatcaaaaagtgaaacacatcagccaatgacttctggttcttttccaattaatgggctgcattctcattcagaagttttaactgcaagaccacagtctatggagaattcaccaaccatcaatgaacccaaagataaatcatcagaattaacaaggcttgaatctgtattacccagaagccctgctgatgaactgtctcattgtgttgagcctgagccatctcaggtgccaggtggcagttctagagaccgtcagcaaggttcagaagaagaacccagtcctgttttgaaaactttggaaaggagtgccgctaggaaaatgccttccaaaagtctagaagacatttcatcagattcatcaaatcaagcaaaagtagataatcagccagaagaattagtgcgtagtgctgaagatgatgagaaaccagatcagaagccagttacaaatgaatgcgtaccaagaatttccacagtgcctacacaacctgataatccattttctcaccctgacaaactcaaaaggatgagcaagtctgttccagcatttctccaagatgaggtgagtggcagtgtgatgagtgtttatagtggagactttggcaatctggaagttaaaggaaatattcagtttgcaattgaatatgtggagtcactgaaggagttgcatgtttttgtggcccagtgtaaggacttagcagcagcggatgtaaaaaaacagcgttcagacccatatgtaaaggcctatttgctaccagacaaaggcaaaatgggcaagaagaaaacactcgtagtgaagaaaaccttgaatcctgtgtataacgaaatactgcggtataaaattgaaaaacaaatcttaaagacacagaaattgaacctgtccatttggcatcgggatacatttaagcgcaatagtttcctaggggaggtggaacttgatttggaaacatgggactgggataacaaacagaataaacaattgagatggtaccctctgaagcggaagacagcaccagttgcccttgaagcagaaaacagaggtgaaatgaaactagctctccagtatgtcccagagccagtccctggtaaaaagcttcctacaactggagaagtgcacatctgggtgaaggaatgccttgatctaccactgctaaggggaagtcatctaaattcttttgttaaatgtaccatccttccagatacaagtaggaaaagtcgccagaagacaagagctgtagggaaaaccaccaaccctatcttcaaccacactatggtgtatgatgggttcaggcctgaagatctgatggaagcctgtgtagagcttactgtctgggaccattacaaattaaccaaccaatttttgggaggtcttcgtattggctttggaacaggtaaaagttatgggactgaagtggactggatggactctacttcagaggaagttgctctctgggagaagatggtaaactcccccaatacttggattgaagcaacactgcctctcagaatgcttttgattgccaagatttccaaatgagcccaaattccactggctcctccactgaaaactactaaaccggtggaatctgatcttgaaaatctgagtaggtggacaaatatcctcactttctatctattgcacctaaggaatactacacagcatgtaaaagtcaatctgcatgtgcttctttgattacaaggcccaagggatttaaatataacaaaatgtgtaatttgtgactctaatattaaataagatatttgaacaagctaggaaaattgaatttctgctgctgcttcaaagaaaaagctgccccagagcattaaacatggggtattgttaagaagcaaaatgttcttgtttgccatcatgtgtttcacaccacaattctgtgccacagttaagagggtctggtacccttgcaggacctttgtaggttgtgggaaaaagtcgcagaaagatactcaaagtggagcagggaatggagacagacatcagtgatgataaaaaaaaaaatggaccttaagaaactatttactctgtaatctctaataaaatatggaattccatattagggcaatgagactgaaactactggtgtttttctgccttgagaaaacaaacagttaaaacaagcctcaaatgtattttagtgccacccactggccataggtacaattcagttgttggcttgttttgacttaattctaaaataggtctcaagcctgtatttttatgagtttatttttttaaaaccctgcatatatatgattgtttttcttataactttactatatgaaagcagcataagagtagtcacaaacatgttttgcaacaaagttttaattagaatgtaagttgctcagttatactgttcttcttatgtatgtaaaattttcgtattttgtaaaaacccttagaataaattatcatttgatttaaattgtattagaaaattagcgtgacttctcattttaaataaaatattttaggaattctaaacatcta

SEQ ID NO: 422302 - DNA, 857 bp, Homo sapiens
ggctgttgcagccccgtgctttctcctgctgctggccgattgcttgctctgaactaaccctctaacccttgggagtctgtgtgcagcagtgatgtgagctgcatccgggctgaaatgggagctcccgctatggcactggctcaaggagctaatctaaagagaaagtattttggggaagacatcttggttgcacccctcattgcatcttgactaattgcttccaactccgggggcttccagggacaatctcattgttcttttctctccaagggtcagccatgttaaccatttgttaatttcttctgaacagatcaagcaaaagtagataatcagccagaagaattagtgcgtagtgctgaagatgatgagaaaccagatcagaagccagttacaaatgaatgcgtaccaagaatttccacagtgcctacacaacctgataatccattttctcaccctgacaaactcaaaaggatgagcaagtctgttccagcatttctccaagatgagagtgatgacagagaaacagatacagcatcagaaagcagttaccagctcagcagacacaagaagagcccgagctctttaaccaatcttagcagctcctctggcatgacgtccttgtcttctgaggtggcagtgtgaatgacgtgtgtatagggggacttgggcaatctggacgttccggacatattcaggtggcactggaccttgggggtcctgggaggggttggctgtgtttggggccaggtgagggcctagcgccggggtggtcaaaaccgcgtcgaccctatgttaggcgccttgtgcccccaggggcgggggaaccccgcgtgggaactgtttccggttctccacgg

SEQ ID NO: 422303 - DNA, 4348 bp, Homo sapiens
gggcgacacccgggccgtgccgccagcgtccgtcgggagagtgaaggctcgcaacgccttgcccgggggaaggtaacgcgccgcgcccggggctgcgcggtttgcaccgccaggccgagggctgggggccagaagacaagagagacggcgaggcgcgctccctgcccggcagcgactcggaggtaggtgatgctctgatgctgctgcctcttatgaattgacgacaggtgcagagagagaataaactgtgtctaagactggaccagagagtgagtgtgctggaagccaccataggaacaagcgacctgtttggcaaggaatacagcatccttctgagagcctcttctcgacactatcccacagaccaggacttcctcatgggaaagagcacttaggatcttgctatcagctgccctaaacttttgctgagccaaaataagactttgatgcagaactgaacaagatatttcatttttgtgtgttttaatcttcctggttgcagtcttagttgttcagccctgagaattttgagccacatttgttgctattatttttgcatgcacttttcaaaatgattgacttaagcttcctgactgaagaggaacaagaggccatcatgaaggttttgcagcgggatgctgctctgaagagggccgaagaagagagagtcagacatttgcctgaaaaaattaaggatgaccagcagctgaagaatatgagtggccaatggttttatgaagccaaggcaaaaaggcacagggacaaaatccatggcgcagatatcatcagagcatctatgagaaagaagaggccccagatagcagctgagcagagtaaagacagagaaaatggggcaaaggaaagctgggtgaataatgtcaacaaagatgctttccttcctccagagctggctggcgttgtagaagagccagaagaagatgcagcaccagcaagcccgagttccagtgtggtaaatccagcttccagtgtgattgatatgtcccaggaaaacacaaggaaaccaaatgtgtctccagagaagaggaagaatccgtttaatagctccaagttgccagaaggtcactcatcacaacaaactaaaaatgaacagtcaaaaaatggaagaactggtttatttcagacttcaaaagaggatgaattgtcagagtcaaaagaaaagtcaactgtcgcagatacttcaatccaaaagttagagaaatcaaagcagactttgccaggcctttcaaatgggtcccaaatcaaggctccaatccccaaagccaggaagatgatctacaaatcaactgatttaaacaaagatgataaccagtcttttcctagacaaaggacagactccctgaaagcgagaggggctccgagagggatcctcaagcgcaactccagttccagtagcacagactcagaaacccttcgttataatcacaactttgaacccaaaagcaaaattgtgtcacctggcctaaccatccatgagagaatttctgagaaggagcattctttagaagacaactcttccccaaactccctggagccattaaagcatgtgagattctctgcagtgaaggatgagcttccacagagtcctgggctaatccatggtcgggaagtaggagaatttagtgttttagaatctgacagattgaaaaatggaatggaagatgcaggggacacagaagagtttcagagtgaccctaagccttctcaatacagaaagccttcgctttttcatcaatcaacctcaagcccatatgtatcaaaaagtgaaacacatcagccaatgacttctggttcttttccaattaatgggctgcattctcattcagaagttttaactgcaagaccacagtctatggagaattcaccaaccatcaatgaacccaaagataaatcatcagaattaacaaggcttgaatctgtattacccagaagccctgctgatgaactgtctcattgtgttgagcctgagccatctcaggtgccaggtggcagttctagagaccgtcagcaaggttcagaagaagaacccagtcctgttttgaaaactttggaaaggagtgccgctaggaaaatgccttccaaaagtctagaagacatttcatcagattcatcaaatcaagcaaaagtagataatcagccagaagaattagtgcgtagtgctgaagatgtttccacagtgcctacacaacctgataatccattttctcaccctgacaaactcaaaaggatgagcaagtctgttccagcatttctccaagatgagagtgatgacagagaaacagatacagcatcagaaagcagttaccagctcagcagacacaagaagagcccgagctctttaaccaatcttagcagctcctctggcatgacgtccttgtcttctgtgagtggcagtgtgatgagtgtttatagtggagactttggcaatctggaagttaaaggaaatattcagtttgcaattgaatatgtggagtcactgaaggagttgcatgtttttgtggcccagtgtaaggacttagcagcagcggatgtaaaaaaacagcgttcagacccatatgtaaaggcctatttgctaccagacaaaggcaaaatgggcaagaagaaaacactcgtagtgaagaaaaccttgaatcctgtgtataacgaaatactgcggtataaaattgaaaaacaaatcttaaagacacagaaattgaacctgtccatttggcatcgggatacatttaagcgcaatagtttcctaggggaggtggaacttgatttggaaacatgggactgggataacaaacagaataaacaattgagatggtaccctctgaagcggaagacagcaccagttgcccttgaagcagaaaacagaggtgaaatgaaactagctctccagtatgtcccagagccagtccctggtaaaaagcttcctacaactggagaagtgcacatctgggtgaaggaatgccttgatctaccactgctaaggggaagtcatctaaattcttttgttaaatgtaccatccttccagatacaagtaggaaaagtcgccagaagacaagagctgtagggaaaaccaccaaccctatcttcaaccacactatggtgtatgatgggttcaggcctgaagatctgatggaagcctgtgtagagcttactgtctgggaccattacaaattaaccaaccaatttttgggaggtcttcgtattggctttggaacaggtaaaagttatgggactgaagtggactggatggactctacttcagaggaagttgctctctgggagaagatggtaaactcccccaatacttggattgaagcaacactgcctctcagaatgcttttgattgccaagatttccaaatgagcccaaattccactggctcctccactgaaaactactaaaccggtggaatctgatcttgaaaatctgagtaggtggacaaatatcctcactttctatctattgcacctaaggaatactacacagcatgtaaaagtcaatctgcatgtgcttctttgattacaaggcccaagggatttaaatataacaaaatgtgtaatttgtgactctaatattaaataagatatttgaacaagctaggaaaattgaatttctgctgctgcttcaaagaaaaagctgccccagagcattaaacatggggtattgttaagaagcaaaatgttcttgtttgccatcatgtgtttcacaccacaattctgtgccacagttaagagggtctggtacccttgcaggacctttgtaggttgtgggaaaaagtcgcagaaagatactcaaagtggagcagggaatggagacagacatcagtgatgataaaaaaaaaaatggaccttaagaaactatttactctgtaatctctaataaaatatggaattccatattagggcaatgagactgaaactactggtgtttttctgccttgagaaaacaaacagttaaaacaagcctcaaatgtattttagtgccacccactggccataggtacaattcagttgttggcttgttttgacttaattctaaaataggtctcaagcctgtatttttatgagtttatttttttaaaaccctgcatatatatgattgtttttcttataactttactatatgaaagcagcataagagtagtcacaaacatgttttgcaacaaagttttaattagaatgtaagttgctcagttatactgttcttcttatgtatgtaaaattttcgtattttgtaaaaacccttagaataaattatcatttgatttaaattgtattagaaaattagcgtgacttctcattttaaataaaatattttaggaattctaaacatcta

SEQ ID NO: 422304 - DNA, 2308 bp, Homo sapiens
ggctgttgcagccccgtgctttctcctgctgctggccgattgcttgctctgaactaaccctctaacccttgggagtctgtgtgcagcagtgatgtgagctgcatccgggctgaaatgggagctcccgctatggcactggctcaaggagctaatctaaagagaaaatcaagcaaaagtagataatcagccagaagaattagtgcgtagtgctgaagatgatgagaaaccagatcagaagccagttacaaatgaatgcgtaccaagaatttccacagtgcctacacaacctgataatccattttctcaccctgacaaactcaaaaggatgagcaagtctgttccagcatttctccaagatgaggtgagtggcagtgtgatgagtgtttatagtggagactttggcaatctggaagttaaaggaaatattcagtttgcaattgaatatgtggagtcactgaaggagttgcatgtttttgtggcccagtgtaaggacttagcagcagcggatgtaaaaaaacagcgttcagacccatatgtaaaggcctatttgctaccagacaaaggcaaaatgggcaagaagaaaacactcgtagtgaagaaaaccttgaatcctgtgtataacgaaatactgcggtataaaattgaaaaacaaatcttaaagacacagaaattgaacctgtccatttggcatcgggatacatttaagcgcaatagtttcctaggggaggtggaacttgatttggaaacatgggactgggataacaaacagaataaacaattgagatggtaccctctgaagcggaagacagcaccagttgcccttgaagcagaaaacagaggtgaaatgaaactagctctccagtatgtcccagagccagtccctggtaaaaagcttcctacaactggagaagtgcacatctgggtgaaggaatgccttgatctaccactgctaaggggaagtcatctaaattcttttgttaaatgtaccatccttccagatacaagtaggaaaagtcgccagaagacaagagctgtagggaaaaccaccaaccctatcttcaaccacactatggtgtatgatgggttcaggcctgaagatctgatggaagcctgtgtagagcttactgtctgggaccattacaaattaaccaaccaatttttgggaggtcttcgtattggctttggaacaggtaaaagttatgggactgaagtggactggatggactctacttcagaggaagttgctctctgggagaagatggtaaactcccccaatacttggattgaagcaacactgcctctcagaatgcttttgattgccaagatttccaaatgagcccaaattccactggctcctccactgaaaactactaaaccggtggaatctgatcttgaaaatctgagtaggtggacaaatatcctcactttctatctattgcacctaaggaatactacacagcatgtaaaagtcaatctgcatgtgcttctttgattacaaggcccaagggatttaaatataacaaaatgtgtaatttgtgactctaatattaaataagatatttgaacaagctaggaaaattgaatttctgctgctgcttcaaagaaaaagctgccccagagcattaaacatggggtattgttaagaagcaaaatgttcttgtttgccatcatgtgtttcacaccacaattctgtgccacagttaagagggtctggtacccttgcaggacctttgtaggttgtgggaaaaagtcgcagaaagatactcaaagtggagcagggaatggagacagacatcagtgatgataaaaaaaaaaatggaccttaagaaactatttactctgtaatctctaataaaatatggaattccatattagggcaatgagactgaaactactggtgtttttctgccttgagaaaacaaacagttaaaacaagcctcaaatgtattttagtgccacccactggccataggtacaattcagttgttggcttgttttgacttaattctaaaataggtctcaagcctgtatttttatgagtttatttttttaaaaccctgcatatatatgattgtttttcttataactttactatatgaaagcagcataagagtagtcacaaacatgttttgcaacaaagttttaattagaatgtaagttgctcagttatactgttcttcttatgtatgtaaaattttcgtattttgtaaaaacccttagaataaattatcatttgatttaaattgtattagaaaattagcgtgacttctcattttaaataaaatattttaggaattctaaacatcta

SEQ ID NO: 422305 - DNA, 2406 bp, Homo sapiens
ggctgttgcagccccgtgctttctcctgctgctggccgattgcttgctctgaactaaccctctaacccttgggagtctgtgtgcagcagtgatgtgagctgcatccgggctgaaatgggagctcccgctatggcactggctcaaggagctaatctaaagagaaagtattttggggaagacatcttggttgcacccctcattgcatcttgactaattgcttccaactccgggggcttccagggacaatctcattgttcttttctctccaagggtcagccatgttaaccatttgttaatttcttctgaacagatcaagcaaaagtagataatcagccagaagaattagtgcgtagtgctgaagatgtttccacagtgcctacacaacctgataatccattttctcaccctgacaaactcaaaaggatgagcaagtctgttccagcatttctccaagatgaggtgagtggcagtgtgatgagtgtttatagtggagactttggcaatctggaagttaaaggaaatattcagtttgcaattgaatatgtggagtcactgaaggagttgcatgtttttgtggcccagtgtaaggacttagcagcagcggatgtaaaaaaacagcgttcagacccatatgtaaaggcctatttgctaccagacaaaggcaaaatgggcaagaagaaaacactcgtagtgaagaaaaccttgaatcctgtgtataacgaaatactgcggtataaaattgaaaaacaaatcttaaagacacagaaattgaacctgtccatttggcatcgggatacatttaagcgcaatagtttcctaggggaggtggaacttgatttggaaacatgggactgggataacaaacagaataaacaattgagatggtaccctctgaagcggaagacagcaccagttgcccttgaagcagaaaacagaggtgaaatgaaactagctctccagtatgtcccagagccagtccctggtaaaaagcttcctacaactggagaagtgcacatctgggtgaaggaatgccttgatctaccactgctaaggggaagtcatctaaattcttttgttaaatgtaccatccttccagatacaagtaggaaaagtcgccagaagacaagagctgtagggaaaaccaccaaccctatcttcaaccacactatggtgtatgatgggttcaggcctgaagatctgatggaagcctgtgtagagcttactgtctgggaccattacaaattaaccaaccaatttttgggaggtcttcgtattggctttggaacaggtaaaagttatgggactgaagtggactggatggactctacttcagaggaagttgctctctgggagaagatggtaaactcccccaatacttggattgaagcaacactgcctctcagaatgcttttgattgccaagatttccaaatgagcccaaattccactggctcctccactgaaaactactaaaccggtggaatctgatcttgaaaatctgagtaggtggacaaatatcctcactttctatctattgcacctaaggaatactacacagcatgtaaaagtcaatctgcatgtgcttctttgattacaaggcccaagggatttaaatataacaaaatgtgtaatttgtgactctaatattaaataagatatttgaacaagctaggaaaattgaatttctgctgctgcttcaaagaaaaagctgccccagagcattaaacatggggtattgttaagaagcaaaatgttcttgtttgccatcatgtgtttcacaccacaattctgtgccacagttaagagggtctggtacccttgcaggacctttgtaggttgtgggaaaaagtcgcagaaagatactcaaagtggagcagggaatggagacagacatcagtgatgataaaaaaaaaaatggaccttaagaaactatttactctgtaatctctaataaaatatggaattccatattagggcaatgagactgaaactactggtgtttttctgccttgagaaaacaaacagttaaaacaagcctcaaatgtattttagtgccacccactggccataggtacaattcagttgttggcttgttttgacttaattctaaaataggtctcaagcctgtatttttatgagtttatttttttaaaaccctgcatatatatgattgtttttcttataactttactatatgaaagcagcataagagtagtcacaaacatgttttgcaacaaagttttaattagaatgtaagttgctcagttatactgttcttcttatgtatgtaaaattttcgtattttgtaaaaacccttagaataaattatcatttgatttaaattgtattagaaaattagcgtgacttctcattttaaataaaatattttaggaattctaaacatcta

SEQ ID NO: 422306 - DNA, 2285 bp, Homo sapiens
ggctgttgcagccccgtgctttctcctgctgctggccgattgcttgctctgaactaaccctctaacccttgggagtctgtgtgcagcagtgatgtgagctgcatccgggctgaaatgggagctcccgctatggcactggctcaaggagctaatctaaagagaaaatcaagcaaaagtagataatcagccagaagaattagtgcgtagtgctgaagatgagtgatgacagagaaacagatacagcatcagaaagcagttaccagctcagcagacacaagaagagcccgagctctttaaccaatcttagcagctcctctggcatgacgtccttgtcttctgtgagtggcagtgtgatgagtgtttatagtggagactttggcaatctggaagttaaaggaaatattcagtttgcaattgaatatgtggagtcactgaaggagttgcatgtttttgtggcccagtgtaaggacttagcagcagcggatgtaaaaaaacagcgttcagacccatatgtaaaggcctatttgctaccagacaaaggcaaaatgggcaagaagaaaacactcgtagtgaagaaaaccttgaatcctgtgtataacgaaatactgcggtataaaattgaaaaacaaatcttaaagacacagaaattgaacctgtccatttggcatcgggatacatttaagcgcaatagtttcctaggggaggtggaacttgatttggaaacatgggactgggataacaaacagaataaacaattgagatggtaccctctgaagcggaagacagcaccagttgcccttgaagcagaaaacagaggtgaaatgaaactagctctccagtatgtcccagagccagtccctggtaaaaagcttcctacaactggagaagtgcacatctgggtgaaggaatgccttgatctaccactgctaaggggaagtcatctaaattcttttgttaaatgtaccatccttccagatacaagtaggaaaagtcgccagaagacaagagctgtagggaaaaccaccaaccctatcttcaaccacactatggtgtatgatgggttcaggcctgaagatctgatggaagcctgtgtagagcttactgtctgggaccattacaaattaaccaaccaatttttgggaggtcttcgtattggctttggaacaggtaaaagttatgggactgaagtggactggatggactctacttcagaggaagttgctctctgggagaagatggtaaactcccccaatacttggattgaagcaacactgcctctcagaatgcttttgattgccaagatttccaaatgagcccaaattccactggctcctccactgaaaactactaaaccggtggaatctgatcttgaaaatctgagtaggtggacaaatatcctcactttctatctattgcacctaaggaatactacacagcatgtaaaagtcaatctgcatgtgcttctttgattacaaggcccaagggatttaaatataacaaaatgtgtaatttgtgactctaatattaaataagatatttgaacaagctaggaaaattgaatttctgctgctgcttcaaagaaaaagctgccccagagcattaaacatggggtattgttaagaagcaaaatgttcttgtttgccatcatgtgtttcacaccacaattctgtgccacagttaagagggtctggtacccttgcaggacctttgtaggttgtgggaaaaagtcgcagaaagatactcaaagtggagcagggaatggagacagacatcagtgatgataaaaaaaaaaatggaccttaagaaactatttactctgtaatctctaataaaatatggaattccatattagggcaatgagactgaaactactggtgtttttctgccttgagaaaacaaacagttaaaacaagcctcaaatgtattttagtgccacccactggccataggtacaattcagttgttggcttgttttgacttaattctaaaataggtctcaagcctgtatttttatgagtttatttttttaaaaccctgcatatatatgattgtttttcttataactttactatatgaaagcagcataagagtagtcacaaacatgttttgcaacaaagttttaattagaatgtaagttgctcagttatactgttcttcttatgtatgtaaaattttcgtattttgtaaaaacccttagaataaattatcatttgatttaaattgtattagaaaattagcgtgacttctcattttaaataaaatattttaggaattctaaacatcta

SEQ ID NO: 422307 - DNA, 1907 bp, Homo sapiens
agccttggtttgcttttccagagtggggaagcaaatcagcttttatgaaagatggattttagctctttgaaacaagatgcttagaataagatgactttgcaatatttttgggactcgaaacctaacagataagaaaatttgctatatacagatgaatttctcttcatctctgtgttataactttggcatcaagtaatgtttttcatcatttaattttcttctttgaacttcagtataaaattgaaaaacaaatcttaaagacacagaaattgaacctgtccatttggcatcgggatacatttaagcgcaatagtttcctaggggaggtggaacttgatttggaaacatgggactgggataacaaacagaataaacaattgagatggtaccctctgaagcggaagacagcaccagttgcccttgaagcagaaaacagaggtgaaatgaaactagctctccagtatgtcccagagccagtccctggtaaaaagcttcctacaactggagaagtgcacatctgggtgaaggaatgccttgatctaccactgctaaggggaagtcatctaaattcttttgttaaatgtaccatccttccagatacaagtaggaaaagtcgccagaagacaagagctgtagggaaaaccaccaaccctatcttcaaccacactatggtgtatgatgggttcaggcctgaagatctgatggaagcctgtgtagagcttactgtctgggaccattacaaattaaccaaccaatttttgggaggtcttcgtattggctttggaacaggtaaaagttatgggactgaagtggactggatggactctacttcagaggaagttgctctctgggagaagatggtaaactcccccaatacttggattgaagcaacactgcctctcagaatgcttttgattgccaagatttccaaatgagcccaaattccactggctcctccactgaaaactactaaaccggtggaatctgatcttgaaaatctgagtaggtggacaaatatcctcactttctatctattgcacctaaggaatactacacagcatgtaaaagtcaatctgcatgtgcttctttgattacaaggcccaagggatttaaatataacaaaatgtgtaatttgtgactctaatattaaataagatatttgaacaagctaggaaaattgaatttctgctgctgcttcaaagaaaaagctgccccagagcattaaacatggggtattgttaagaagcaaaatgttcttgtttgccatcatgtgtttcacaccacaattctgtgccacagttaagagggtctggtacccttgcaggacctttgtaggttgtgggaaaaagtcgcagaaagatactcaaagtggagcagggaatggagacagacatcagtgatgataaaaaaaaaaatggaccttaagaaactatttactctgtaatctctaataaaatatggaattccatattagggcaatgagactgaaactactggtgtttttctgccttgagaaaacaaacagttaaaacaagcctcaaatgtattttagtgccacccactggccataggtacaattcagttgttggcttgttttgacttaattctaaaataggtctcaagcctgtatttttatgagtttatttttttaaaaccctgcatatatatgattgtttttcttataactttactatatgaaagcagcataagagtagtcacaaacatgttttgcaacaaagttttaattagaatgtaagttgctcagttatactgttcttcttatgtatgtaaaattttcgtattttgtaaaaacccttagaataaattatcatttgatttaaattgtattagaaaattagcgtgacttctcattttaaataaaatattttaggaattctaaacatcta

SEQ ID NO: 422308 - DNA, 3925 bp, Homo sapiens
gggcgacacccgggccgtgccgccagcgtccgtcgggagagtgaaggctcgcaacgccttgcccgggggaaggtaacgcgccgcgcccggggctgcgcggtttgcaccgccaggccgagggctgggggccagaagacaagagagacggcgaggcgcgctccctgcccggcagcgactcggaggtaggtgatgctctgatgctgctgcctcttatgaattgacgacaggtgcagagagagaataaactgtgtctaagactggaccagagagtgagtgtgctggaagccaccataggaacaagcgacctgtttggcaaggaatacagcatccttctgagagcctcttctcgacactatcccacagaccaggacttcctcatgggaaagagcacttaggatcttgctatcagctgccctaaacttttgctgagccaaaataagactttgatgcagaactgaacaagatatttcatttttgtgtgttttaatcttcctggttgcagtcttagttgttcagccctgagaattttgagccacatttgttgctattatttttgcatgcacttttcaaaatgattgacttaagcttcctgactgaagaggaacaagaggccatcatgaaggttttgcagcgggatgctgctctgaagagggccgaagaagagagagtcagacatttgcctgaaaaaattaaggatgaccagcagctgaagaatatgagtggccaatggttttatgaagccaaggcaaaaaggcacagggacaaaatccatggcgcagatatcatcagagcatctatgagaaagaagaggccccagatagcagctgagcagagtaaagacagagaaaatggggcaaaggaaagctgggtgaataatgtcaacaaagatgctttccttcctccagagctggctggcgttgtagaagagccagaagaagatgcagcaccagcaagcccgagttccagtgtggtaaatccagcttccagtgtgattgatatgtcccaggaaaacacaaggaaaccaaatgtgtctccagagaagaggaagaatccgtttaatagctccaagttgccagaaggtcactcatcacaacaaactaaaaatgaacagtcaaaaaatggaagaactggtttatttcagacttcaaaagaggatgaattgtcagagtcaaaagaaaagtcaactgtcgcagatacttcaatccaaaagttagagaaatcaaagcagactttgccaggcctttcaaatgggtcccaaatcaaggctccaatccccaaagccaggaagatgatctacaaatcaactgatttaaacaaagatgataaccagtcttttcctagacaaaggacagactccctgaaagcgagaggggctccgagagggatcctcaagcgcaactccagttccagtagcacagactcagaaacccttcgttataatcacaactttgaacccaaaagcaaaattgtgtcacctggcctaaccatccatgagagaatttctgagaaggagcattctttagaagacaactcttccccaaactccctggagccattaaagcatgtgagattctctgcagtgaaggatgagcttccacagagtcctgggctaatccatggtcgggaagtaggagaatttagtgttttagaatctgacagattgaaaaatggaatggaagatgcaggggacacagaagagtttcagagtgaccctaagccttctcaatacagaaagccttcgctttttcatcaatcaacctcaagcccatatgtatcaaaaagtgaaacacatcagccaatgacttctggttcttttccaattaatgggctgcattctcattcagaagttttaactgcaagaccacagtctatggagaattcaccaaccatcaatgaacccaaagataaatcatcagaattaacaaggcttgaatctgtattacccagaagccctgctgatgaactgtctcattgtgttgagcctgagccatctcaggtgccaggtggcagttctagagaccgtcagcaaggttcagaagaagaacccagtcctgttttgaaaactttggaaaggagtgccgctaggaaaatgccttccaaaagtctagaagacatttcatcagattcatcaaatcaagcaaaagtagataatcagccagaagaattagtgcgtagtgctgaagatgtttccacagtgcctacacaacctgataatccattttctcaccctgacaaactcaaaaggatgagcaagtctgttccagcatttctccaagatgagagtgatgacagagaaacagatacagcatcagaaagcagttaccagctcagcagacacaagaagagcccgagctctttaaccaatcttagcagctcctctggcatgacgtccttgtcttctgtgagtggcagtgtgatgagtgtttatagtggagactttggcaatctggaagttaaaggaaatattcagtttgcaattgaatatgtggagtcactgaaggagttgcatgtttttgtggcccagtgtaaggacttagcagcagcggatgtaaaaaaacagcgttcagacccatatgtaaaggcctatttgctaccagacaaaggcaaaatgggcaagaagaaaacactcgtagtgaagaaaaccttgaatcctgtgtataacgaaatactgcggtataaaattgaaaaacaaatcttaaagacacagaaattgaacctgtccatttggcatcgggatacatttaagcgcaatagtttcctaggggaggtggaacttgatttggaaacatgggactgggataacaaacagaataaacaattgagatggtaccctctgaagcggaagacagcaccagttgcccttgaagcagaaaacagaggtgaaatgaaactagctctccagtatgtcccagagccagtccctggtaaaaagcttcctacaactggagaagtgcacatctgggtgaaggaatgccttgatctaccactgctaaggggaagtcatctaaattcttttgttaaatgtaccatccttccagatacaagtaggaaaagtcgccagaagacaagagctgtagggaaaaccaccaaccctatcttcaaccacactatggtgtatgatgggttcaggcctgaagatctgatggaagcctgtgtagagcttactgtctgggaccattacaaattaaccaaccaatttttgggaggtcttcgtattggctttggaacaggtaaaagttatgggactgaagtggactggatggactctacttcagaggaagttgctctctgggagaagatggtaaactcccccaatacttggattgaagcaacactgcctctcagaatgcttttgattgccaagatttccaaatgagcccaaattccactggctcctccactgaaaactactaaaccggtggaatctgatcttgaaaatctgagtaggtggacaaatatcctcactttctatctattgcacctaaggaatactacacagcatgtaaaagtcaatctgcatgtgcttctttgattacaaggcccaagggatttaaatataacaaaatgtgtaatttgtgactctaatattaaataagatatttgaacaagctaggaaaattgaatttctgctgctgcttcaaagaaaaagctgccccagagcattaaacatggggtattgttaagaagcaaaatgttcttgtttgccatcatgtgtttcacaccacaattctgtgccacagttaagagggtctggtacccttgcaggacctttgtaggttgtgggaaaaagtcgcagaaagatactcaaagtggagcagggaatggagacagacatcagtgatgataaaaaaaaaaatggaccttaagaaactatttactctgtaatctctaataaaatatggaattccatattagggcaatgaga

SEQ ID NO: 422309 - DNA, 1870 bp, Homo sapiens
aaataaattgttttatatgctggctgaatagctaacaaaatatttgtgttttgatcaaaattaaagcattcaaagaaacctctcccatctccaagaaagccattctggtttcttcaccatctttgagactaaaggccttgaaatattttctgggtatcctgcaagatttttcaagatatacaacctagttttcccaggtattaaggcaacagtctagttctgatgcagagagaaattttaatccagagcactcatgagtgacacatggtcccagaaatgggacagatatggttctgtaatgagacctataccaacaaacaggatgaaaagtttgtctcccacctgctgacatttcttcacttttcagacagcaccagttgcccttgaagcagaaaacagaggtgaaatgaaactagctctccagtatgtcccagagccagtccctggtaaaaagcttcctacaactggagaagtgcacatctgggtgaaggaatgccttgatctaccactgctaaggggaagtcatctaaattcttttgttaaatgtaccatccttccagatacaagtaggaaaagtcgccagaagacaagagctgtagggaaaaccaccaaccctatcttcaaccacactatggtgtatgatgggttcaggcctgaagatctgatggaagcctgtgtagagcttactgtctgggaccattacaaattaaccaaccaatttttgggaggtcttcgtattggctttggaacaggtaaaagttatgggactgaagtggactggatggactctacttcagaggaagttgctctctgggagaagatggtaaactcccccaatacttggattgaagcaacactgcctctcagaatgcttttgattgccaagatttccaaatgagcccaaattccactggctcctccactgaaaactactaaaccggtggaatctgatcttgaaaatctgagtaggtggacaaatatcctcactttctatctattgcacctaaggaatactacacagcatgtaaaagtcaatctgcatgtgcttctttgattacaaggcccaagggatttaaatataacaaaatgtgtaatttgtgactctaatattaaataagatatttgaacaagctaggaaaattgaatttctgctgctgcttcaaagaaaaagctgccccagagcattaaacatggggtattgttaagaagcaaaatgttcttgtttgccatcatgtgtttcacaccacaattctgtgccacagttaagagggtctggtacccttgcaggacctttgtaggttgtgggaaaaagtcgcagaaagatactcaaagtggagcagggaatggagacagacatcagtgatgataaaaaaaaaaatggaccttaagaaactatttactctgtaatctctaataaaatatggaattccatattagggcaatgagactgaaactactggtgtttttctgccttgagaaaacaaacagttaaaacaagcctcaaatgtattttagtgccacccactggccataggtacaattcagttgttggcttgttttgacttaattctaaaataggtctcaagcctgtatttttatgagtttatttttttaaaaccctgcatatatatgattgtttttcttataactttactatatgaaagcagcataagagtagtcacaaacatgttttgcaacaaagttttaattagaatgtaagttgctcagttatactgttcttcttatgtatgtaaaattttcgtattttgtaaaaacccttagaataaattatcatttgatttaaattgtattagaaaattagcgtgacttctcattttaaataaaatattttaggaattctaaacatcta

SEQ ID NO: 422310 - DNA, 1607 bp, Homo sapiens
aagaagcaagtgtccgtaaggttgagtaactttccctaaaatgcatacccaggaggtagcagagtcaggattcaaaccaagtatagctgactctaggtccagagtcttttcagcatgatgtgttcctaccccctaccccactgtctgccaaaccaccaccaccactatctctccacatcttttcctccattgtcaatctttaatagctgtgttgttatgtattgaaagcatgaatgttcactatcttactaaaatgctcccacaatcatgcctctttttgtagtaccatccttccagatacaagtaggaaaagtcgccagaagacaagagctgtagggaaaaccaccaaccctatcttcaaccacactatggtgtatgatgggttcaggcctgaagatctgatggaagcctgtgtagagcttactgtctgggaccattacaaattaaccaaccaatttttgggaggtcttcgtattggctttggaacaggtaaaagttatgggactgaagtggactggatggactctacttcagaggaagttgctctctgggagaagatggtaaactcccccaatacttggattgaagcaacactgcctctcagaatgcttttgattgccaagatttccaaatgagcccaaattccactggctcctccactgaaaactactaaaccggtggaatctgatcttgaaaatctgagtaggtggacaaatatcctcactttctatctattgcacctaaggaatactacacagcatgtaaaagtcaatctgcatgtgcttctttgattacaaggcccaagggatttaaatataacaaaatgtgtaatttgtgactctaatattaaataagatatttgaacaagctaggaaaattgaatttctgctgctgcttcaaagaaaaagctgccccagagcattaaacatggggtattgttaagaagcaaaatgttcttgtttgccatcatgtgtttcacaccacaattctgtgccacagttaagagggtctggtacccttgcaggacctttgtaggttgtgggaaaaagtcgcagaaagatactcaaagtggagcagggaatggagacagacatcagtgatgataaaaaaaaaaatggaccttaagaaactatttactctgtaatctctaataaaatatggaattccatattagggcaatgagactgaaactactggtgtttttctgccttgagaaaacaaacagttaaaacaagcctcaaatgtattttagtgccacccactggccataggtacaattcagttgttggcttgttttgacttaattctaaaataggtctcaagcctgtatttttatgagtttatttttttaaaaccctgcatatatatgattgtttttcttataactttactatatgaaagcagcataagagtagtcacaaacatgttttgcaacaaagttttaattagaatgtaagttgctcagttatactgttcttcttatgtatgtaaaattttcgtattttgtaaaaacccttagaataaattatcatttgatttaaattgtattagaaaattagcgtgacttctcattttaaataaaatattttaggaattctaaacatcta

SEQ ID NO: 422311 - DNA, 1821 bp, Homo sapiens
  misc_feature (1792)..(1792): n is a, c, g, or t
  misc_feature (1818)..(1818): n is a, c, g, or t
gggcgacacccgggccgtgccgccagcgtccgtcgggagagtgaaggctcgcaacgccttgcccgggggaaggtaacgcgccgcgcccggggctgcgcggtttgcaccgccaggccgagggctgggggccagaagacaagagagacggcgaggcgcgctccctgcccggcagcgactcggaggtaggtgatgctctgatgctgctgcctcttatgaattgacgacaggtgcagagagagaataaactgtgtctaagactggaccagagagtgagtgtgctggaagccaccataggaacaagcgacctgtttggcaaggaatacagcatccttctgagagcctcttctcgacactatcccacagaccaggacttcctcatgggaaagagcacttaggatcttgctatcagctgccctaaacttttgctgagccaaaataagactttgatgcagaactgaacaagatatttcatttttgtgtgttttaatcttcctggttgcagtcttagttgttcagccctgagaattttgagccacatttgttgctattatttttgcatgcacttttcaaaatgattgacttaagcttcctgactgaagaggaacaagaggccatcatgaaggttttgcagcgggatgctgctctgaagagggccgaagaagagagagtcagacatttgcctgaaaaaattaaggatgaccagcagctgaagaatatgagtggccaatggttttatgaagccaaggcaaaaaggcacagggacaaaatccatggcgcagatatcatcagagcatctatgagaaagaagaggccccagatagcagctgagcagagtaaagacagagaaaatggggcaaaggaaagctgggtgaataatgtcaacaaagatgctttccttcctccagagctggctggcgttgtagaagagccagaagaagatgcagcaccagcaagcccgagttccagtgtggtaaatccagcttccagtgtgattgatatgtcccaggaaaacacaaggaaaccaaatgtgtctccagagaagaggaagaatccgtttaatagctccaagttgccagaaggtcactcatcacaacaaactaaaaatgaacagtcaaaaaatggaagaactggtttatttcagacttcaaaagaggatgaattgtcagagtcaaaagaaaagtcaactgtcgcagatacttcaatccaaaagttagagaaatcaaagcagactttgccaggcctttcaaatgggtcccaaatcaaggctccaatccccaaagccaggaagatgatctacaaatcaactgatttaaacaaagatgataaccagtcttttcctagacaaaggacagactccctgaaagcgagaggggctccgagagggatcctcaagcgcaactccagttccagtagcacagactcagaaacccttcgttataatcacaactttgaacccaaaagcaaaattgtgtcacctggcctaaccatccatgagagaatttctgagaaggagcattctttagaagacaactcttccccaaactccctggagccattaaagcatgtgagattctctgcagtgaaggatgagcttccacagagtcctgggctaatccatggtcgggaagtaggagaatttagtgttttagaatctgacagattgaaaaatggaatggaagatgcaggggacacagaagagtttcagagtgaccctaagccttctcaatacagaaagccttcgctttttcatcaatcaacctcaaggccctgtgggtttgttagggattaaagncctgtggattcttcaaggaaaaaaanaaa

SEQ ID NO: 422312 - DNA, 2725 bp, Homo sapiens
tttaaccattctaactttgccttgggatattgaaaattctgaatcagtgaggtatctaaataatttatattttcaaaaaataatgtttattttataattctgagtgtaaaacactatcagaaaagtaatcctcatgctcactaaacaaacctactctaagacactcaacaaccagaacagttttattattgagttgtgtacaaaaatcttgactgtccagatgaaatagtttttcagcctgcagtgtgttagtgatatatctcaaggagatgaaccaataaagtacagactttgtggtctgaagctctgttgtgaaaaaataagctaaaccaattcacactgacagtataatttgattcaagtgcagctccagttcaataaaaactaatgtttttaaaattaactttgttttgtatttggttcaactccttgctagttctctctctatataatttataaaaactgcatgttgctaatctcatgatcctgtgcatgtggactactctgcctttaacttttttacaaaaacatgtttgttcatagattaaataaaagtatgttttcaacttaatgtctaatgttttctgacaattgtaagaataattttgaaatggaaatgctgctgtttagtttccacagtgcctacacaacctgataatccattttctcaccctgacaaactcaaaaggatgagcaagtctgttccagcatttctccaagatgagagtgatgacagagaaacagatacagcatcagaaagcagttaccagctcagcagacacaagaagagcccgagctctttaaccaatcttagcagctcctctggcatgacgtccttgtcttctgtgagtggcagtgtgatgagtgtttatagtggagactttggcaatctggaagttaaaggaaatattcagtttgcaattgaatatgtggagtcactgaaggagttgcatgtttttgtggcccagtgtaaggacttagcagcagcggatgtaaaaaaacagcgttcagacccatatgtaaaggcctatttgctaccagacaaaggcaaaatgggcaagaagaaaacactcgtagtgaagaaaaccttgaatcctgtgtataacgaaatactgcggtataaaattgaaaaacaaatcttaaagacacagaaattgaacctgtccatttggcatcgggatacatttaagcgcaatagtttcctaggggaggtggaacttgatttggaaacatgggactgggataacaaacagaataaacaattgagatggtaccctctgaagcggaagacagcaccagttgcccttgaagcagaaaacagaggtgaaatgaaactagctctccagtatgtcccagagccagtccctggtaaaaagcttcctacaactggagaagtgcacatctgggtgaaggaatgccttgatctaccactgctaaggggaagtcatctaaattcttttgttaaatgtaccatccttccagatacaagtaggaaaagtcgccagaagacaagagctgtagggaaaaccaccaaccctatcttcaaccacactatggtgtatgatgggttcaggcctgaagatctgatggaagcctgtgtagagcttactgtctgggaccattacaaattaaccaaccaatttttgggaggtcttcgtattggctttggaacaggtaaaagttatgggactgaagtggactggatggactctacttcagaggaagttgctctctgggagaagatggtaaactcccccaatacttggattgaagcaacactgcctctcagaatgcttttgattgccaagatttccaaatgagcccaaattccactggctcctccactgaaaactactaaaccggtggaatctgatcttgaaaatctgagtaggtggacaaatatcctcactttctatctattgcacctaaggaatactacacagcatgtaaaagtcaatctgcatgtgcttctttgattacaaggcccaagggatttaaatataacaaaatgtgtaatttgtgactctaatattaaataagatatttgaacaagctaggaaaattgaatttctgctgctgcttcaaagaaaaagctgccccagagcattaaacatggggtattgttaagaagcaaaatgttcttgtttgccatcatgtgtttcacaccacaattctgtgccacagttaagagggtctggtacccttgcaggacctttgtaggttgtgggaaaaagtcgcagaaagatactcaaagtggagcagggaatggagacagacatcagtgatgataaaaaaaaaaatggaccttaagaaactatttactctgtaatctctaataaaatatggaattccatattagggcaatgagactgaaactactggtgtttttctgccttgagaaaacaaacagttaaaacaagcctcaaatgtattttagtgccacccactggccataggtacaattcagttgttggcttgttttgacttaattctaaaataggtctcaagcctgtatttttatgagtttatttttttaaaaccctgcatatatatgattgtttttcttataactttactatatgaaagcagcataagagtagtcacaaacatgttttgcaacaaagttttaattagaatgtaagttgctcagttatactgttcttcttatgtatgtaaaattttcgtattttgtaaaaacccttagaataaattatcatttgattta

SEQ ID NO: 422313 - DNA, 2348 bp, Homo sapiens
ctcaagtctcagcatttagatctctctgggcacaactggtaaaatcttaaattcaaaggaaagagtcccagaacaagggtgggaaatcgtgcctctgcttatataaataactaaatatagacagagggtgaagttgattctgaatataatggagccagaagatcttgaagcttgtcagtggatcagtttccacagtgcctacacaacctgataatccattttctcaccctgacaaactcaaaaggatgagcaagtctgttccagcatttctccaagatgagagtgatgacagagaaacagatacagcatcagaaagcagttaccagctcagcagacacaagaagagcccgagctctttaaccaatcttagcagctcctctggcatgacgtccttgtcttctgtgagtggcagtgtgatgagtgtttatagtggagactttggcaatctggaagttaaaggaaatattcagtttgcaattgaatatgtggagtcactgaaggagttgcatgtttttgtggcccagtgtaaggacttagcagcagcggatgtaaaaaaacagcgttcagacccatatgtaaaggcctatttgctaccagacaaaggcaaaatgggcaagaagaaaacactcgtagtgaagaaaaccttgaatcctgtgtataacgaaatactgcggtataaaattgaaaaacaaatcttaaagacacagaaattgaacctgtccatttggcatcgggatacatttaagcgcaatagtttcctaggggaggtggaacttgatttggaaacatgggactgggataacaaacagaataaacaattgagatggtaccctctgaagcggaagacagcaccagttgcccttgaagcagaaaacagaggtgaaatgaaactagctctccagtatgtcccagagccagtccctggtaaaaagcttcctacaactggagaagtgcacatctgggtgaaggaatgccttgatctaccactgctaaggggaagtcatctaaattcttttgttaaatgtaccatccttccagatacaagtaggaaaagtcgccagaagacaagagctgtagggaaaaccaccaaccctatcttcaaccacactatggtgtatgatgggttcaggcctgaagatctgatggaagcctgtgtagagcttactgtctgggaccattacaaattaaccaaccaatttttgggaggtcttcgtattggctttggaacaggtaaaagttatgggactgaagtggactggatggactctacttcagaggaagttgctctctgggagaagatggtaaactcccccaatacttggattgaagcaacactgcctctcagaatgcttttgattgccaagatttccaaatgagcccaaattccactggctcctccactgaaaactactaaaccggtggaatctgatcttgaaaatctgagtaggtggacaaatatcctcactttctatctattgcacctaaggaatactacacagcatgtaaaagtcaatctgcatgtgcttctttgattacaaggcccaagggatttaaatataacaaaatgtgtaatttgtgactctaatattaaataagatatttgaacaagctaggaaaattgaatttctgctgctgcttcaaagaaaaagctgccccagagcattaaacatggggtattgttaagaagcaaaatgttcttgtttgccatcatgtgtttcacaccacaattctgtgccacagttaagagggtctggtacccttgcaggacctttgtaggttgtgggaaaaagtcgcagaaagatactcaaagtggagcagggaatggagacagacatcagtgatgataaaaaaaaaaatggaccttaagaaactatttactctgtaatctctaataaaatatggaattccatattagggcaatgagactgaaactactggtgtttttctgccttgagaaaacaaacagttaaaacaagcctcaaatgtattttagtgccacccactggccataggtacaattcagttgttggcttgttttgacttaattctaaaataggtctcaagcctgtatttttatgagtttatttttttaaaaccctgcatatatatgattgtttttcttataactttactatatgaaagcagcataagagtagtcacaaacatgttttgcaacaaagttttaattagaatgtaagttgctcagttatactgttcttcttatgtatgtaaaattttcgtattttgtaaaaacccttagaataaattatcatttgatttaaattgtattagaaaattagcgtgacttctcattttaaataaaatattttaggaattctaaacatcta

SEQ ID NO: 422314 - DNA, 2454 bp, Homo sapiens
ggctgttgcagccccgtgctttctcctgctgctggccgattgcttgctctgaactaaccctctaacccttgggagtctgtgtgcagcagtgatgtgagctgcatccgggctgaaatgggagctcccgctatggcactggctcaaggagctaatctaaagagaaagtattttggggaagacatcttggttgcacccctcattgcatcttgactaattgcttccaactccgggggcttccagggacaatctcattgttcttttctctccaagggtcagccatgttaaccatttgttaatttcttctgaacagatcaagcaaaagtagataatcagccagaagaattagtgcgtagtgctgaagatgatgagaaaccagatcagaagccagttacaaatgaatgcgtaccaagaatttccacagtgcctacacaacctgataatccattttctcaccctgacaaactcaaaaggatgagcaagtctgttccagcatttctccaagatgaggtgagtggcagtgtgatgagtgtttatagtggagactttggcaatctggaagttaaaggaaatattcagtttgcaattgaatatgtggagtcactgaaggagttgcatgtttttgtggcccagtgtaaggacttagcagcagcggatgtaaaaaaacagcgttcagacccatatgtaaaggcctatttgctaccagacaaaggcaaaatgggcaagaagaaaacactcgtagtgaagaaaaccttgaatcctgtgtataacgaaatactgcggtataaaattgaaaaacaaatcttaaagacacagaaattgaacctgtccatttggcatcgggatacatttaagcgcaatagtttcctaggggaggtggaacttgatttggaaacatgggactgggataacaaacagaataaacaattgagatggtaccctctgaagcggaagacagcaccagttgcccttgaagcagaaaacagaggtgaaatgaaactagctctccagtatgtcccagagccagtccctggtaaaaagcttcctacaactggagaagtgcacatctgggtgaaggaatgccttgatctaccactgctaaggggaagtcatctaaattcttttgttaaatgtaccatccttccagatacaagtaggaaaagtcgccagaagacaagagctgtagggaaaaccaccaaccctatcttcaaccacactatggtgtatgatgggttcaggcctgaagatctgatggaagcctgtgtagagcttactgtctgggaccattacaaattaaccaaccaatttttgggaggtcttcgtattggctttggaacaggtaaaagttatgggactgaagtggactggatggactctacttcagaggaagttgctctctgggagaagatggtaaactcccccaatacttggattgaagcaacactgcctctcagaatgcttttgattgccaagatttccaaatgagcccaaattccactggctcctccactgaaaactactaaaccggtggaatctgatcttgaaaatctgagtaggtggacaaatatcctcactttctatctattgcacctaaggaatactacacagcatgtaaaagtcaatctgcatgtgcttctttgattacaaggcccaagggatttaaatataacaaaatgtgtaatttgtgactctaatattaaataagatatttgaacaagctaggaaaattgaatttctgctgctgcttcaaagaaaaagctgccccagagcattaaacatggggtattgttaagaagcaaaatgttcttgtttgccatcatgtgtttcacaccacaattctgtgccacagttaagagggtctggtacccttgcaggacctttgtaggttgtgggaaaaagtcgcagaaagatactcaaagtggagcagggaatggagacagacatcagtgatgataaaaaaaaaaatggaccttaagaaactatttactctgtaatctctaataaaatatggaattccatattagggcaatgagactgaaactactggtgtttttctgccttgagaaaacaaacagttaaaacaagcctcaaatgtattttagtgccacccactggccataggtacaattcagttgttggcttgttttgacttaattctaaaataggtctcaagcctgtatttttatgagtttatttttttaaaaccctgcatatatatgattgtttttcttataactttactatatgaaagcagcataagagtagtcacaaacatgttttgcaacaaagttttaattagaatgtaagttgctcagttatactgttcttcttatgtatgtaaaattttcgtattttgtaaaaacccttagaataaattatcatttgatttaaattgtattagaaaattagcgtgacttctcattttaaataaaatattttaggaattctaaacatcta

SEQ ID NO: 422315 - DNA, 2567 bp, Homo sapiens
ggctgttgcagccccgtgctttctcctgctgctggccgattgcttgctctgaactaaccctctaacccttgggagtctgtgtgcagcagtgatgtgagctgcatccgggctgaaatgggagctcccgctatggcactggctcaaggagctaatctaaagagaaagtattttggggaagacatcttggttgcacccctcattgcatcttgactaattgcttccaactccgggggcttccagggacaatctcattgttcttttctctccaagggtcagccatgttaaccatttgttaatttcttctgaacagatcaagcaaaagtagataatcagccagaagaattagtgcgtagtgctgaagatgatgagaaaccagatcagaagccagttacaaatgaatgcgtaccaagaatttccacagtgcctacacaacctgataatccattttctcaccctgacaaactcaaaaggatgagcaagtctgttccagcatttctccaagatgaggtgagtggcagtgtgatgagtgtttatagtggagactttggcaatctggaagttaaaggaaatattcagtttgcaattgaatatgtggagtcactgaaggagttgcatgtttttgtggcccagtgtaaggacttagcagcagcggatgtaaaaaaacagcgttcagacccgtggagtttcactgttgttgcccaggctggcacgatctcagctcacagcaaccttcgcctcccgggttcaagcgattctcctgcctcagcctcctgactagctggaattacagatatgtaaaggcctatttgctaccagacaaaggcaaaatgggcaagaagaaaacactcgtagtgaagaaaaccttgaatcctgtgtataacgaaatactgcggtataaaattgaaaaacaaatcttaaagacacagaaattgaacctgtccatttggcatcgggatacatttaagcgcaatagtttcctaggggaggtggaacttgatttggaaacatgggactgggataacaaacagaataaacaattgagatggtaccctctgaagcggaagacagcaccagttgcccttgaagcagaaaacagaggtgaaatgaaactagctctccagtatgtcccagagccagtccctggtaaaaagcttcctacaactggagaagtgcacatctgggtgaaggaatgccttgatctaccactgctaaggggaagtcatctaaattcttttgttaaatgtaccatccttccagatacaagtaggaaaagtcgccagaagacaagagctgtagggaaaaccaccaaccctatcttcaaccacactatggtgtatgatgggttcaggcctgaagatctgatggaagcctgtgtagagcttactgtctgggaccattacaaattaaccaaccaatttttgggaggtcttcgtattggctttggaacaggtaaaagttatgggactgaagtggactggatggactctacttcagaggaagttgctctctgggagaagatggtaaactcccccaatacttggattgaagcaacactgcctctcagaatgcttttgattgccaagatttccaaatgagcccaaattccactggctcctccactgaaaactactaaaccggtggaatctgatcttgaaaatctgagtaggtggacaaatatcctcactttctatctattgcacctaaggaatactacacagcatgtaaaagtcaatctgcatgtgcttctttgattacaaggcccaagggatttaaatataacaaaatgtgtaatttgtgactctaatattaaataagatatttgaacaagctaggaaaattgaatttctgctgctgcttcaaagaaaaagctgccccagagcattaaacatggggtattgttaagaagcaaaatgttcttgtttgccatcatgtgtttcacaccacaattctgtgccacagttaagagggtctggtacccttgcaggacctttgtaggttgtgggaaaaagtcgcagaaagatactcaaagtggagcagggaatggagacagacatcagtgatgataaaaaaaaaaatggaccttaagaaactatttactctgtaatctctaataaaatatggaattccatattagggcaatgagactgaaactactggtgtttttctgccttgagaaaacaaacagttaaaacaagcctcaaatgtattttagtgccacccactggccataggtacaattcagttgttggcttgttttgacttaattctaaaataggtctcaagcctgtatttttatgagtttatttttttaaaaccctgcatatatatgattgtttttcttataactttactatatgaaagcagcataagagtagtcacaaacatgttttgcaacaaagttttaattagaatgtaagttgctcagttatactgttcttcttatgtatgtaaaattttcgtattttgtaaaaacccttagaataaattatcatttgatttaaattgtattagaaaattagcgtgacttctcattttaaataaaatattttaggaattctaaacatcta

SEQ ID NO: 422316 - DNA, 4294 bp, Homo sapiens
gggcgacacccgggccgtgccgccagcgtccgtcgggagagtgaaggctcgcaacgccttgcccgggggaaggtaacgcgccgcgcccggggctgcgcggtttgcaccgccaggccgagggctgggggccagaagacaagagagacggcgaggcgcgctccctgcccggcagcgactcggaggtaggtgatgctctgatgctgctgcctcttatgaattgacgacaggtgcagagagagaataaactgtgtctaagactggaccagagagtgagtgtgctggaagccaccataggaacaagcgacctgtttggcaaggaatacagcatccttctgagagcctcttctcgacactatcccacagaccaggacttcctcatgggaaagagcacttaggatcttgctatcagctgccctaaacttttgctgagccaaaataagactttgatgcagaactgaacaagatatttcatttttgtgtgttttaatcttcctggttgcagtcttagttgttcagccctgagaattttgagccacatttgttgctattatttttgcatgcacttttcaaaatgattgacttaagcttcctgactgaagaggaacaagaggccatcatgaaggttttgcagcgggatgctgctctgaagagggccgaagaagagagagtcagacatttgcctgaaaaaattaaggatgaccagcagctgaagaatatgagtggccaatggttttatgaagccaaggcaaaaaggcacagggacaaaatccatggcgcagatatcatcagagcatctatgagaaagaagaggccccagatagcagctgagcagagtaaagacagagaaaatggggcaaaggaaagctgggtgaataatgtcaacaaagatgctttccttcctccagagctggctggcgttgtagaagagccagaagaagatgcagcaccagcaagcccgagttccagtgtggtaaatccagcttccagtgtgattgatatgtcccaggaaaacacaaggaaaccaaatgtgtctccagagaagaggaagaatccgtttaatagctccaagttgccagaaggtcactcatcacaacaaactaaaaatgaacagtcaaaaaatggaagaactggtttatttcagacttcaaaagaggatgaattgtcagagtcaaaagaaaagtcaactgtcgcagatacttcaatccaaaagttagagaaatcaaagcagactttgccaggcctttcaaatgggtcccaaatcaaggctccaatccccaaagccaggaagatgatctacaaatcaactgatttaaacaaagatgataaccagtcttttcctagacaaaggacagactccctgaaagcgagaggggctccgagagggatcctcaagcgcaactccagttccagtagcacagactcagaaacccttcgttataatcacaactttgaacccaaaagcaaaattgtgtcacctggcctaaccatccatgagagaatttctgagaaggagcattctttagaagacaactcttccccaaactccctggagccattaaagcatgtgagattctctgcagtgaaggatgagcttccacagagtcctgggctaatccatggtcgggaagtaggagaatttagtgttttagaatctgacagattgaaaaatggaatggaagatgcaggggacacagaagagtttcagagtgaccctaagccttctcaatacagaaagccttcgctttttcatcaatcaacctcaagcccatatgtatcaaaaagtgaaacacatcagccaatgacttctggttcttttccaattaatgggctgcattctcattcagaagttttaactgcaagaccacagtctatggagaattcaccaaccatcaatgaacccaaagataaatcatcagaattaacaaggcttgaatctgtattacccagaagccctgctgatgaactgtctcattgtgttgagcctgagccatctcaggtgccaggtggcagttctagagaccgtcagcaaggttcagaagaagaacccagtcctgttttgaaaactttggaaaggagtgccgctaggaaaatgccttccaaaagtctagaagacatttcatcagattcatcaaatcaagcaaaagtagataatcagccagaagaattagtgcgtagtgctgaagatgtttccacagtgcctacacaacctgataatccattttctcaccctgacaaactcaaaaggatgagcaagtctgttccagcatttctccaagatgagagtgatgacagagaaacagatacagcatcagaaagcagttaccagctcagcagacacaagaagagcccgagctctttaaccaatcttagcagctcctctggcatgacgtccttgtcttctgtgagtggcagtgtgatgagtgtttatagtggagactttggcaatctggaagttaaaggaaatattcagtttgcaattgaatatgtggagtcactgaaggagttgcatgtttttgtggcccagtgtaaggacttagcagcagcggatgtaaaaaaacagcgttcagacccatatgtaaaggcctatttgctaccagacaaaggcaaaatgggcaagaagaaaacactcgtagtgaagaaaaccttgaatcctgtgtataacgaaatactgcggtataaaattgaaaaacaaatcttaaagacacagaaattgaacctgtccatttggcatcgggatacatttaagcgcaatagtttcctaggggaggtggaacttgatttggaaacatgggactgggataacaaacagaataaacaattgagatggtaccctctgaagcggaagacagcaccagttgcccttgaagcagaaaacagaggtgaaatgaaactagctctccagtatgtcccagagccagtccctggtaaaaagcttcctacaactggagaagtgcacatctgggtgaaggaatgccttgatctaccactgctaaggggaagtcatctaaattcttttgttaaatgtaccatccttccagatacaagtaggaaaagtcgccagaagacaagagctgtagggaaaaccaccaaccctatcttcaaccacactatggtgtatgatgggttcaggcctgaagatctgatggaagcctgtgtagagcttactgtctgggaccattacaaattaaccaaccaatttttgggaggtcttcgtattggctttggaacaggtaaaagttatgggactgaagtggactggatggactctacttcagaggaagttgctctctgggagaagatggtaaactcccccaatacttggattgaagcaacactgcctctcagaatgcttttgattgccaagatttccaaatgagcccaaattccactggctcctccactgaaaactactaaaccggtggaatctgatcttgaaaatctgagtaggtggacaaatatcctcactttctatctattgcacctaaggaatactacacagcatgtaaaagtcaatctgcatgtgcttctttgattacaaggcccaagggatttaaatataacaaaatgtgtaatttgtgactctaatattaaataagatatttgaacaagctaggaaaattgaatttctgctgctgcttcaaagaaaaagctgccccagagcattaaacatggggtattgttaagaagcaaaatgttcttgtttgccatcatgtgtttcacaccacaattctgtgccacagttaagagggtctggtacccttgcaggacctttgtaggttgtgggaaaaagtcgcagaaagatactcaaagtggagcagggaatggagacagacatcagtgatgataaaaaaaaaaatggaccttaagaaactatttactctgtaatctctaataaaatatggaattccatattagggcaatgagactgaaactactggtgtttttctgccttgagaaaacaaacagttaaaacaagcctcaaatgtattttagtgccacccactggccataggtacaattcagttgttggcttgttttgacttaattctaaaataggtctcaagcctgtatttttatgagtttatttttttcataagagtagtcacaaacatgttttgcaacaaagttttaattagaatgtaagttgctcagttatactgttcttcttatgtatgtaaaattttcgtattttgtaaaaacccttagaataaattatcatttgatttaaattgtattagaaaattagcgtgacttctcattttaaataaaatattttaggaattctaaacatcta

SEQ ID NO: 422317 - DNA, 4401 bp, Homo sapiens
gggcgacacccgggccgtgccgccagcgtccgtcgggagagtgaaggctcgcaacgccttgcccgggggaaggtaacgcgccgcgcccggggctgcgcggtttgcaccgccaggccgagggctgggggccagaagacaagagagacggcgaggcgcgctccctgcccggcagcgactcggaggtaggtgatgctctgatgctgctgcctcttatgaattgacgacaggtgcagagagagaataaactgtgtctaagactggaccagagagtgagtgtgctggaagccaccataggaacaagcgacctgtttggcaaggaatacagcatccttctgagagcctcttctcgacactatcccacagaccaggacttcctcatgggaaagagcacttaggatcttgctatcagctgccctaaacttttgctgagccaaaataagactttgatgcagaactgaacaagatatttcatttttgtgtgttttaatcttcctggttgcagtcttagttgttcagccctgagaattttgagccacatttgttgctattatttttgcatgcacttttcaaaatgattgacttaagcttcctgactgaagaggaacaagaggccatcatgaaggttttgcagcgggatgctgctctgaagagggccgaagaagagagagtcagacatttgcctgaaaaaattaaggatgaccagcagctgaagaatatgagtggccaatggttttatgaagccaaggcaaaaaggcacagggacaaaatccatggcgcagatatcatcagagcatctatgagaaagaagaggccccagatagcagctgagcagagtaaagacagagaaaatggggcaaaggaaagctgggtgaataatgtcaacaaagatgctttccttcctccagagctggctggcgttgtagaagagccagaagaagatgcagcaccagcaagcccgagttccagtgtggtaaatccagcttccagtgtgattgatatgtcccaggaaaacacaaggaaaccaaatgtgtctccagagaagaggaagaatccgtttaatagctccaagttgccagaaggtcactcatcacaacaaactaaaaatgaacagtcaaaaaatggaagaactggtttatttcagacttcaaaagaggatgaattgtcagagtcaaaagaaaagtcaactgtcgcagatacttcaatccaaaagttagagaaatcaaagcagactttgccaggcctttcaaatgggtcccaaatcaaggctccaatccccaaagccaggaagatgatctacaaatcaactgatttaaacaaagatgataaccagtcttttcctagacaaaggacagactccctgaaagcgagaggggctccgagagggatcctcaagcgcaactccagttccagtagcacagactcagaaacccttcgttataatcacaactttgaacccaaaagcaaaattgtgtcacctggcctaaccatccatgagagaatttctgagaaggagcattctttagaagacaactcttccccaaactccctggagccattaaagcatgtgagattctctgcagtgaaggatgagcttccacagagtcctgggctaatccatggtcgggaagtaggagaatttagtgttttagaatctgacagattgaaaaatggaatggaagatgcaggggacacagaagagtttcagagtgaccctaagccttctcaatacagaaagccttcgctttttcatcaatcaacctcaagcccatatgtatcaaaaagtgaaacacatcagccaatgacttctggttcttttccaattaatgggctgcattctcattcagaagttttaactgcaagaccacagtctatggagaattcaccaaccatcaatgaacccaaagataaatcatcagaattaacaaggcttgaatctgtattacccagaagccctgctgatgaactgtctcattgtgttgagcctgagccatctcaggtgccaggtggcagttctagagaccgtcagcaaggttcagaagaagaacccagtcctgttttgaaaactttggaaaggagtgccgctaggaaaatgccttccaaaagtctagaagacatttcatcagattcatcaaatcaagcaaaagtagataatcagccagaagaattagtgcgtagtgctgaagatgtttccacagtgcctacacaacctgataatccattttctcaccctgacaaactcaaaaggatgagcaagtctgttccagcatttctccaagatgagagtgatgacagagaaacagatacagcatcagaaagcagttaccagctcagcagacacaagaagagcccgagctctttaaccaatcttagcagctcctctggcatgacgtccttgtcttctgtgagtggcagtgtgatgagtgtttatagtggagactttggcaatctggaagttaaaggaaatattcagtttgcaattgaatatgtggagtcactgaaggagttgcatgtttttgtggcccagtgtaaggacttagcagcagcggatgtaaaaaaacagcgttcagacccatatgtaaaggcctatttgctaccagacaaaggcaaaatgggcaagaagaaaacactcgtagtgaagaaaaccttgaatcctgtgtataacgaaatactgcggtataaaattgaaaaacaaatcttaaagacacagaaattgaacctgtccatttggcatcgggatacatttaagcgcaatagtttcctaggggaggtggaacttgatttggaaacatgggactgggataacaaacagaataaacaattgagatggtaccctctgaagcggaagacagcaccagttgcccttgaagcagaaaacagaggtgaaatgaaactagctctccagtatgtcccagagccagtccctggtaaaaagcttcctacaactggagaagtgcacatctgggtgaaggaatgccttgatctaccactgctaaggggaagtcatctaaattcttttgttaaatggtaatagtattgatgactctgtctgcaacagttctgtagcctggtctttgctgtaccatccttccagatacaagtaggaaaagtcgccagaagacaagagctgtagggaaaaccaccaaccctatcttcaaccacactatggtgtatgatgggttcaggcctgaagatctgatggaagcctgtgtagagcttactgtctgggaccattacaaattaaccaaccaatttttgggaggtcttcgtattggctttggaacaggtaaaagttatgggactgaagtggactggatggactctacttcagaggaagttgctctctgggagaagatggtaaactcccccaatacttggattgaagcaacactgcctctcagaatgcttttgattgccaagatttccaaatgagcccaaattccactggctcctccactgaaaactactaaaccggtggaatctgatcttgaaaatctgagtaggtggacaaatatcctcactttctatctattgcacctaaggaatactacacagcatgtaaaagtcaatctgcatgtgcttctttgattacaaggcccaagggatttaaatataacaaaatgtgtaatttgtgactctaatattaaataagatatttgaacaagctaggaaaattgaatttctgctgctgcttcaaagaaaaagctgccccagagcattaaacatggggtattgttaagaagcaaaatgttcttgtttgccatcatgtgtttcacaccacaattctgtgccacagttaagagggtctggtacccttgcaggacctttgtaggttgtgggaaaaagtcgcagaaagatactcaaagtggagcagggaatggagacagacatcagtgatgataaaaaaaaaaatggaccttaagaaactatttactctgtaatctctaataaaatatggaattccatattagggcaatgagactgaaactactggtgtttttctgccttgagaaaacaaacagttaaaacaagcctcaaatgtattttagtgccacccactggccataggtacaattcagttgttggcttgttttgacttaattctaaaataggtctcaagcctgtatttttatgagtttatttttttaaaaccctgcatatatatgattgtttttcttataactttactatatgaaagcagcataagagtagtcacaaacatgttttgcaacaaagttttaattagaatgtaagttgctcagttatactgttcttcttatgtatgtaaaattttcgtattttgtaaaaacccttagaataaattatcatttgatttaaattgtattagaaaattagcgtgacttctcattttaaataaaatattttaggaattctaaacatcta

SEQ ID NO: 422318 - DNA, 2286 bp, Homo sapiens
  misc_feature (2228)..(2228): n is a, c, g, or t
gggcgacacccgggccgtgccgccagcgtccgtcgggagagtgaaggctcgcaacgccttgcccgggggaaggtaacgcgccgcgcccggggctgcgcggtttgcaccgccaggccgagggctgggggccagaagacaagagagacggcgaggcgcgctccctgcccggcagcgactcggaggtaggtgatgctctgatgctgctgcctcttatgaattgacgacaggtgcagagagagaataaactgtgtctaagactggaccagagagtgagtgtgctggaagccaccataggaacaagcgacctgtttggcaaggaatacagcatccttctgagagcctcttctcgacactatcccacagaccaggacttcctcatgggaaagagcacttaggatcttgctatcagctgccctaaacttttgctgagccaaaataagactttgatgcagaactgaacaagatatttcatttttgtgtgttttaatcttcctggttgcagtcttagttgttcagccctgagaattttgagccacatttgttgctattatttttgcatgcacttttcaaaatgattgacttaagcttcctgactgaagaggaacaagaggccatcatgaaggttttgcagcgggatgctgctctgaagagggccgaagaagagagagtcagacatttgcctgaaaaaattaaggatgaccagcagctgaagaatatgagtggccaatggttttatgaagccaaggcaaaaaggcacagggacaaaatccatggcgcagatatcatcagagcatctatgagaaagaagaggccccagatagcagctgagcagagtaaagacagagaaaatggggcaaaggaaagctgggtgaataatgtcaacaaagatgctttccttcctccagagctggctggcgttgtagaagagccagaagaagatgcagcaccagcaagcccgagttccagtgtggtaaatccagcttccagtgtgattgatatgtcccaggaaaacacaaggaaaccaaatgtgtctccagagaagaggaagaatccgtttaatagctccaagttgccagaaggtcactcatcacaacaaactaaaaatgaacagtcaaaaaatggaagaactggtttatttcagacttcaaaagaggatgaattgtcagagtcaaaagaaaagtcaactgtcgcagatacttcaatccaaaagttagagaaatcaaagcagactttgccaggcctttcaaatgggtcccaaatcaaggctccaatccccaaagccaggaagatgatctacaaatcaactgatttaaacaaagatgataaccagtcttttcctagacaaaggacagactccctgaaagcgagaggggctccgagagggatcctcaagcgcaactccagttccagtagcacagactcagaaacccttcgttataatcacaactttgaacccaaaagcaaaattgtgtcacctggcctaaccatccatgagagaatttctgagaaggagcattctttagaagacaactcttccccaaactccctggagccattaaagcatgtgagattctctgcagtgaaggatgagcttccacagagtcctgggctaatccatggtcgggaagtaggagaatttagtgttttagaatctgacagattgaaaaatggaatggaagatgcaggggacacagaagagtttcagagtgaccctaagccttctcaatacagaaagccttcgctttttcatcaatcaacctcaagcccatatgtatcaaaaagtgaaacacatcagccaatgacttctggttcttttccaattaatgggctgcattctcattcagaagttttaactgcaagaccacagtctatggagaattcaccaaccatcaatgaacccaaagataaatcatcagaattaacaaggcttgaatctgtattacccagaagccctgctggtaagagagttgtcactactagattataaaaacttggtggggccgggcgcggtggctcacgcctgtaatcccagcactttgggaggccgaggcgggtggatcatgaggtcaggagatcgagaccatcctggctaacaaggtgaaaccccgtctctactaaaaatacaaaaaattagccgggcgcggtggcgggcgcctgtagtcccagctactcgggaggctgaggcaggagaatggcgtgaacccgggaagcggagcttgcagtgagcngagattgcgccactgcagtccgcagtccggcctgggcgacagagcgagactccgtctc

SEQ ID NO: 422319 - DNA, 905 bp, Homo sapiens
gggcgacacccgggccgtgccgccagcgtccgtcgggagagtgaaggctcgcaacgccttgcccgggggaaggtaacgcgccgcgcccggggctgcgcggtttgcaccgccaggccgagggctgggggccagaagacaagagagacggcgaggcgcgctccctgcccggcagcgactcggaggtaggtgatgctctgatgctgctgcctcttatgaattgacgacaggtgcagagagagaataaactgtgtctaagactggaccagagagtgagtgtgctggaagccaccataggaacaagcgacctgtttggcaaggaatacagcatccttctgagagcctcttctcgacactatcccacagaccaggacttcctcatgggaaagagcacttaggatcttgctatcagctgccctaaacttttgctgagccaaaataagactttgatgcagaactgaacaagatatttcatttttgtgtgttttaatcttcctggttgcagtcttagttgttcagccctgagaattttgagccacatttgttgctattatttttgcatgcacttttcaaaatgattgacttaagcttcctgactgaagaggaacaagaggccatcatgaaggttttgcagcgggatgctgctctgaagagggccgaagaagagagagtcagacatttgcctgaaaaaattaaggatgaccagcagctgaagaatatgagtggccaatggttttatgaagccaaggcaaaaaggcacagggacaaaatccatggcgcagatatcatcagagcatctatgagaaagaagaggccccagatagcaggaatacagcatccttctgagagcctcttctcgacactatcccacagaccaggacttcctcatgggaaagagcacttaggat

SEQ ID NO: 422320 - DNA, 475 bp, Homo sapiens
aatggataaaaggtggtatgtacatacactgtagtattattcagccttaaaaaaggaaatgctgacacatactacaacatagataaaatctgtaaacattatgctaaatgaaataagccagacaaaaaaggaaaaatattgtatgattccacttatacacagtacctagaaatggcaaatttacagaaacagaaagtagaatggagattaccataggctggagggacagggaataaaagagttactgtttaatggatacagagtttgtttgagacagatgatatagtgcaaacagatactggtgaaaacacaaaattgtgaatgtgctttaacaccaccaaattgtactcaggaacagttaaaacggaggcggatgcagtggcatgcacctgtaatcccagctactcaggaaagtgaagtgggaggatcgcctgagcccaggaatttcagagcagcttggacaaccccatttcaa

SEQ ID NO: 422321 - DNA, 4240 bp, Homo sapiens
ggacattctgcctctcagtttctccatctactaaagagctcagactgtgcacttctcactcccacagtacactttacacagctttgaccatcctccctgctgcttggattgcaaaggacagggtactcttccaaaagacagacaacctttctctctccaaacaggtagaatcctttccaggcctgttaacaccaggtcagagaccccagtagatcacagccttttgcatatcagccagcagttgtccttgtcctagagaaggaactaatagctatgacagacacaatccccaaggaaaccaatttccttctaaatggggcggaaatgaaaactgggagagggctactcctcgttgcttgtgtccatggaataggcaattcccacagaccctgtaaggaagtgctgcaggtggcctcaggatgtccacatccctgggtcctgctgtgccctggaaatccccatctccaggagtcccacatccacacatgtggcttttctccctgtcggccagaaaccatgctttcttagccacgcagcataccatgtagcccgtgctctagcagcagcaacactcctgcccgcctgtctgtgcatgcgtccgtggcacactcctgtcctgggcaggtttcctctgcacacttagcaggggtgccagtgtacctctcatcgtccaggtgaggccaaggacaattgcaagcttttcctctgtcctcttctcactccttagctcccctctcctctccattcagtggcagcagcctcacaccaagaaggaaaatcctggacccattacataattctccatagtgcaagcagtagctggggcgtaaggtcagaggtcatagtggggtcaggtggctgacacacactgtaacgacaaggtggttaaaattagaccacagagaggaaactggcagtcttgtggaaatgcagaagtttcctatgcaagtgagaggctggagatgcagggaggccactgtgcgtgctgcctgccaggctattactcatttcggctctgttctttaatgccttttagcccctgcttctgtatttctagccttcctcatcacatgtttgaatacacgcaatggaaccatgcttacctgccctgggccaagacaagcttcccttctccttcacggaggcaagcccaggaccaggcaccccaagctcaaggggctgaactttttctaagcccttctgggtagccgagaaccttctacatcaacctctcaggtgaaggtggtcaaagtacttagcttgagattccagcctataatggtaacagggccaatggtgagagaaagcagagaacactcctagaccgtgtaggaaagcggggttggctttttggtgaaggtggcagaggatgcagccacagagcacacagttgaccggtgtgtgccgcactttcctgggcagccagcctgcacagcggtgctcatttatttccactgtcttagagaacatgggtcatgcctgcttcatctgctctctgtggtacccagccgagcttccctgggctgtccgtctttactgtgagcctactgtgtgcacagcttgtccttacaattcttgccagtgacgtacgaaaacgatgagatttaggctttgccaccagaggggttgctgtccacatgagagagagaacacctgcacctgtaaaatgatcatcagtagtctccaggttattgcagctgactgcaaaagggtcacagtgctgaagtattttctggaagccctttgtggacaagaagagcctctgctggcattcaagggtggaaagtatgtgtcagtggcacccgtcccagacaccatgggaaaggaaatgggaagccaagagggaacacgactggaagatgaggaggaggatgtggtgattgaagactttgaggaagattcagaggctgaaggcagcggaggcgaggatgacatcagggagcttcgggccaagaagctggctctggccaggaagatagctgagcagcagcgtcgccaggaaaagatccaggctgtcctggaggaccacagtcagatgaggcagatggagctcgaaatcagacctttgttcctcgtaccagacaccaacggcttcattgaccacctggccagtctggcgcggctgctggagagcaggaagtacatcctggtggtgcccctcatcgtgatcaatgagctggacggcctggccaaggggcaggagacagaccaccgggctgggggctacgcccgtgtggtacaagagaaggcccgcaagtccatcgagttcctcgagcagcgattcgagagtcgggactcttgcctgcgagccctgaccagccgtggcaatgaactcgaatccatcgccttccgcagtgaggacatcactggccagctgggtaacaacgatgatctcatcctgtcctgctgcctccactactgcaaagacaaggctaaggacttcatgcccgccagcaaagaggagccaatccggctactgcgggaggtggtgctgttgacggatgaccggaacctgcgtgtgaaggcgctcacaaggaatgttcctgtacgggacatcccagccttcctcacgtgggcccaggtgggctgagggagccacactggggcccccccccccgtggaaccgttcctgaaaggccaccaggcgcccagtgtagcacggaagatgcccacgtgcctgagccaccaatccacccagacaataaaccatcctcttccaacccacgccacggccatgctgtgggggacctgctcctcacagagcccctcccaaggatcgggcggaagctgctgggaccctcctgggctgccaggatttagcagggaggtggctggctacagcaacagcagctgggcaagccagataggccgcccatgctctcagcctttctccctcccccgtctcattccaaggctgagggagggccttctcgcctggggacgcagccactttctccagtggagacagggcaggggttcagagtttccgtcagatgcagtgaaatcacagttccctttcatcttcagaacctctgtcgtgaatgtgttcaagaggctttggttaagtcaggaagaagtgcccagggtgtgtgtccccagtctccctgaggcctggactcgcccatgaacccaagtcggcttctagacagcatgtccctaacagcagccctgggcccccacctcttctaccatccaccccagacttaccacacacccttcctgctgctcctcttcctgcccttatcaacctgggtccctcacacttcgccagttgcgtccccgtggacagtcatgagtctagaggaaaggggcatctggtctcaggcccgtgctctcgggtggcctccacctgctccctttctcctcactggcctttctttccgtctagcttcctcttcaggaaatgtcctgactctcctcagctcccccttcacccctccttgcccgcctaccctccctccagaatagcccctcacccttcttccccttctagttgatccttttcacctccctgatccccttcatttcttcaccgcggttcctcgtcataggggttctcactctgaactttccctctctactacccatggcaggaacctagtacaggtctcccacccagggccttccaccctcggctcctgtgctgggagaaacttccaggcgtggacagcccagcctgaggcattccagtgctggggcaccgtcgcctaacctggtttctagctttgccctcactccccggaaaaactgacactgacacaggggccctttccttgcccctttagctggtacctcagtggggaggcttccttaccaagaatgagttcctgaaacccagggccagagacaaggacaacttaggggaagacggggttttcggtggagccaggggcaaatcttaatgggaccagtgggggataccccagagcccatggcctgactgcacagcctgcctggaggatgggtgcgcagctctgccctccctgaggcccaggactatgccagaagcgatggggtaccgtgtaggggagccaaggccagtagtttgggggtaggagtcccctagagtctcagaagactgggctctttggagtacagggtccccggcctctcctttaagattctctccccagctggaaggccgatgactgggtggtcgggagggagacccagctctcctttctgtcccgtttgcagcactggttttgtttccttaataaatttttagttatgaaacata

SEQ ID NO: 422322 - DNA, 2520 bp, Homo sapiens
agcagtaggcgctggggccgcggcggaccctcgctgccctacctctctcgcgggttagtgcggggtcgggctcggccagtcctggccagctccgggagagcctggcccgaattcctgcctccaccctctttctcgccgcgaaggtgactgttccttttgccccagccctctcagacccgccccggattcccaggcatcgggagacgcggaaaggagtggggtctggtggaggccccgggcgtatcgctctccaggccgccctccgcgggcctgccccggccaccgctttaacgtcggagagaaggaattggggagaaaggtttaagagcctgcgacttcgttgctgaacttttcccccccaagacaggcttccgaaagctgcgccactggagggatccgggacctcagactactcgggtttggccctggcatgtgtgggagcagtttttattagagagaatgctcaatttgcaagttaatttcaagtctccagccacgtcaggaaaaaaacatgaaggaattaaaggaggccaggccgcgcaaagataacaggcgtccagatctggaaatctataagcctggcctttctcggctaaggaacaagcccaaaatcaaggaaccccctgggagtgaggaattcaaagatgaaattgttaatgaccgagattgctctgctgttgaaaatggtacacagcccgttaaagatgtctgcaaggaactgaacaaccaagagcagaatggtcctatagacccagaaaataatcggggacaagaatcctttcctaggactgctggacaagaggatcgtagtctaaaaattatcaaaagaacaaagaaacccgacctgcagatctatcagcctggacgacgtttgcagactgttagcaaagaatccgccagtcgggtggaggaggaagaagtcctcaaccaggtagaacaactgagagtagaggaagatgagtgtaggggaaatgttgcgaaggaggaagttgcgaataaaccagacagggccgagatagaaaagagcccaggtggtgggagagtaggggctgcaaaaggagaaaaaggaaagaggatgggaaaaggggagggggtgagggaaacccacgacgacccggcccgcgggaggccgggctccgcaaagcgctactcccgctcagacaaacgaaggaatcgctaccgcacgcgcagcaccagctcagctggcagcaacaacagcgctgagggagctggcctgacggataatggatgtcgccgccgccgacaggataggaccaaggagaggccacgactgaagaagcaagtgtctgtgtcctcaaccgattccttagacgaggacagaattgatgagcctgatggattaggacccaggagaagttcagaaaggaagagacatttagaaagaaactggtctggccgtggggagggtgagcagaaaaacagtgctaaagaatatcgaggcactcttcgtgtcactttcgatgcagaagccatgaacaaagagtctcccatggtgaggtcagccagggatgatatggatagaggaaagcctgacaaaggcttgagcagtgggggcaaaggctctgagaagcaggagtccaaaaacccgaaacaagaacttcggggtcgtggtcgtggcattctgattttgcctgcccataccaccctatctgtcaattcagcaggttctccagagtccgcgcctttgggacctcggcctcccaaagtgctgggattacaggtgtgagccaccgcgcccggccgaagatcacattctttaacaaggacctgtccaacatgccctgcccacttctccagactttcttacagaatcaatcatctagccatgccagtctacaatgtaccacttttgagaacatcatatatgttgttccctttgcttaagacacaccaggacgtgactccctctcctctccaaaaccaactgtttcttcaaccctcacttttcaactcaaaggtcttttcctctgagaggatatctctggtgctgcttctgtatatttccacagcatcctagccttccccagtcatggcacttcataattgtctgtgttacccatagagcaaggattatctctgccttgttcacagcttgtgcactgtgctttgtacataaaatgtgcccagtaggtttttgttgaatgaataaatgtatgggtccatgtgtgaggaagtcttcaccatccctcttacgctgtgtcaacctgttgatttataagatgggtttgatggctgagcacggtatctcacgcctgtagtcccagcactttgggagcccgaggtgggcagatcactaggtcaggagatcgagactatcctggctaacacggtgaaaccctgcctctactaaatatacaaaaaattagccaggcatggtggcgggtgcctgtggtcccagctgctcggaaggctgaagcaggggaatggcgtgaacccaggaggcagagcttgcagtgagccaagatcgcgccactgcactccagcctgggcaacaggctc

SEQ ID NO: 422323 - DNA, 6328 bp, Homo sapiens
agcagtaggcgctggggccgcggcggaccctcgctgccctacctctctcgcgggttagtgcggggtcgggctcggccagtcctggccagctccgggagagcctggcccgaattcctgcctccaccctctttctcgccgcgaaggtgactgttccttttgccccagccctctcagacccgccccggattcccaggcatcgggagacgcggaaaggagtggggtctggtggaggccccgggcgtatcgctctccaggccgccctccgcgggcctgccccggccaccgctttaacgtcggagagaaggaattggggagaaaggtttaagagcctgcgacttcgttgctgaacttttcccccccaagacaggcttccgaaagctgcgccactggagggatccgggacctcagactactcgggtttggccctggcatgtgtgggagcagtttttattagagagaatgctcaatttgcaagttaatttcaagtctccagccacgtcaggaaaaaaacatgaaggaattaaaggaggccaggccgcgcaaagataacaggcgtccagatctggaaatctataagcctggcctttctcggctaaggaacaagcccaaaatcaaggaaccccctgggagtgaggaattcaaagatgaaattgttaatgaccgagattgctctgctgttgaaaatggtacacagcccgttaaagatgtctgcaaggaactgaacaaccaagagcagaatggtcctatagacccagaaaataatcggggacaagaatcctttcctaggactgctggacaagaggatcgtagtctaaaaattatcaaaagaacaaagaaacccgacctgcagatctatcagcctggacgacgtttgcagactgttagcaaagaatccgccagtcgggtggaggaggaagaagtcctcaaccaggtagaacaactgagagtagaggaagatgagtgtaggggaaatgttgcgaaggaggaagttgcgaataaaccagacagggccgagatagaaaagagcccaggtggtgggagagtaggggctgcaaaaggagaaaaaggaaagaggatgggaaaaggggagggggtgagggaaacccacgacgacccggcccgcgggaggccgggctccgcaaagcgctactcccgctcagacaaacgaaggaatcgctaccgcacgcgcagcaccagctcagctggcagcaacaacagcgctgagggagctggcctgacggataatggatgtcgccgccgccgacaggataggaccaaggagaggccacgactgaagaagcaagtgtctgtgtcctcaaccgattccttagacgaggacagaattgatgagcctgatggattaggacccaggagaagttcagaaaggaagagacatttagaaagaaactggtctggccgtggggagggtgagcagaaaaacagtgctaaagaatatcgaggcactcttcgtgtcactttcgatgcagaagccatgaacaaagagtctcccatggtgaggtcagccagggatgatatggatagaggaaagcctgacaaaggcttgagcagtgggggcaaaggctctgagaagcaggagtccaaaaacccgaaacaagaacttcggggtcgtggtcgtggcattctgattttgcctgcccataccaccctatctgtcaattcagcaggttctccagagtccgcgcctttgggacctcggcttttgtttggatctggtagtaagggatctcggagttggggccgtggaggcaccacacgccgattgtgggacccaaacaatcctgatcagaaacctgctctaaagactcagacgccccagctacatttcttggacactgatgatgaagtcagccctacatcttggggtgactcacgccaggctcaggcatcttactataagtttcaaaactctgacaacccctattattacccccggacaccaggccctgcctcccagtatccctatacgggctataaccctctacagtacccagtgggccctacgaatggtgtgtacccagggccttactacccaggctacccgactccgtcaggacagtatgtgtgtagccctctacctaccagcaccatgagtcccgaggaggtagagcagcacatgaggaacctgcagcaacaggagctgcacaggcttctccgggtggctgacaaccaggaactgcagctcagcaacctgctctccagggaccgcatcagtccggagggcctggagaagatggcgcaactcagagctgaactgctgcagctatatgagcgctgtattctattagatattgagttctctgataatcagaatgtggatcagatcctgtggaagaatgctttctatcaggtgattgagaagttcaggcaacttgtcaaggatccgaatgttgagaacccagaacagattcggaacagacttttggagctcttggatgagggtagtgacttctttgatagtttgcttcagaagctgcaggttacttacaagttcaaactggaagactacatggatggtcttgccattcgcagcaagccattacgcaagacagtaaaatatgccttgatcagtgcccagcgatgcatgatatgccaaggagatattgctaggtaccgggagcaagccagtgatacagcgaattatgggaaagcacgcagttggtacctgaaggcccagcacattgctcccaagaatgggcgcccctataaccagttggctttgctggcagtgtatacgaggaggaagcttgacgctgtctattactatatgcgcagtttagctgccagcaaccctatcctgactgccaaggagagtctcatgagcttgtttgaagagaccaagcggaaggcagaacagatggaaaagaagcaacatgaggaatttgacctgagccctgaccagtggcggaaaggaaagaagtctactttccggcatgttggagatgacaccactcgcctggagatctggattcatccatcccatccacggtcttcccagggcactgagtctgggaaggattctgagcaagagaatgggctgggcagcctgagtcccagtgatctgaacaaaaggttcatcctcagttttctccatgcccatgggaagctgtttacccggattgggatggagacattccctgcagtggctgagaaggtcctcaaggagttccaggtgttactgcagcacagcccctctcccattggaagtacccgcatgctgcagcttatgaccatcaatatgtttgcagtacacaactcccagctgaaagactgcttctcggaggagtgccgctctgtgatccaggaacaagccgcagctctgggcttggccatgttttctctactggtccgccgctgcacctgcttacttaaggagtccgccaaagctcagctgtcctctcctgaggaccaggatgaccaagacgacatcaaggtgtcttcctttgtcccggacctgaaggagctgctccccagtgtcaaagtctggtcagattggatgctcggctacccggacacctggaatcctcctcccacatccctggatctgccctcgcatgttgctgtggatgtatggtcgacgctggctgatttctgtaacatactgactgcagtgaatcagtctgaggtgccactgtacaaggacccggatgatgacctcacccttcttatcctggaagaggatcggcttctctcgggctttgtccccttgctggctgcccctcaggacccctgctacgtggagaaaacctcggataaggttattgcagctgactgcaaaagggtcacagtgctgaagtattttctggaagccctttgtggacaagaagagcctctgctggcattcaagggtggaaagtatgtgtcagtggcacccgtcccagacaccatgggaaaggaaatgggaagccaagagggaacacgactggaagatgaggaggaggatgtggtgattgaagactttgaggaagattcagaggctgaaggcagcggaggcgaggatgacatcagggagcttcgggccaagaagctggctctggccaggaagatagctgagcagcagcgtcgccaggaaaagatccaggctgtcctggaggaccacagtcagatgaggcagatggagctcgaaatcagacctttgttcctcgtaccagacaccaacggcttcattgaccacctggccagtctggcgcggctgctggagagcaggaagtacatcctggtggtgcccctcatcgtgatcaatgagctggacggcctggccaaggggcaggagacagaccaccgggctgggggctacgcccgtgtggtacaagagaaggcccgcaagtccatcgagttcctcgagcagcgattcgagagtcgggactcttgcctgcgagccctgaccagccgtggcaatgaactcgaatccatcgccttccgcagtgaggacatcactggccagctgggtaacaacgatgatctcatcctgtcctgctgcctccactactgcaaagacaaggctaaggacttcatgcccgccagcaaagaggagccaatccggctactgcgggaggtggtgctgttgacggatgaccggaacctgcgtgtgaaggcgctcacaaggaatgttcctgtacgggacatcccagccttcctcacgtgggcccaggtgggctgagggagccacactggggcccccccccccgtggaaccgttcctgaaaggccaccaggcgcccagtgtagcacggaagatgcccacgtgcctgagccaccaatccacccagacaataaaccatcctcttccaacccacgccacggccatgctgtgggggacctgctcctcacagagcccctcccaaggatcgggcggaagctgctgggaccctcctgggctgccaggatttagcagggaggtggctggctacagcaacagcagctgggcaagccagataggccgcccatgctctcagcctttctccctcccccgtctcattccaaggctgagggagggccttctcgcctggggacgcagccactttctccagtggagacagggcaggggttcagagtttccgtcagatgcagtgaaatcacagttccctttcatcttcagaacctctgtcgtgaatgtgttcaagaggctttggttaagtcaggaagaagtgcccagggtgtgtgtccccagtctccctgaggcctggactcgcccatgaacccaagtcggcttctagacagcatgtccctaacagcagccctgggcccccacctcttctaccatccaccccagacttaccacacacccttcctgctgctcctcttcctgcccttatcaacctgggtccctcacacttcgccagttgcgtccccgtggacagtcatgagtctagaggaaaggggcatctggtctcaggcccgtgctctcgggtggcctccacctgctccctttctcctcactggcctttctttccgtctagcttcctcttcaggaaatgtcctgactctcctcagctcccccttcacccctccttgcccgcctaccctccctccagaatagcccctcacccttcttccccttctagttgatccttttcacctccctgatccccttcatttcttcaccgcggttcctcgtcataggggttctcactctgaactttccctctctactacccatggcaggaacctagtacaggtctcccacccagggccttccaccctcggctcctgtgctgggagaaacttccaggcgtggacagcccagcctgaggcattccagtgctggggcaccgtcgcctaacctggtttctagctttgccctcactccccggaaaaactgacactgacacaggggccctttccttgcccctttagctggtacctcagtggggaggcttccttaccaagaatgagttcctgaaacccagggccagagacaaggacaacttaggggaagacggggttttcggtggagccaggggcaaatcttaatgggaccagtgggggataccccagagcccatggcctgactgcacagcctgcctggaggatgggtgcgcagctctgccctccctgaggcccaggactatgccagaagcgatggggtaccgtgtaggggagccaaggccagtagtttgggggtaggagtcccctagagtctcagaagactgggctctttggagtacagggtccccggcctctcctttaagattctctccccagctggaaggccgatgactgggtggtcgggagggagacccagctctcctttctgtcccgtttgcagcactggttttgtttccttaataaatttttagttatgaaacata

SEQ ID NO: 422324 - DNA, 3455 bp, Homo sapiens
cctctctgaacccccctgacacgcctcccatgacaaacttagactgcgcagcgacaggaaagaagtctactttccggcatgttggagatgacaccactcgcctggagatctggattcatccatcccatccacggtcttcccagggcactgagtctgggaaggattctgagcaagagaatgggctgggcagcctgagtcccagtgatctgaacaaaaggttcatcctcagttttctccatgcccatgggaagctgtttacccggattgggatggagacattccctgcagtggctgagaaggtcctcaaggagttccaggtgttactgcagcacagcccctctcccattggaagtacccgcatgctgcagcttatgaccatcaatatgtttgcagtacacaactcccagctgaaagactgcttctcggaggagtgccgctctgtgatccaggaacaagccgcagctctgggcttggccatgttttctctactggtccgccgctgcacctgcttacttaaggagtccgccaaagctcagctgtcctctcctgaggaccaggatgaccaagacgacatcaaggtgtcttcctttgtcccggacctgaaggagctgctccccagtgtcaaagtctggtcagattggatgctcggctacccggacacctggaatcctcctcccacatccctggatctgccctcgcatgttgctgtggatgtatggtcgacgctggctgatttctgtaacatactgactgcagtgaatcagtctgaggtgccactgtacaaggacccggatgatgacctcacccttcttatcctggaagaggatcggcttctctcgggctttgtccccttgctggctgcccctcaggacccctgctacgtggagaaaacctcggataaggttattgcagctgactgcaaaagggtcacagtgctgaagtattttctggaagccctttgtggacaagaagagcctctgctggcattcaagggtggaaagtatgtgtcagtggcacccgtcccagacaccatgggaaaggaaatgggaagccaagagggaacacgactggaagatgaggaggaggatgtggtgattgaagactttgaggaagattcagaggctgaaggcagcggaggcgaggatgacatcagggagcttcgggccaagaagctggctctggccaggaagatagctgagcagcagcgtcgccaggaaaagatccaggctgtcctggaggaccacagtcagatgaggcagatggagctcgaaatcagacctttgttcctcgtaccagacaccaacggcttcattgaccacctggccagtctggcgcggctgctggagagcaggaagtacatcctggtggtgcccctcatcgtgatcaatgagctggacggcctggccaaggggcaggagacagaccaccgggctgggggctacgcccgtgtggtacaagagaaggcccgcaagtccatcgagttcctcgagcagcgattcgagagtcgggactcttgcctgcgagccctgaccagccgtggcaatgaactcgaatccatcgccttccgcagtgaggacatcactggccagctgggtaacaacgatgatctcatcctgtcctgctgcctccactactgcaaagacaaggctaaggacttcatgcccgccagcaaagaggagccaatccggctactgcgggaggtggtgctgttgacggatgaccggaacctgcgtgtgaaggcgctcacaaggaatgttcctgtacgggacatcccagccttcctcacgtgggcccaggtgggctgagggagccacactggggcccccccccccgtggaaccgttcctgaaaggccaccaggcgcccagtgtagcacggaagatgcccacgtgcctgagccaccaatccacccagacaataaaccatcctcttccaacccacgccacggccatgctgtgggggacctgctcctcacagagcccctcccaaggatcgggcggaagctgctgggaccctcctgggctgccaggatttagcagggaggtggctggctacagcaacagcagctgggcaagccagataggccgcccatgctctcagcctttctccctcccccgtctcattccaaggctgagggagggccttctcgcctggggacgcagccactttctccagtggagacagggcaggggttcagagtttccgtcagatgcagtgaaatcacagttccctttcatcttcagaacctctgtcgtgaatgtgttcaagaggctttggttaagtcaggaagaagtgcccagggtgtgtgtccccagtctccctgaggcctggactcgcccatgaacccaagtcggcttctagacagcatgtccctaacagcagccctgggcccccacctcttctaccatccaccccagacttaccacacacccttcctgctgctcctcttcctgcccttatcaacctgggtccctcacacttcgccagttgcgtccccgtggacagtcatgagtctagaggaaaggggcatctggtctcaggcccgtgctctcgggtggcctccacctgctccctttctcctcactggcctttctttccgtctagcttcctcttcaggaaatgtcctgactctcctcagctcccccttcacccctccttgcccgcctaccctccctccagaatagcccctcacccttcttccccttctagttgatccttttcacctccctgatccccttcatttcttcaccgcggttcctcgtcataggggttctcactctgaactttccctctctactacccatggcaggaacctagtacaggtctcccacccagggccttccaccctcggctcctgtgctgggagaaacttccaggcgtggacagcccagcctgaggcattccagtgctggggcaccgtcgcctaacctggtttctagctttgccctcactccccggaaaaactgacactgacacaggggccctttccttgcccctttagctggtacctcagtggggaggcttccttaccaagaatgagttcctgaaacccagggccagagacaaggacaacttaggggaagacggggttttcggtggagccaggggcaaatcttaatgggaccagtgggggataccccagagcccatggcctgactgcacagcctgcctggaggatgggtgcgcagctctgccctccctgaggcccaggactatgccagaagcgatggggtaccgtgtaggggagccaaggccagtagtttgggggtaggagtcccctagagtctcagaagactgggctctttggagtacagggtccccggcctctcctttaagattctctccccagctggaaggccgatgactgggtggtcgggagggagacccagctctcctttctgtcccgtttgcagcactggttttgtttccttaataaatttttagttatgaaacata

SEQ ID NO: 422325 - DNA, 2423 bp, Homo sapiens
ggcctaaagtttgactttgtgagtgtgtaccaggaagaacacagagtgaggaggatgtggtgattgaagactttgaggaagattcagaggctgaaggcagcggaggcgaggatgacatcagggagcttcgggccaagaagctggctctggccaggaagatagctgagcagcagcgtcgccaggaaaagatccaggctgtcctggaggaccacagtcagatgaggcagatggagctcgaaatcagacctttgttcctcgtaccagacaccaacggcttcattgaccacctggccagtctggcgcggctgctggagagcaggaagtacatcctggtggtgcccctcatcgtgatcaatgagctggacggcctggccaaggggcaggagacagaccaccgggctgggggctacgcccgtgtggtacaagagaaggcccgcaagtccatcgagttcctcgagcagcgattcgagagtcgggactcttgcctgcgagccctgaccagccgtggcaatgaactcgaatccatcgccttccgcagtgaggacatcactggccagctgggtaacaacgatgatctcatcctgtcctgctgcctccactactgcaaagacaaggctaaggacttcatgcccgccagcaaagaggagccaatccggctactgcgggaggtggtgctgttgacggatgaccggaacctgcgtgtgaaggcgctcacaaggaatgttcctgtacgggacatcccagccttcctcacgtgggcccaggtgggctgagggagccacactggggcccccccccccgtggaaccgttcctgaaaggccaccaggcgcccagtgtagcacggaagatgcccacgtgcctgagccaccaatccacccagacaataaaccatcctcttccaacccacgccacggccatgctgtgggggacctgctcctcacagagcccctcccaaggatcgggcggaagctgctgggaccctcctgggctgccaggatttagcagggaggtggctggctacagcaacagcagctgggcaagccagataggccgcccatgctctcagcctttctccctcccccgtctcattccaaggctgagggagggccttctcgcctggggacgcagccactttctccagtggagacagggcaggggttcagagtttccgtcagatgcagtgaaatcacagttccctttcatcttcagaacctctgtcgtgaatgtgttcaagaggctttggttaagtcaggaagaagtgcccagggtgtgtgtccccagtctccctgaggcctggactcgcccatgaacccaagtcggcttctagacagcatgtccctaacagcagccctgggcccccacctcttctaccatccaccccagacttaccacacacccttcctgctgctcctcttcctgcccttatcaacctgggtccctcacacttcgccagttgcgtccccgtggacagtcatgagtctagaggaaaggggcatctggtctcaggcccgtgctctcgggtggcctccacctgctccctttctcctcactggcctttctttccgtctagcttcctcttcaggaaatgtcctgactctcctcagctcccccttcacccctccttgcccgcctaccctccctccagaatagcccctcacccttcttccccttctagttgatccttttcacctccctgatccccttcatttcttcaccgcggttcctcgtcataggggttctcactctgaactttccctctctactacccatggcaggaacctagtacaggtctcccacccagggccttccaccctcggctcctgtgctgggagaaacttccaggcgtggacagcccagcctgaggcattccagtgctggggcaccgtcgcctaacctggtttctagctttgccctcactccccggaaaaactgacactgacacaggggccctttccttgcccctttagctggtacctcagtggggaggcttccttaccaagaatgagttcctgaaacccagggccagagacaaggacaacttaggggaagacggggttttcggtggagccaggggcaaatcttaatgggaccagtgggggataccccagagcccatggcctgactgcacagcctgcctggaggatgggtgcgcagctctgccctccctgaggcccaggactatgccagaagcgatggggtaccgtgtaggggagccaaggccagtagtttgggggtaggagtcccctagagtctcagaagactgggctctttggagtacagggtccccggcctctcctttaagattctctccccagctggaaggccgatgactgggtggtcgggagggagacccagctctcctttctgtcccgtttgcagcactggttttgtttccttaataaatttttagttatgaaacata

SEQ ID NO: 422326 - DNA, 1528 bp, Homo sapiens
tcagtcggtaccgatttagctcctagacgggggggactgctcctcacagagcccctcccaaggatcgggcggaagctgctgggaccctcctgggctgccaggatttagcagggaggtggctggctacagcaacagcagctgggcaagccagataggccgcccatgctctcagcctttctccctcccccgtctcattccaaggctgagggagggccttctcgcctggggacgcagccactttctccagtggagacagggcaggggttcagagtttccgtcagatgcagtgaaatcacagttccctttcatcttcagaacctctgtcgtgaatgtgttcaagaggctttggttaagtcaggaagaagtgcccagggtgtgtgtccccagtctccctgaggcctggactcgcccatgaacccaagtcggcttctagacagcatgtccctaacagcagccctgggcccccacctcttctaccatccaccccagacttaccacacacccttcctgctgctcctcttcctgcccttatcaacctgggtccctcacacttcgccagttgcgtccccgtggacagtcatgagtctagaggaaaggggcatctggtctcaggcccgtgctctcgggtggcctccacctgctccctttctcctcactggcctttctttccgtctagcttcctcttcaggaaatgtcctgactctcctcagctcccccttcacccctccttgcccgcctaccctccctccagaatagcccctcacccttcttccccttctagttgatccttttcacctccctgatccccttcatttcttcaccgcggttcctcgtcataggggttctcactctgaactttccctctctactacccatggcaggaacctagtacaggtctcccacccagggccttccaccctcggctcctgtgctgggagaaacttccaggcgtggacagcccagcctgaggcattccagtgctggggcaccgtcgcctaacctggtttctagctttgccctcactccccggaaaaactgacactgacacaggggccctttccttgcccctttagctggtacctcagtggggaggcttccttaccaagaatgagttcctgaaacccagggccagagacaaggacaacttaggggaagacggggttttcggtggagccaggggcaaatcttaatgggaccagtgggggataccccagagcccatggcctgactgcacagcctgcctggaggatgggtgcgcagctctgccctccctgaggcccaggactatgccagaagcgatggggtaccgtgtaggggagccaaggccagtagtttgggggtaggagtcccctagagtctcagaagactgggctctttggagtacagggtccccggcctctcctttaagattctctccccagctggaaggccgatgactgggtggtcgggagggagacccagctctcctttctgtcccgtttgcagcactggttttgtttccttaataaatttttagttatgaaacata

SEQ ID NO: 422327 - DNA, 1461 bp, Homo sapiens
gatagctgattctagaggatccttaagtcaggagcgaactgcagggaggtggctggctacagcaacagcagctgggcaagccagataggccgcccatgctctcagcctttctccctcccccgtctcattccaaggctgagggagggccttctcgcctggggacgcagccactttctccagtggagacagggcaggggttcagagtttccgtcagatgcagtgaaatcacagttccctttcatcttcagaacctctgtcgtgaatgtgttcaagaggctttggttaagtcaggaagaagtgcccagggtgtgtgtccccagtctccctgaggcctggactcgcccatgaacccaagtcggcttctagacagcatgtccctaacagcagccctgggcccccacctcttctaccatccaccccagacttaccacacacccttcctgctgctcctcttcctgcccttatcaacctgggtccctcacacttcgccagttgcgtccccgtggacagtcatgagtctagaggaaaggggcatctggtctcaggcccgtgctctcgggtggcctccacctgctccctttctcctcactggcctttctttccgtctagcttcctcttcaggaaatgtcctgactctcctcagctcccccttcacccctccttgcccgcctaccctccctccagaatagcccctcacccttcttccccttctagttgatccttttcacctccctgatccccttcatttcttcaccgcggttcctcgtcataggggttctcactctgaactttccctctctactacccatggcaggaacctagtacaggtctcccacccagggccttccaccctcggctcctgtgctgggagaaacttccaggcgtggacagcccagcctgaggcattccagtgctggggcaccgtcgcctaacctggtttctagctttgccctcactccccggaaaaactgacactgacacaggggccctttccttgcccctttagctggtacctcagtggggaggcttccttaccaagaatgagttcctgaaacccagggccagagacaaggacaacttaggggaagacggggttttcggtggagccaggggcaaatcttaatgggaccagtgggggataccccagagcccatggcctgactgcacagcctgcctggaggatgggtgcgcagctctgccctccctgaggcccaggactatgccagaagcgatggggtaccgtgtaggggagccaaggccagtagtttgggggtaggagtcccctagagtctcagaagactgggctctttggagtacagggtccccggcctctcctttaagattctctccccagctggaaggccgatgactgggtggtcgggagggagacccagctctcctttctgtcccgtttgcagcactggttttgtttccttaataaatttttagttatgaaacata

SEQ ID NO: 422328 - DNA, 5770 bp, Homo sapiens
agcagtaggcgctggggccgcggcggaccctcgctgccctacctctctcgcgggttagtgcggggtcgggctcggccagtcctggccagctccgggagagcctggcccgaattcctgcctccaccctctttctcgccgcgaaggtgactgttccttttgccccagccctctcagacccgccccggattcccaggcatcgggagacgcggaaaggagtggggtctggtggaggccccgggcgtatcgctctccaggccgccctccgcgggcctgccccggccaccgctttaacgtcggagagaaggaattggggagaaaggtttaagagcctgcgacttcgttgctgaacttttcccccccaagacaggcttccgaaagctgcgccactggagggatccgggacctcagactactcgggtttggccctggcatgtgtgggagcagtttttattagagagaatgctcaatttgcaagttaatttcaagtctccagccacgtcaggaaaaaaacatgaaggaattaaaggaggccaggccgcgcaaagataacaggcgtccagatctggaaatctataagcctggcctttctcggctaaggaacaagcccaaaatcaaggaaccccctgggagtgaggaattcaaagatgaaattgttaatgaccgagattgctctgctgttgaaaatggtacacagcccgttaaagatgtctgcaaggaactgaacaaccaagagcagaatggtcctatagacccagaaaataatcggggacaagaatcctttcctaggactgctggacaagaggatcgtagtctaaaaattatcaaaagaacaaagaaacccgacctgcagatctatcagcctggacgacgtttgcagactgttagcaaagaatccgccagtcgggtggaggaggaagaagtcctcaaccaggtagaacaactgagagtagaggaagatgagtgtaggggaaatgttgcgaaggaggaagttgcgaataaaccagacagggccgagatagaaaagagcccaggtggtgggagagtaggggctgcaaaaggagaaaaaggaaagaggatgggaaaaggggagggggtgagggaaacccacgacgacccggcccgcgggaggccgggctccgcaaagcgctactcccgctcagacaaacgaaggaatcgctaccgcacgcgcagcaccagctcagctggcagcaacaacagcgctgagggagctggcctgacggataatggatgtcgccgccgccgacaggataggaccaaggagaggccacgactgaagaagcaagtgtctgtgtcctcaaccgattccttagacgaggacagaattgatgagcctgatggattaggacccaggagaagttcagaaaggaagagacatttagaaagaaactggtctggccgtggggagggtgagcagaaaaacagtgctaaagaatatcgaggcactcttcgtgtcactttcgatgcagaagccatgaacaaagagtctcccatggtgaggtcagccagggatgatatggatagaggaaagcctgacaaaggcttgagcagtgggggcaaaggctctgagaagcaggagtccaaaaacccgaaacaagaacttcggggtcgtggtcgtggcattctgattttgcctgcccataccaccctatctgtcaattcagcaggttctccagagtccgcgcctttgggacctcggcttttgtttggatctggtagtaagggatctcggagttggggccgtggaggcaccacacgccgattgtgggacccaaacaatcctgatcagaaacctgctctaaagactcagacgccccagctacatttcttggacactgatgatgaagtcagccctacatcttggggtgactcacgccaggctcaggcatcttactataagtttcaaaactctgacaacccctattattacccccggacaccaggccctgcctcccagtatccctatacgggctataaccctctacagtacccagtgggccctacgaatggtgtgtacccagggccttactacccaggctacccgactccgtcaggacagtatgtgtgtagccctctacctaccagcaccatgagtcccgaggaggtagagcagcacatgaggaacctgcagcaacaggagctgcacaggcttctccgggtggctgacaaccaggaactgcagctcagcaacctgctctccagggaccgcatcagtccggagggcctggagaagatggcgcaactcagagctgaactgctgcagctatatgagcgctgtattctattagatattgagttctctgataatcagaatgtggatcagatcctgtggaagaatgctttctatcaggtgattgagaagttcaggcaacttgtcaaggatccgaatgttgagaacccagaacagattcggaacagacttttggagctcttggatgagggtagtgacttctttgatagtttgcttcagaagctgcaggttacttacaagttcaaactggaagactacatggatggtcttgccattcgcagcaagccattacgcaagacagtaaaatatgccttgatcagtgcccagcgatgcatgatatgccaaggagatattgctaggtaccgggagcaagccagtgatacagcgaattatgggaaagcacgcagttggtacctgaaggcccagcacattgctcccaagaatgggcgcccctataaccagttggctttgctggcagtgtatacgaggaggaagcttgacgctgtctattactatatgcgcagtttagctgccagcaaccctatcctgactgccaaggagagtctcatgagcttgtttgaagagaccaagcggaaggcagaacagatggaaaagaagcaacatgaggaatttgacctgagccctgaccagtggcggaaaggaaagaagtctactttccggcatgttggagatgacaccactcgcctggagatctggattcatccatcccatccacggtcttcccagggcactgagtctgggaaggattctgagcaagagaatgggctgggcagcctgagtcccagtgatctgaacaaaaggttcatcctcagttttctccatgcccatgggaagctgtttacccggattgggatggagacattccctgcagtggctgagaaggtcctcaaggagttccaggtgttactgcagcacagcccctctcccattggaagtacccgcatgctgcagcttatgaccatcaatatgtttgcagtacacaactcccagctgaaagactgcttctcggaggagtgccgctctgtgatccaggaacaagccgcagctctgggcttggccatgttttctctactggtccgccgctgcacctgcttacttaaggagtccgccaaagctcagctgtcctctcctgaggaccaggatgaccaagacgacatcaaggtgtcttcctttgtcccggacctgaaggagctgctccccagtgtcaaagtctggtcagattggatgctcggctacccggacacctggaatcctcctcccacatccctggatctgccctcgcatgttgctgtggatgtatggtcgacgctggctgatttctgtaacatactgactgcagtgaatcagtctgaggtgccactgtacaaggacccggatgatgacctcacccttcttatcctggaagaggatcggcttctctcgggctttgtccccttgctggctgcccctcaggacccctgctacgtggagaaaacctcggataaggttattgcagctgactgcaaaagggtcacagtgctgaagtattttctggaagccctttgtggacaagaagagcctctgctggcattcaagggtggaaagtatgtgtcagtggcacccgtcccagacaccatgggaaaggaaatgggaagccaagagggaacacgactggaagatgaggaggaggatgtggtgattgaagactttgaggaagattcagaggctgaaggcagcggaggcgaggatgacatcagggagcttcgggccaagaagctggctctggccaggaagatagctgagcagcagcgtcgccaggaaaagatccaggctgtcctggaggaccacagtcagatgaggcagatggagctcgaaatcagacctttgttcctcgtaccagacaccaacggcttcattgaccacctggccagtctggcgcggctgctggagagcaggaagtacatcctggtggtgcccctcatcgtgatcaatgagctggacggcctggccaaggggcaggagacagaccaccgggctgggggctacgcccgtgtggtacaagagaaggcccgcaagtccatcgagttcctcgagcagcgattcgagagtcgggactcttgcctgcgagccctgaccagccgtggcaatgaactcgaatccatcgccttccgcagtgaggacatcactggccagctgggtaacaacgatgatctcatcctgtcctgctgcctccactactgcaaagacaaggctaaggacttcatgcccgccagcaaagaggagccaatccggctactgcgggaggtggtgctgttgacggatgaccggaacctgcgtgtgaaggcgctcacaaggaatgttcctgtacgggacatcccagccttcctcacgtgggcccaggtgggctgagggagccacactggggcccccccccccgtggaaccgttcctgaaaggccaccaggcgcccagtgtagcacggaagatgcccacgtgcctgagccaccaatccacccagacaataaaccatcctcttccaacccacgccacggccatgctgtgggggacctgctcctcacagagcccctcccaaggatcgggcggaagctgctgggaccctcctgggctgccaggatttagcagggaggtggctggctacagcaacagcagctgggcaagccagataggccgcccatgctctcagcctttctccctcccccgtctcattccaaggctgagggagggccttctcgcctggggacgcagccactttctccagtggagacagggcaggggttcagagtttccgtcagatgcagtgaaatcacagttccctttcatcttcagaacctctgtcgtgaatgtgttcaagaggctttggttaagtcaggaagaagtgcccagggtgtgtgtccccagtctccctgaggcctggactcgcccatgaacccaagtcggcttctagacagcatgtccctaacagcagccctgggcccccacctcttctaccatccaccccagacttaccacacacccttcctgctgctcctcttcctgcccttatcaacctgggtccctcacacttcgccagttgcgtccccgtggacagtcatgagtctagaggaaaggggcatctggtctcaggcccgtgctctcgggtggcctccacctgctccctttctcctcactggcctttctttccgtctagcttcctcttcaggaaatgtcctgactctcctcagctcccccttcacccctccttgcccgcctaccctccctccagaatagcccctcacccttcttccccttctagttgatccttttcacctccctgatccccttcatttcttcaccgcggttcctcgtcataggggttctcactctgaactttccctctctactacccatggcaggaacctagtacaggtctcccacccagggcctcaccatagagggggtttgtgggtgagagggggttctgtgcgtaggggatcctaagagc

SEQ ID NO: 422329 - DNA, 3909 bp, Homo sapiens
agcagtaggcgctggggccgcggcggaccctcgctgccctacctctctcgcgggttagtgcggggtcgggctcggccagtcctggccagctccgggagagcctggcccgaattcctgcctccaccctctttctcgccgcgaaggtgactgttccttttgccccagccctctcagacccgccccggattcccaggcatcgggagacgcggaaaggagtggggtctggtggaggccccgggcgtatcgctctccaggccgccctccgcgggcctgccccggccaccgctttaacgtcggagagaaggaattggggagaaaggtttaagagcctgcgacttcgttgctgaacttttcccccccaagacaggcttccgaaagctgcgccactggagggatccgggacctcagactactcgggtttggccctggcatgtgtgggagcagtttttattagagagaatgctcaatttgcaagttaatttcaagtctccagccacgtcaggaaaaaaacatgaaggaattaaaggaggccaggccgcgcaaagataacaggcgtccagatctggaaatctataagcctggcctttctcggctaaggaacaagcccaaaatcaaggaaccccctgggagtgaggaattcaaagatgaaattgttaatgaccgagattgctctgctgttgaaaatggtacacagcccgttaaagatgtctgcaaggaactgaacaaccaagagcagaatggtcctatagacccagaaaataatcggggacaagaatcctttcctaggactgctggacaagaggatcgtagtctaaaaattatcaaaagaacaaagaaacccgacctgcagatctatcagcctggacgacgtttgcagactgttagcaaagaatccgccagtcgggtggaggaggaagaagtcctcaaccaggtagaacaactgagagtagaggaagatgagtgtaggggaaatgttgcgaaggaggaagttgcgaataaaccagacagggccgagatagaaaagagcccaggtggtgggagagtaggggctgcaaaaggagaaaaaggaaagaggatgggaaaaggggagggggtgagggaaacccacgacgacccggcccgcgggaggccgggctccgcaaagcgctactcccgctcagacaaacgaaggaatcgctaccgcacgcgcagcaccagctcagctggcagcaacaacagcgctgagggagctggcctgacggataatggatgtcgccgccgccgacaggataggaccaaggagaggccacgactgaagaagcaagtgtctgtgtcctcaaccgattccttagacgaggacagaattgatgagcctgatggattaggacccaggagaagttcagaaaggaagagacatttagaaagaaactggtctggccgtggggagggtgagcagaaaaacagtgctaaagaatatcgaggcactcttcgtgtcactttcgatgcagaagccatgaacaaagagtctcccatggtgaggtcagccagggatgatatggatagaggaaagcctgacaaaggcttgagcagtgggggcaaaggctctgagaagcaggagtccaaaaacccgaaacaagaacttcggggtcgtggtcgtggcattctgattttgcctgcccataccaccctatctgtcaattcagcaggttctccagagtccgcgcctttgggacctcggcttttgtttggatctggtagtaagggatctcggagttggggccgtggaggcaccacacgccgattgtgggacccaaacaatcctgatcagaaacctgctctaaagactcagacgccccagctacatttcttggacactgatgatgaagtcagccctacatcttggggtgactcacgccaggctcaggcatcttactataagtttcaaaactctgacaacccctattattacccccggacaccaggccctgcctcccagtatccctatacgggctataaccctctacagtacccagtgggccctacgaatggtgtgtacccagggccttactacccaggctacccgactccgtcaggacagtatgtgtgtagccctctacctaccagcaccatgagtcccgaggaggtagagcagcacatgaggaacctgcagcaacaggagctgcacaggcttctccgggtggctgacaaccaggaactgcagctcagcaacctgctctccagggaccgcatcagtccggagggcctggagaagatggcgcaactcagagctgaactgctgcagctatatgagcgctgtattctattagatattgagttctctgataatcagaatgtggatcagatcctgtggaagaatgctttctatcaggtgattgagaagttcaggcaacttgtcaaggatccgaatgttgagaacccagaacagattcggaacagacttttggagctcttggatgagggtagtgacttctttgatagtttgcttcagaagctgcaggttacttacaagttcaaactggaagactacatggatggtcttgccattcgcagcaagccattacgcaagacagtaaaatatgccttgatcagtgcccagcgatgcatgatatgccaaggagatattgctaggtaccgggagcaagccagtgatacagcgaattatgggaaagcacgcagttggtacctgaaggcccagcacattgctcccaagaatgggcgcccctataaccagttggctttgctggcagtgtatacgaggaggaagcttgacgctgtctattactatatgcgcagtttagctgccagcaaccctatcctgactgccaaggagagtctcatgagcttgtttgaagagaccaagcggaaggcagaacagatggaaaagaagcaacatgaggaatttgacctgagccctgaccagtggcggaaaggaaagaagtctactttccggcatgttggagatgacaccactcgcctggagatctggattcatccatcccatccacggtcttcccagggcactgagtctgggaaggattctgagcaagagaatgggctgggcagcctgagtcccagtgatctgaacaaaaggttcatcctcagttttctccatgcccatgggaagctgtttacccggattgggatggagacattccctgcagtggctgagaaggtcctcaaggagttccaggtgttactgcagcacagcccctctcccattggaagtacccgcatgctgcagcttatgaccatcaatatgtttgcagtacacaactcccagctgaaagactgcttctcggaggagtgccgctctgtgatccaggaacaagccgcagctctgggcttggccatgttttctctactggtccgccgctgcacctgcttacttaaggagtccgccaaagctcagctgtcctctcctgaggaccaggatgaccaagacgacatcaaggtgtcttcctttgtcccggacctgaaggagctgctccccagtgtcaaagtctggtcagattggatgctcggctacccggacacctggaatcctcctcccacatccctggatctgccctcgcatgttgctgtggatgtatggtcgacgctggctgatttctgtaacatactgactgcagtgaatcagtctgaggtgccactgtacaaggacccggatgatgacctcacccttcttatcctggaagaggatcggcttctctcgggctttgtccccttgctggctgcccctcaggacccctgctacgtggagaaaacctcggataaggtcagccccaggccaaacatccctccccattcgcccctcctcttaattctccagacttttttattcttgggaagttttctgtgcaaatggaacatgattaagtcattgagaagggtgttaagggaaaatatcga

SEQ ID NO: 422330 - DNA, 3376 bp, Homo sapiens
agcagtaggcgctggggccgcggcggaccctcgctgccctacctctctcgcgggttagtgcggggtcgggctcggccagtcctggccagctccgggagagcctggcccgaattcctgcctccaccctctttctcgccgcgaaggtgactgttccttttgccccagccctctcagacccgccccggattcccaggcatcgggagacgcggaaaggagtggggtctggtggaggccccgggcgtatcgctctccaggccgccctccgcgggcctgccccggccaccgctttaacgtcggagagaaggaattggggagaaaggtttaagagcctgcgacttcgttgctgaacttttcccccccaagacaggcttccgaaagctgcgccactggagggatccgggacctcagactactcgggtttggccctggcatgtgtgggagcagtttttattagagagaatgctcaatttgcaagttaatttcaagtctccagccacgtcaggaaaaaaacatgaaggaattaaaggaggccaggccgcgcaaagataacaggcgtccagatctggaaatctataagcctggcctttctcggctaaggaacaagcccaaaatcaaggaaccccctgggagtgaggaattcaaagatgaaattgttaatgaccgagattgctctgctgttgaaaatggtacacagcccgttaaagatgtctgcaaggaactgaacaaccaagagcagaatggtcctatagacccagaaaataatcggggacaagaatcctttcctaggactgctggacaagaggatcgtagtctaaaaattatcaaaagaacaaagaaacccgacctgcagatctatcagcctggacgacgtttgcagactgttagcaaagaatccgccagtcgggtggaggaggaagaagtcctcaaccaggtagaacaactgagagtagaggaagatgagtgtaggggaaatgttgcgaaggaggaagttgcgaataaaccagacagggccgagatagaaaagagcccaggtggtgggagagtaggggctgcaaaaggagaaaaaggaaagaggatgggaaaaggggagggggtgagggaaacccacgacgacccggcccgcgggaggccgggctccgcaaagcgctactcccgctcagacaaacgaaggaatcgctaccgcacgcgcagcaccagctcagctggcagcaacaacagcgctgagggagctggcctgacggataatggatgtcgccgccgccgacaggataggaccaaggagaggccacgactgaagaagcaagtgtctgtgtcctcaaccgattccttagacgaggacagaattgatgagcctgatggattaggacccaggagaagttcagaaaggaagagacatttagaaagaaactggtctggccgtggggagggtgagcagaaaaacagtgctaaagaatatcgaggcactcttcgtgtcactttcgatgcagaagccatgaacaaagagtctcccatggtgaggtcagccagggatgatatggatagaggaaagcctgacaaaggcttgagcagtgggggcaaaggctctgagaagcaggagtccaaaaacccgaaacaagaacttcggggtcgtggtcgtggcattctgattttgcctgcccataccaccctatctgtcaattcagcaggttctccagagtccgcgcctttgggacctcggcttttgtttggatctggtagtaagggatctcggagttggggccgtggaggcaccacacgccgattgtgggacccaaacaatcctgatcagaaacctgctctaaagactcagacgccccagctacatttcttggacactgatgatgaagtcagccctacatcttggggtgactcacgccaggctcaggcatcttactataagtttcaaaactctgacaacccctattattacccccggacaccaggccctgcctcccagtatccctatacgggctataaccctctacagtacccagtgggccctacgaatggtgtgtacccagggccttactacccaggctacccgactccgtcaggacagtatgtgtgtagccctctacctaccagcaccatgagtcccgaggaggtagagcagcacatgaggaacctgcagcaacaggagctgcacaggcttctccgggtggctgacaaccaggaactgcagctcagcaacctgctctccagggaccgcatcagtccggagggcctggagaagatggcgcaactcagagctgaactgctgcagctatatgagcgctgtattctattagatattgagttctctgataatcagaatgtggatcagatcctgtggaagaatgctttctatcaggtgattgagaagttcaggcaacttgtcaaggatccgaatgttgagaacccagaacagattcggaacagacttttggagctcttggatgagggtagtgacttctttgatagtttgcttcagaagctgcaggttacttacaagttcaaactggaagactacatggatggtcttgccattcgcagcaagccattacgcaagacagtaaaatatgccttgatcagtgcccagcgatgcatgatatgccaaggagatattgctaggtaccgggagcaagccagtgatacagcgaattatgggaaagcacgcagttggtacctgaaggcccagcacattgctcccaagaatgggcgcccctataaccagttggctttgctggcagtgtatacgaggaggaagcttgacgctgtctattactatatgcgcagtttagctgccagcaaccctatcctgactgccaaggagagtctcatgagcttgtttgaagagaccaagcggaaggcagaacagatggaaaagaagcaacatgaggaatttgacctgagccctgaccagtggcggaaaggaaagaagtctactttccggcatgttggagatgacaccactcgcctggagatctggattcatccatcccatccacggtcttcccagggcactgagtctgggaaggattctgagcaagagaatgggctgggcagcctgagtcccagtgatctgaacaaaaggttcatcctcagttttctccatgcccatgggaagctgtttacccggattgggatggagacattccctgcagtggctgagaaggtcctcaaggagttccaggtgttactgcagcacagcccctctcccattggaagtacccgcatgctgcagcttatgaccatcaatatgtttgcagtacacaactcccagctgaaagctcctccaggaagttctatgtatttgaaagtccatcggtttgactgaggttggaatttggtagtcaagcatggtgatccttctcaagta

SEQ ID NO: 422331 - DNA, 375 bp, Homo sapiens
aatttgcaagttaatttcaagtctccagccacgtcaggaaagtaagaaagattctaagtgtctcacctctcctgcgttaggcaatagagttgtgtagaatggtagctgtgataggtgccttctctaggtttgcggccagtctgtgaaattggtttttgttgattaacataattggattattaaggctattttctcccgctgctctagaaagtagtaggaatagctttccccatccccccgccccccaccaagttacagactgccgagggtgagctattcttgggttaaactgctttatctttgtggatacttcatgaacctaccttttaaacttatgaaaatagtgaagcactatccaaaacctcagtctctttt

SEQ ID NO: 422332 - DNA, 302 bp, Homo sapiens
ggcattctatttccactggcctgaaaacatacagaccccgatgagcagagccttgtgagagggaggaggacggcaacacacgaagaactgagacagatgactgggggcttctaggtctaggcattcttcaaggggaaatttgggatcgttaggcggaacagtcagtgtgatagtacctcagaagacaatagcagaactatgtctggttacctaaagtaaacgcttgggtaaaatatctttaggccgagtgcagtggctcatgcctgtaatcccagcactttgggaggccgaggcaggtggat

SEQ ID NO: 422333 - DNA, 6002 bp, Homo sapiens
gcggccgctcgcgatctagaactagcggacgcgtgggcctggctgcgcgcggcggtggcggagccgctacggctgtagcagcagccgcgaagatggcggaagggctggagcgtgtgcggatctccgcgtcggagctgcgcgggatcctggctactctggccccgcaggccgggagcagagaaaacatgaaggaattaaaggaggccaggccgcgcaaagataacaggcgtccagatctggaaatctataagcctggcctttctcggctaaggaacaagcccaaaatcaaggaaccccctgggagtgaggaattcaaagatgaaattgttaatgaccgagattgctctgctgttgaaaatggtacacagcccgttaaagatgtctgcaaggaactgaacaaccaagagcagaatggtcctatagacccagaaaataatcggggacaagaatcctttcctaggactgctggacaagaggatcgtagtctaaaaattatcaaaagaacaaagaaacccgacctgcagatctatcagcctggacgacgtttgcagactgttagcaaagaatccgccagtcgggtggaggaggaagaagtcctcaaccaggtagaacaactgagagtagaggaagatgagtgtaggggaaatgttgcgaaggaggaagttgcgaataaaccagacagggccgagatagaaaagagcccaggtggtgggagagtaggggctgcaaaaggagaaaaaggaaagaggatgggaaaaggggagggggtgagggaaacccacgacgacccggcccgcgggaggccgggctccgcaaagcgctactcccgctcagacaaacgaaggaatcgctaccgcacgcgcagcaccagctcagctggcagcaacaacagcgctgagggagctggcctgacggataatggatgtcgccgccgccgacaggataggaccaaggagaggccacgactgaagaagcaagtgtctgtgtcctcaaccgattccttagacgaggacagaattgatgagcctgatggattaggacccaggagaagttcagaaaggaagagacatttagaaagaaactggtctggccgtggggagggtgagcagaaaaacagtgctaaagaatatcgaggcactcttcgtgtcactttcgatgcagaagccatgaacaaagagtctcccatggtgaggtcagccagggatgatatggatagaggaaagcctgacaaaggcttgagcagtgggggcaaaggctctgagaagcaggagtccaaaaacccgaaacaagaacttcggggtcgtggtcgtggcattctgattttgcctgcccataccaccctatctgtcaattcagcaggttctccagagtccgcgcctttgggacctcggcttttgtttggatctggtagtaagggatctcggagttggggccgtggaggcaccacacgccgattgtgggacccaaacaatcctgatcagaaacctgctctaaagactcagacgccccagctacatttcttggacactgatgatgaagtcagccctacatcttggggtgactcacgccaggctcaggcatcttactataagtttcaaaactctgacaacccctattattacccccggacaccaggccctgcctcccagtatccctatacgggctataaccctctacagtacccagtgggccctacgaatggtgtgtacccagggccttactacccaggctacccgactccgtcaggacagtatgtgtgtagccctctacctaccagcaccatgagtcccgaggaggtagagcagcacatgaggaacctgcagcaacaggagctgcacaggcttctccgggtggctgacaaccaggaactgcagctcagcaacctgctctccagggaccgcatcagtccggagggcctggagaagatggcgcaactcagagctgaactgctgcagctatatgagcgctgtattctattagatattgagttctctgataatcagaatgtggatcagatcctgtggaagaatgctttctatcaggtgattgagaagttcaggcaacttgtcaaggatccgaatgttgagaacccagaacagattcggaacagacttttggagctcttggatgagggtagtgacttctttgatagtttgcttcagaagctgcaggttacttacaagttcaaactggaagactacatggatggtcttgccattcgcagcaagccattacgcaagacagtaaaatatgccttgatcagtgcccagcgatgcatgatatgccaaggagatattgctaggtaccgggagcaagccagtgatacagcgaattatgggaaagcacgcagttggtacctgaaggcccagcacattgctcccaagaatgggcgcccctataaccagttggctttgctggcagtgtatacgaggaggaagcttgacgctgtctattactatatgcgcagtttagctgccagcaaccctatcctgactgccaaggagagtctcatgagcttgtttgaagagaccaagcggaaggcagaacagatggaaaagaagcaacatgaggaatttgacctgagccctgaccagtggcggaaaggaaagaagtctactttccggcatgttggagatgacaccactcgcctggagatctggattcatccatcccatccacggtcttcccagggcactgagtctgggaaggattctgagcaagagaatgggctgggcagcctgagtcccagtgatctgaacaaaaggttcatcctcagttttctccatgcccatgggaagctgtttacccggattgggatggagacattccctgcagtggctgagaaggtcctcaaggagttccaggtgttactgcagcacagcccctctcccattggaagtacccgcatgctgcagcttatgaccatcaatatgtttgcagtacacaactcccagctgaaagactgcttctcggaggagtgccgctctgtgatccaggaacaagccgcagctctgggcttggccatgttttctctactggtccgccgctgcacctgcttacttaaggagtccgccaaagctcagctgtcctctcctgaggaccaggatgaccaagacgacatcaaggtgtcttcctttgtcccggacctgaaggagctgctccccagtgtcaaagtctggtcagattggatgctcggctacccggacacctggaatcctcctcccacatccctggatctgccctcgcatgttgctgtggatgtatggtcgacgctggctgatttctgtaacatactgactgcagtgaatcagtctgaggtgccactgtacaaggacccggatgatgacctcacccttcttatcctggaagaggatcggcttctctcgggctttgtccccttgctggctgcccctcaggacccctgctacgtggagaaaacctcggataaggttattgcagctgactgcaaaagggtcacagtgctgaagtattttctggaagccctttgtggacaagaagagcctctgctggcattcaagggtggaaagtatgtgtcagtggcacccgtcccagacaccatgggaaaggaaatgggaagccaagagggaacacgactggaagatgaggaggaggatgtggtgattgaagactttgaggaagattcagaggctgaaggcagcggaggcgaggatgacatcagggagcttcgggccaagaagctggctctggccaggaagatagctgagcagcagcgtcgccaggaaaagatccaggctgtcctggaggaccacagtcagatgaggcagatggagctcgaaatcagacctttgttcctcgtaccagacaccaacggcttcattgaccacctggccagtctggcgcggctgctggagagcaggaagtacatcctggtggtgcccctcatcgtgatcaatgagctggacggcctggccaaggggcaggagacagaccaccgggctgggggctacgcccgtgtggtacaagagaaggcccgcaagtccatcgagttcctcgagcagcgattcgagagtcgggactcttgcctgcgagccctgaccagccgtggcaatgaactcgaatccatcgccttccgcagtgaggacatcactggccagctgggtaacaacgatgatctcatcctgtcctgctgcctccactactgcaaagacaaggctaaggacttcatgcccgccagcaaagaggagccaatccggctactgcgggaggtggtgctgttgacggatgaccggaacctgcgtgtgaaggcgctcacaaggaatgttcctgtacgggacatcccagccttcctcacgtgggcccaggtgggctgagggagccacactggggcccccccccccgtggaaccgttcctgaaaggccaccaggcgcccagtgtagcacggaagatgcccacgtgcctgagccaccaatccacccagacaataaaccatcctcttccaacccacgccacggccatgctgtgggggacctgctcctcacagagcccctcccaaggatcgggcggaagctgctgggaccctcctgggctgccaggatttagcagggaggtggctggctacagcaacagcagctgggcaagccagataggccgcccatgctctcagcctttctccctcccccgtctcattccaaggctgagggagggccttctcgcctggggacgcagccactttctccagtggagacagggcaggggttcagagtttccgtcagatgcagtgaaatcacagttccctttcatcttcagaacctctgtcgtgaatgtgttcaagaggctttggttaagtcaggaagaagtgcccagggtgtgtgtccccagtctccctgaggcctggactcgcccatgaacccaagtcggcttctagacagcatgtccctaacagcagccctgggcccccacctcttctaccatccaccccagacttaccacacacccttcctgctgctcctcttcctgcccttatcaacctgggtccctcacacttcgccagttgcgtccccgtggacagtcatgagtctagaggaaaggggcatctggtctcaggcccgtgctctcgggtggcctccacctgctccctttctcctcactggcctttctttccgtctagcttcctcttcaggaaatgtcctgactctcctcagctcccccttcacccctccttgcccgcctaccctccctccagaatagcccctcacccttcttccccttctagttgatccttttcacctccctgatccccttcatttcttcaccgcggttcctcgtcataggggttctcactctgaactttccctctctactacccatggcaggaacctagtacaggtctcccacccagggccttccaccctcggctcctgtgctgggagaaacttccaggcgtggacagcccagcctgaggcattccagtgctggggcaccgtcgcctaacctggtttctagctttgccctcactccccggaaaaactgacactgacacaggggccctttccttgcccctttagctggtacctcagtggggaggcttccttaccaagaatgagttcctgaaacccagggccagagacaaggacaacttaggggaagacggggttttcggtggagccaggggcaaatcttaatgggaccagtgggggataccccagagcccatggcctgactgcacagcctgcctggaggatgggtgcgcagctctgccctccctgaggcccaggactatgccagaagcgatggggtaccgtgtaggggagccaaggccagtagtttgggggtaggagtcccctagagtctcagaagactgggctctttggagtacagggtccccggcctctcctttaagattctctccccagctggaaggccgatgactgggtggtcgggagggagacccagctctcctttctgtcccgtttgcagcactggttttgtttccttaataaatttttagttatgaaacata

SEQ ID NO: 422334 - DNA, 5323 bp, Homo sapiens
acaggaatggtcaagagcaatcagtgggggaattgcaaagaggaaaaggctgcatggaatgactcgccaaagaataaacagggagggggtgagggaaacccacgacgacccggcccgcgggaggccgggctccgcaaagcgctactcccgctcagacaaacgaaggaatcgctaccgcacgcgcagcaccagctcagctggcagcaacaacagcgctgagggagctggcctgacggataatggatgtcgccgccgccgacaggataggaccaaggagaggccacgactgaagaagcaagtgtctgtgtcctcaaccgattccttagacgaggacagaattgatgagcctgatggattaggacccaggagaagttcagaaaggaagagacatttagaaagaaactggtctggccgtggggagggtgagcagaaaaacagtgctaaagaatatcgaggcactcttcgtgtcactttcgatgcagaagccatgaacaaagagtctcccatggtgaggtcagccagggatgatatggatagaggaaagcctgacaaaggcttgagcagtgggggcaaaggctctgagaagcaggagtccaaaaacccgaaacaagaacttcggggtcgtggtcgtggcattctgattttgcctgcccataccaccctatctgtcaattcagcaggttctccagagtccgcgcctttgggacctcggcttttgtttggatctggtagtaagggatctcggagttggggccgtggaggcaccacacgccgattgtgggacccaaacaatcctgatcagaaacctgctctaaagactcagacgccccagctacatttcttggacactgatgatgaagtcagccctacatcttggggtgactcacgccaggctcaggcatcttactataagtttcaaaactctgacaacccctattattacccccggacaccaggccctgcctcccagtatccctatacgggctataaccctctacagtacccagtgggccctacgaatggtgtgtacccagggccttactacccaggctacccgactccgtcaggacagtatgtgtgtagccctctacctaccagcaccatgagtcccgaggaggtagagcagcacatgaggaacctgcagcaacaggagctgcacaggcttctccgggtggctgacaaccaggaactgcagctcagcaacctgctctccagggaccgcatcagtccggagggcctggagaagatggcgcaactcagagctgaactgctgcagctatatgagcgctgtattctattagatattgagttctctgataatcagaatgtggatcagatcctgtggaagaatgctttctatcaggtgattgagaagttcaggcaacttgtcaaggatccgaatgttgagaacccagaacagattcggaacagacttttggagctcttggatgagggtagtgacttctttgatagtttgcttcagaagctgcaggttacttacaagttcaaactggaagactacatggatggtcttgccattcgcagcaagccattacgcaagacagtaaaatatgccttgatcagtgcccagcgatgcatgatatgccaaggagatattgctaggtaccgggagcaagccagtgatacagcgaattatgggaaagcacgcagttggtacctgaaggcccagcacattgctcccaagaatgggcgcccctataaccagttggctttgctggcagtgtatacgaggaggaagcttgacgctgtctattactatatgcgcagtttagctgccagcaaccctatcctgactgccaaggagagtctcatgagcttgtttgaagagaccaagcggaaggcagaacagatggaaaagaagcaacatgaggaatttgacctgagccctgaccagtggcggaaaggaaagaagtctactttccggcatgttggagatgacaccactcgcctggagatctggattcatccatcccatccacggtcttcccagggcactgagtctgggaaggattctgagcaagagaatgggctgggcagcctgagtcccagtgatctgaacaaaaggttcatcctcagttttctccatgcccatgggaagctgtttacccggattgggatggagacattccctgcagtggctgagaaggtcctcaaggagttccaggtgttactgcagcacagcccctctcccattggaagtacccgcatgctgcagcttatgaccatcaatatgtttgcagtacacaactcccagctgaaagactgcttctcggaggagtgccgctctgtgatccaggaacaagccgcagctctgggcttggccatgttttctctactggtccgccgctgcacctgcttacttaaggagtccgccaaagctcagctgtcctctcctgaggaccaggatgaccaagacgacatcaaggtgtcttcctttgtcccggacctgaaggagctgctccccagtgtcaaagtctggtcagattggatgctcggctacccggacacctggaatcctcctcccacatccctggatctgccctcgcatgttgctgtggatgtatggtcgacgctggctgatttctgtaacatactgactgcagtgaatcagtctgaggtgccactgtacaaggacccggatgatgacctcacccttcttatcctggaagaggatcggcttctctcgggctttgtccccttgctggctgcccctcaggacccctgctacgtggagaaaacctcggataaggttattgcagctgactgcaaaagggtcacagtgctgaagtattttctggaagccctttgtggacaagaagagcctctgctggcattcaagggtggaaagtatgtgtcagtggcacccgtcccagacaccatgggaaaggaaatgggaagccaagagggaacacgactggaagatgaggaggaggatgtggtgattgaagactttgaggaagattcagaggctgaaggcagcggaggcgaggatgacatcagggagcttcgggccaagaagctggctctggccaggaagatagctgagcagcagcgtcgccaggaaaagatccaggctgtcctggaggaccacagtcagatgaggcagatggagctcgaaatcagacctttgttcctcgtaccagacaccaacggcttcattgaccacctggccagtctggcgcggctgctggagagcaggaagtacatcctggtggtgcccctcatcgtgatcaatgagctggacggcctggccaaggggcaggagacagaccaccgggctgggggctacgcccgtgtggtacaagagaaggcccgcaagtccatcgagttcctcgagcagcgattcgagagtcgggactcttgcctgcgagccctgaccagccgtggcaatgaactcgaatccatcgccttccgcagtgaggacatcactggccagctgggtaacaacgatgatctcatcctgtcctgctgcctccactactgcaaagacaaggctaaggacttcatgcccgccagcaaagaggagccaatccggctactgcgggaggtggtgctgttgacggatgaccggaacctgcgtgtgaaggcgctcacaaggaatgttcctgtacgggacatcccagccttcctcacgtgggcccaggtgggctgagggagccacactggggcccccccccccgtggaaccgttcctgaaaggccaccaggcgcccagtgtagcacggaagatgcccacgtgcctgagccaccaatccacccagacaataaaccatcctcttccaacccacgccacggccatgctgtgggggacctgctcctcacagagcccctcccaaggatcgggcggaagctgctgggaccctcctgggctgccaggatttagcagggaggtggctggctacagcaacagcagctgggcaagccagataggccgcccatgctctcagcctttctccctcccccgtctcattccaaggctgagggagggccttctcgcctggggacgcagccactttctccagtggagacagggcaggggttcagagtttccgtcagatgcagtgaaatcacagttccctttcatcttcagaacctctgtcgtgaatgtgttcaagaggctttggttaagtcaggaagaagtgcccagggtgtgtgtccccagtctccctgaggcctggactcgcccatgaacccaagtcggcttctagacagcatgtccctaacagcagccctgggcccccacctcttctaccatccaccccagacttaccacacacccttcctgctgctcctcttcctgcccttatcaacctgggtccctcacacttcgccagttgcgtccccgtggacagtcatgagtctagaggaaaggggcatctggtctcaggcccgtgctctcgggtggcctccacctgctccctttctcctcactggcctttctttccgtctagcttcctcttcaggaaatgtcctgactctcctcagctcccccttcacccctccttgcccgcctaccctccctccagaatagcccctcacccttcttccccttctagttgatccttttcacctccctgatccccttcatttcttcaccgcggttcctcgtcataggggttctcactctgaactttccctctctactacccatggcaggaacctagtacaggtctcccacccagggccttccaccctcggctcctgtgctgggagaaacttccaggcgtggacagcccagcctgaggcattccagtgctggggcaccgtcgcctaacctggtttctagctttgccctcactccccggaaaaactgacactgacacaggggccctttccttgcccctttagctggtacctcagtggggaggcttccttaccaagaatgagttcctgaaacccagggccagagacaaggacaacttaggggaagacggggttttcggtggagccaggggcaaatcttaatgggaccagtgggggataccccagagcccatggcctgactgcacagcctgcctggaggatgggtgcgcagctctgccctccctgaggcccaggactatgccagaagcgatggggtaccgtgtaggggagccaaggccagtagtttgggggtaggagtcccctagagtctcagaagactgggctctttggagtacagggtccccggcctctcctttaagattctctccccagctggaaggccgatgactgggtggtcgggagggagacccagctctcctttctgtcccgtttgcagcactggttttgtttccttaataaatttttagttatgaaacata

SEQ ID NO: 422335 - DNA, 3263 bp, Homo sapiens
cgatgagcagagccttgtgagagggaggaggacggcaacacacgaagaactgagacagatgactgggggcttctaggatggagacattccctgcagtggctgagaaggtcctcaaggagttccaggtgttactgcagcacagcccctctcccattggaagtacccgcatgctgcagcttatgaccatcaatatgtttgcagtacacaactcccagctgaaagactgcttctcggaggagtgccgctctgtgatccaggaacaagccgcagctctgggcttggccatgttttctctactggtccgccgctgcacctgcttacttaaggagtccgccaaagctcagctgtcctctcctgaggaccaggatgaccaagacgacatcaaggtgtcttcctttgtcccggacctgaaggagctgctccccagtgtcaaagtctggtcagattggatgctcggctacccggacacctggaatcctcctcccacatccctggatctgccctcgcatgttgctgtggatgtatggtcgacgctggctgatttctgtaacatactgactgcagtgaatcagtctgaggtgccactgtacaaggacccggatgatgacctcacccttcttatcctggaagaggatcggcttctctcgggctttgtccccttgctggctgcccctcaggacccctgctacgtggagaaaacctcggataaggttattgcagctgactgcaaaagggtcacagtgctgaagtattttctggaagccctttgtggacaagaagagcctctgctggcattcaagggtggaaagtatgtgtcagtggcacccgtcccagacaccatgggaaaggaaatgggaagccaagagggaacacgactggaagatgaggaggaggatgtggtgattgaagactttgaggaagattcagaggctgaaggcagcggaggcgaggatgacatcagggagcttcgggccaagaagctggctctggccaggaagatagctgagcagcagcgtcgccaggaaaagatccaggctgtcctggaggaccacagtcagatgaggcagatggagctcgaaatcagacctttgttcctcgtaccagacaccaacggcttcattgaccacctggccagtctggcgcggctgctggagagcaggaagtacatcctggtggtgcccctcatcgtgatcaatgagctggacggcctggccaaggggcaggagacagaccaccgggctgggggctacgcccgtgtggtacaagagaaggcccgcaagtccatcgagttcctcgagcagcgattcgagagtcgggactcttgcctgcgagccctgaccagccgtggcaatgaactcgaatccatcgccttccgcagtgaggacatcactggccagctgggtaacaacgatgatctcatcctgtcctgctgcctccactactgcaaagacaaggctaaggacttcatgcccgccagcaaagaggagccaatccggctactgcgggaggtggtgctgttgacggatgaccggaacctgcgtgtgaaggcgctcacaaggaatgttcctgtacgggacatcccagccttcctcacgtgggcccaggtgggctgagggagccacactggggcccccccccccgtggaaccgttcctgaaaggccaccaggcgcccagtgtagcacggaagatgcccacgtgcctgagccaccaatccacccagacaataaaccatcctcttccaacccacgccacggccatgctgtgggggacctgctcctcacagagcccctcccaaggatcgggcggaagctgctgggaccctcctgggctgccaggatttagcagggaggtggctggctacagcaacagcagctgggcaagccagataggccgcccatgctctcagcctttctccctcccccgtctcattccaaggctgagggagggccttctcgcctggggacgcagccactttctccagtggagacagggcaggggttcagagtttccgtcagatgcagtgaaatcacagttccctttcatcttcagaacctctgtcgtgaatgtgttcaagaggctttggttaagtcaggaagaagtgcccagggtgtgtgtccccagtctccctgaggcctggactcgcccatgaacccaagtcggcttctagacagcatgtccctaacagcagccctgggcccccacctcttctaccatccaccccagacttaccacacacccttcctgctgctcctcttcctgcccttatcaacctgggtccctcacacttcgccagttgcgtccccgtggacagtcatgagtctagaggaaaggggcatctggtctcaggcccgtgctctcgggtggcctccacctgctccctttctcctcactggcctttctttccgtctagcttcctcttcaggaaatgtcctgactctcctcagctcccccttcacccctccttgcccgcctaccctccctccagaatagcccctcacccttcttccccttctagttgatccttttcacctccctgatccccttcatttcttcaccgcggttcctcgtcataggggttctcactctgaactttccctctctactacccatggcaggaacctagtacaggtctcccacccagggccttccaccctcggctcctgtgctgggagaaacttccaggcgtggacagcccagcctgaggcattccagtgctggggcaccgtcgcctaacctggtttctagctttgccctcactccccggaaaaactgacactgacacaggggccctttccttgcccctttagctggtacctcagtggggaggcttccttaccaagaatgagttcctgaaacccagggccagagacaaggacaacttaggggaagacggggttttcggtggagccaggggcaaatcttaatgggaccagtgggggataccccagagcccatggcctgactgcacagcctgcctggaggatgggtgcgcagctctgccctccctgaggcccaggactatgccagaagcgatggggtaccgtgtaggggagccaaggccagtagtttgggggtaggagtcccctagagtctcagaagactgggctctttggagtacagggtccccggcctctcctttaagattctctccccagctggaaggccgatgactgggtggtcgggagggagacccagctctcctttctgtcccgtttgcagcactggttttgtttccttaataaatttttagttatgaaacata

SEQ ID NO: 422336 - DNA, 2311 bp, Homo sapiens
cctcttaccgtgcgacccagagatcggaatgggacgtgacggccggcacaggcgccgtgcacagctgccaggaatctgacgggctgtcctggaggaccacagtcagatgaggcagatggagctcgaaatcagacctttgttcctcgtaccagacaccaacggcttcattgaccacctggccagtctggcgcggctgctggagagcaggaagtacatcctggtggtgcccctcatcgtgatcaatgagctggacggcctggccaaggggcaggagacagaccaccgggctgggggctacgcccgtgtggtacaagagaaggcccgcaagtccatcgagttcctcgagcagcgattcgagagtcgggactcttgcctgcgagccctgaccagccgtggcaatgaactcgaatccatcgccttccgcagtgaggacatcactggccagctgggtaacaacgatgatctcatcctgtcctgctgcctccactactgcaaagacaaggctaaggacttcatgcccgccagcaaagaggagccaatccggctactgcgggaggtggtgctgttgacggatgaccggaacctgcgtgtgaaggcgctcacaaggaatgttcctgtacgggacatcccagccttcctcacgtgggcccaggtgggctgagggagccacactggggcccccccccccgtggaaccgttcctgaaaggccaccaggcgcccagtgtagcacggaagatgcccacgtgcctgagccaccaatccacccagacaataaaccatcctcttccaacccacgccacggccatgctgtgggggacctgctcctcacagagcccctcccaaggatcgggcggaagctgctgggaccctcctgggctgccaggatttagcagggaggtggctggctacagcaacagcagctgggcaagccagataggccgcccatgctctcagcctttctccctcccccgtctcattccaaggctgagggagggccttctcgcctggggacgcagccactttctccagtggagacagggcaggggttcagagtttccgtcagatgcagtgaaatcacagttccctttcatcttcagaacctctgtcgtgaatgtgttcaagaggctttggttaagtcaggaagaagtgcccagggtgtgtgtccccagtctccctgaggcctggactcgcccatgaacccaagtcggcttctagacagcatgtccctaacagcagccctgggcccccacctcttctaccatccaccccagacttaccacacacccttcctgctgctcctcttcctgcccttatcaacctgggtccctcacacttcgccagttgcgtccccgtggacagtcatgagtctagaggaaaggggcatctggtctcaggcccgtgctctcgggtggcctccacctgctccctttctcctcactggcctttctttccgtctagcttcctcttcaggaaatgtcctgactctcctcagctcccccttcacccctccttgcccgcctaccctccctccagaatagcccctcacccttcttccccttctagttgatccttttcacctccctgatccccttcatttcttcaccgcggttcctcgtcataggggttctcactctgaactttccctctctactacccatggcaggaacctagtacaggtctcccacccagggccttccaccctcggctcctgtgctgggagaaacttccaggcgtggacagcccagcctgaggcattccagtgctggggcaccgtcgcctaacctggtttctagctttgccctcactccccggaaaaactgacactgacacaggggccctttccttgcccctttagctggtacctcagtggggaggcttccttaccaagaatgagttcctgaaacccagggccagagacaaggacaacttaggggaagacggggttttcggtggagccaggggcaaatcttaatgggaccagtgggggataccccagagcccatggcctgactgcacagcctgcctggaggatgggtgcgcagctctgccctccctgaggcccaggactatgccagaagcgatggggtaccgtgtaggggagccaaggccagtagtttgggggtaggagtcccctagagtctcagaagactgggctctttggagtacagggtccccggcctctcctttaagattctctccccagctggaaggccgatgactgggtggtcgggagggagacccagctctcctttctgtcccgtttgcagcactggttttgtttccttaataaatttttagttatgaaacata

SEQ ID NO: 422337 - DNA, 6217 bp, Homo sapiens
agcagtaggcgctggggccgcggcggaccctcgctgccctacctctctcgcgggttagtgcggggtcgggctcggccagtcctggccagctccgggagagcctggcccgaattcctgcctccaccctctttctcgccgcgaaggtgactgttccttttgccccagccctctcagacccgccccggattcccaggcatcgggagacgcggaaaggagtggggtctggtggaggccccgggcgtatcgctctccaggccgccctccgcgggcctgccccggccaccgctttaacgtcggagagaaggaattggggagaaaggtttaagagcctgcgacttcgttgctgaacttttcccccccaagacaggcttccgaaagctgcgccactggagggatccgggacctcagactactcgggtttggccctggcatgtgtgggagcagtttttattagagagaatgctcaatttgcaagttaatttcaagtctccagccacgtcaggaaaaaaacatgaaggaattaaaggaggccaggccgcgcaaagataacaggcgtccagatctggaaatctataagcctggcctttctcggctaaggaacaagcccaaaatcaaggaaccccctgggagtgaggaattcaaagatgaaattgttaatgaccgagattgctctgctgttgaaaatggtacacagcccgttaaagatgtctgcaaggaactgaacaaccaagagcagaatggtcctatagacccagaaaataatcggggacaagaatcctttcctaggactgctggacaagaggatcgtagtctaaaaattatcaaaagaacaaagaaacccgacctgcagatctatcagcctggacgacgtttgcagactgttagcaaagaatccgccagtcgggtggaggaggaagaagtcctcaaccaggtagaacaactgagagtagaggaagatgagtgtaggggaaatgttgcgaaggaggaagttgcgaataaaccagacagggccgagatagaaaagagcccaggtggtgggagagtaggggctgcaaaaggagaaaaaggaaagaggatgggaaaaggggagggggtgagggaaacccacgacgacccggcccgcgggaggccgggctccgcaaagcgctactcccgctcagacaaacgaaggaatcgctaccgcacgcgcagcaccagctcagctggcagcaacaacagcgctgagggagctggcctgacggataatggatgtcgccgccgccgacaggataggaccaaggagaggccacgactgaagaagcaagtgtctgtgtcctcaaccgattccttagacgaggacagaattgatgagcctgatggattaggacccaggagaagttcagaaaggaagagacatttagaaagaaactggtctggccgtggggagggtgagcagaaaaacagtgctaaagaatatcgaggcactcttcgtgtcactttcgatgcagaagccatgaacaaagagtctcccatggtgaggtcagccagggatgatatggatagaggaaagcctgacaaaggcttgagcagtgggggcaaaggctctgagaagcaggagtccaaaaacccgaaacaagaacttcggggtcgtggtcgtggcattctgattttgcctgcccataccaccctatctgtcaattcagcaggttctccagagtccgcgcctttgggacctcggcttttgtttggatctggtagtaagggatctcggagttggggccgtggaggcaccacacgccgattgtgggacccaaacaatcctgatcagaaacctgctctaaagactcagacgccccagctacatttcttggacactgatgatgaagtcagccctacatcttggggtgactcacgccaggctcaggcatcttactataagtttcaaaactctgacaacccctattattacccccggacaccaggccctgcctcccagtatccctatacgggctataaccctctacagtacccagtgggccctacgaatggtgtgtacccagggccttactacccaggctacccgactccgtcaggacagtatgtgtgtagccctctacctaccagcaccatgagtcccgaggaggtagagcagcacatgaggaacctgcagcaacaggagctgcacaggcttctccgggtggctgacaaccaggaactgcagctcagcaacctgctctccagggaccgcatcagtccggagggcctggagaagatggcgcaactcagagctgaactgctgcagctatatgagcgctgtattctattagatattgagttctctgataatcagaatgtggatcagatcctgtggaagaatgctttctatcaggtgattgagaagttcaggcaacttgtcaaggatccgaatgttgagaacccagaacagattcggaacagacttttggagctcttggatgagggtagtgacttctttgatagtttgcttcagaagctgcaggttacttacaagttcaaactggaagactacatggatggtcttgccattcgcagcaagccattacgcaagacagtaaaatatgccttgatcagtgcccagcgatgcatgatatgccaaggagatattgctaggtaccgggagcaagccagtgatacagcgaattatgggaaagcacgcagttggtacctgaaggcccagcacattgctcccaagaatgggcgcccctataaccagttggctttgctggcagtgtatacgaggaggaagcttgacgctgtctattactatatgcgcagtttagctgccagcaaccctatcctgactgccaaggagagtctcatgagcttgtttgaagagaccaagcggaaggcagaacagatggaaaagaagcaacatgaggaatttgacctgagccctgaccagtggcggaaaggaaagaagtctactttccggcatgttggagatgacaccactcgcctggagatctggattcatccatcccatccacggtcttcccagggcactgagtctgggaaggattctgagcaagagaatgggctgggcagcctgagtcccagtgatctgaacaaaaggttcatcctcagttttctccatgcccatgggaagctgtttacccggattgggatggagacattccctgcagtggctgagaaggtcctcaaggagttccaggtgttactgcagcacagcccctctcccattggaagtacccgcatgctgcagcttatgaccatcaatatgtttgcagtacacaactcccagctgaaagactgcttctcggaggagtgccgctctgtgatccaggaacaagccgcagctctgggcttggccatgttttctctactggtccgccgctgcacctgcttacttaaggagtccgccaaagctcagctgtcctctcctgaggaccaggatgaccaagacgacatcaaggtgtcttcctttgtcccggacctgaaggagctgctccccagtgtcaaagtctggtcagattggatgctcggctacccggacacctggaatcctcctcccacatccctggatctgccctcgcatgttgctgtggatgtatggtcgacgctggctgatttctgtaacatactgactgcagtgaatcagtctgaggtgccactgtacaaggacccggatgatgacctcacccttcttatcctggaagaggatcggcttctctcgggctttgtccccttgctggctgcccctcaggacccctgctacgtggagaaaacctcggataaggttattgcagctgactgcaaaagggtcacagtgctgaagtattttctggaagccctttgtggacaagaagagcctctgctggcattcaagggtggaaagtatgtgtcagtggcacccgtcccagacaccatgggaaaggaaatgggaagccaagagggaacacgactggaagatgaggaggaggatgtggtgattgaagactttgaggaagattcagaggctgaaggcagcggaggcgaggatgacatcagggagcttcgggccaagaagctggctctggccaggaagatagctgagcagcagcgtcgccaggaaaagatccaggctgtcctggaggaccacagtcagatgaggcagatggagctcgaaatcagacctttgttcctcgtaccagacaccaacggcttcattgaccacctggccagtctggcgcggctgctggagagcaggaagtacatcctggtggtgcccctcatcgtgatcaatgagctggacggcctggccaaggggcaggagacagaccaccgggctgggggctacgcccgtgtggtacaagagaaggcccgcaagtccatcgagttcctcgagcagcgattcgagagtcgggactcttgcctgcgagccctgaccagccgtggcaatgaactcgaatccatcgccttccgcagtgaggacatcactggccagctgggtaacaacgatgatctcatcctgtcctgctgcctccactactgcaaagacaaggctaaggacttcatgcccgccagcaaagaggagccaatccggctactgcgggaggtggtgctgttgacggatgaccggaacctgcgtgtgaaggcgctcacaaggaatgttcctgtacgggacatcccagccttcctcacgtgggcccaggtgggctgagggagccacactggggcccccccccccgtggaaccgttcctgaaaggccaccaggcgcccagtgtagcacggaagatgcccacgtgcctgagccaccaatccacccagacaataaaccatcctcttccaacccacgccacggccatgctgtgggggacctgctcctcacagagcccctcccaaggatcgggcggaagctgctgggaccctcctgggctgccaggatttagcagggaggtggctggctacagcaacagcagctgggcaagccagataggccgcccatgctctcagcctttctccctcccccgtctcattccaaggctgagggagggccttctcgcctggggacgcagccactttctccagtggagacagggcaggggttcagagtttccgtcagatgcagtgaaatcacagttccctttcatcttcagaacctctgtcgtgaatgtgttcaagaggctttggttaagtcaggaagaagtgcccagggtgtgtgtccccagtctccctgaggcctggactcgcccatgaacccaagtcggcttctagacagcatgtccctaacagcagccctgggcccccacctcttctaccatccaccccagacttaccacacacccttcctgctgctcctcttcctgcccttatcaacctgggtccctcacacttcgccagttgcgtccccgtggacagtcatgagtctagaggaaaggggcatctggtctcaggcccgtgctctcgggtggcctccacctgctccctttctcctcactggcctttctttccgtctagcttcctcttcaggaaatgtcctgactctcctcagctcccccttcacccctccttgcccgcctaccctccctccagaatagcccctcacccttcttccccttctagttgatccttttcacctccctgatccccttcatttcttcaccgcggttcctcgtcataggggttctcactctgaactttccctctctactacccatggcaggaacctagtacaggtctcccacccagggccttccaccctcggctcctgtgctgggagaaacttccaggcgtggacagcccagcctgaggcattccagtgctggggcaccgtcgcctaacctggtttctagctttgccctcactccccggaaaaactgacactgacacaggggccctttccttgcccctttagctggtacctcagtggggaggcttccttaccaagaatgagttcctgaaacccagggccagagacaaggacaacttaggggaagacggggttttcggtggagccaggggcaaatcttaatgggaccgtgtaggggagccaaggccagtagtttgggggtaggagtcccctagagtctcagaagactgggctctttggagtacagggtccccggcctctcctttaagattctctccccagctggaaggccgatgactgggtggtcgggagggagacccagctctcctttctgtcccgtttgcagcactggttttgtttccttaataaatttttagttatgaaacata

SEQ ID NO: 422338 - DNA, 5215 bp, Homo sapiens
agcagtaggcgctggggccgcggcggaccctcgctgccctacctctctcgcgggttagtgcggggtcgggctcggccagtcctggccagctccgggagagcctggcccgaattcctgcctccaccctctttctcgccgcgaaggtgactgttccttttgccccagccctctcagacccgccccggattcccaggcatcgggagacgcggaaaggagtggggtctggtggaggccccgggcgtatcgctctccaggccgccctccgcgggcctgccccggccaccgctttaacgtcggagagaaggaattggggagaaaggtttaagagcctgcgacttcgttgctgaacttttcccccccaagacaggcttccgaaagctgcgccactggagggatccgggacctcagactactcgggtttggccctggcatgtgtgggagcagtttttattagagagaatgctcaatttgcaagttaatttcaagtctccagccacgtcaggaaaaaaacatgaaggaattaaaggaggccaggccgcgcaaagataacaggcgtccagatctggaaatctataagcctggcctttctcggctaaggaacaagcccaaaatcaaggaaccccctgggagtgaggaattcaaagatgaaattgttaatgaccgagattgctctgctgttgaaaatggtacacagcccgttaaagatgtctgcaaggaactgaacaaccaagagcagaatggtcctatagacccagaaaataatcggggacaagaatcctttcctaggactgctggacaagaggatcgtagtctaaaaattatcaaaagaacaaagaaacccgacctgcagatctatcagcctggacgacgtttgcagactgttagcaaagaatccgccagtcgggtggaggaggaagaagtcctcaaccaggtagaacaactgagagtagaggaagatgagtgtaggggaaatgttgcgaaggaggaagttgcgaataaaccagacagggccgagatagaaaagagcccaggtggtgggagagtaggggctgcaaaaggagaaaaaggaaagaggatgggaaaaggggagggggtgagggaaacccacgacgacccggcccgcgggaggccgggctccgcaaagcgctactcccgctcagacaaacgaaggaatcgctaccgcacgcgcagcaccagctcagctggcagcaacaacagcgctgagggagctggcctgacggataatggatgtcgccgccgccgacaggataggaccaaggagaggccacgactgaagaagcaagtgtctgtgtcctcaaccgattccttagacgaggacagaattgatgagcctgatggattaggacccaggagaagttcagaaaggaagagacatttagaaagaaactggtctggccgtggggagggtgagcagaaaaacagtgctaaagaatatcgaggcactcttcgtgtcactttcgatgcagaagccatgaacaaagagtctcccatggtgaggtcagccagggatgatatggatagaggaaagcctgacaaaggcttgagcagtgggggcaaaggctctgagaagcaggagtccaaaaacccgaaacaagaacttcggggtcgtggtcgtggcattctgattttgcctgcccataccaccctatctgtcaattcagcaggttctccagagtccgcgcctttgggacctcggcttttgtttggatctggtagtaagggatctcggagttggggccgtggaggcaccacacgccgattgtgggacccaaacaatcctgatcagaaacctgctctaaagactcagacgccccagctacatttcttggacactgatgatgaagtcagccctacatcttggggtgactcacgccaggctcaggcatcttactataagtttcaaaactctgacaacccctattattacccccggacaccaggccctgcctcccagtatccctatacgggctataaccctctacagtacccagtgggccctacgaatggtgtgtacccagggccttactacccaggctacccgactccgtcaggacagtatgtgtgtagccctctacctaccagcaccatgagtcccgaggaggtagagcagcacatgaggaacctgcagcaacaggagctgcacaggcttctccgggtggctgacaaccaggaactgcagctcagcaacctgctctccagggaccgcatcagtccggagggcctggagaagatggcgcaactcagagctgaactgctgcagctatatgagcgctgtattctattagatattgagttctctgataatcagaatgtggatcagatcctgtggaagaatgctttctatcaggtgattgagaagttcaggcaacttgtcaaggatccgaatgttgagaacccagaacagattcggaacagacttttggagctcttggatgagggtagtgacttctttgatagtttgcttcagaagctgcaggttacttacaagttcaaactggaagactacatggatggtcttgccattcgcagcaagccattacgcaagacagtaaaatatgccttgatcagtgcccagcgatgcatgatatgccaaggagatattgctaggtaccgggagcaagccagtgatacagcgaattatgggaaagcacgcagttggtacctgaaggcccagcacattgctcccaagaatgggcgcccctataaccagttggctttgctggcagtgtatacgaggaggaagcttgacgctgtctattactatatgcgcagtttagctgccagcaaccctatcctgactgccaaggagagtctcatgagcttgtttgaagagaccaagcggaaggcagaacagatggaaaagaagcaacatgaggaatttgacctgagccctgaccagtggcggaaaggaaagaagtctactttccggcatgttggagatgacaccactcgcctggagatctggattcatccatcccatccacggtcttcccagggcactgagtctgggaaggattctgagcaagagaatgggctgggcagcctgagtcccagtgatctgaacaaaaggttcatcctcagttttctccatgcccatgggaagctgtttacccggattgggatggagacattccctgcagtggctgagaaggtcctcaaggagttccaggtgttactgcagcacagcccctctcccattggaagtacccgcatgctgcagcttatgaccatcaatatgtttgcagtacacaactcccagctgaaagactgcttctcggaggagtgccgctctgtgatccaggaacaagccgcagctctgggcttggccatgttttctctactggtccgccgctgcacctgcttacttaaggagtccgccaaagctcagctgtcctctcctgaggaccaggatgaccaagacgacatcaaggtgtcttcctttgtcccggacctgaaggagctgctccccagtgtcaaagtctggtcagattggatgctcggctacccggacacctggaatcctcctcccacatccctggatctgccctcgcatgttgctgtggatgtatggtcgacgctggctgatttctgtaacatactgactgcagtgaatcagtctgaggtgccactgtacaaggacccggatgatgacctcacccttcttatcctggaagaggatcggcttctctcgggctttgtccccttgctggctgcccctcaggacccctgctacgtggagaaaacctcggataaggttattgcagctgactgcaaaagggtcacagtgctgaagtattttctggaagccctttgtggacaagaagagcctctgctggcattcaagggtggaaagtatgtgtcagtggcacccgtcccagacaccatgggaaaggaaatgggaagccaagagggaacacgactggaagatgaggaggaggatgtggtgattgaagactttgaggaagattcagaggctgaaggcagcggaggcgaggatgacatcagggagcttcgggccaagaagctggctctggccaggaagatagctgagcagcagcgtcgccaggaaaagatccaggctgtcctggaggaccacagtcagatgaggcagatggagctcgaaatcagacctttgttcctcgtaccagacaccaacggcttcattgaccacctggccagtctggcgcggctgctggagagcaggaagtacatcctggtggtgcccctcatcgtgatcaatgagctggacggcctggccaaggggcaggagacagaccaccgggctgggggctacgcccgtgtggtacaagagaaggcccgcaagtccatcgagttcctcgagcagcgattcgagagtcgggactcttgcctgcgagccctgaccagccgtggcaatgaactcgaatccatcgccttccgcagtgaggacatcactggccagctgggtaacaacgatgatctcatcctgtcctgctgcctccactactgcaaagacaaggctaaggacttcatgcccgccagcaaagaggagccaatccggctactgcgggaggtggtgctgttgacggatgaccggaacctgcgtgtgaaggcgctcacaaggaatgttcctgtacgggacatcccagccttcctcacgtgggcccaggtgggctgagggagccacactggggcccccccccccgtggaaccgttcctgaaaggccaccaggcgcccagtgtagcacggaagatgcccacgtgcctgagccaccaatccacccagacaataaaccatcctcttccaacccacgccacggccatgctgtgggggacctgctcctcacagagcccctcccaaggatcgggcggaagctgctgggaccctcctgggctgccaggatttagcagggaggtggctggctacagcaacagcagctgggcaagccagataggccgcccatgctctcagcctttctccctcccccgtctcattccaaggctgagggagggccttctcgcctggggacgcagccactttctccagtggagactgggctctttggagtacagggtccccggcctctcctttaagattctctccccagctggaaggccgatgactgggtggtcgggagggagacccagctctcctttctgtcccgtttgcagcactggttttgtttccttaataaatttttagttatgaaacata

SEQ ID NO: 422339 - DNA, 802 bp, Homo sapiens
gccctttcccaggcggtagcgggggcggtggttctgttgtcctgttgcccttttaagctgcggcttgacaggggccgcgcctcctgtcggtggagtcggttacaaagggagcagccccccaggccgccacacagctcccgccaagacctggtgccccttgccattttccagccgcgctcccaggagagtggaggctgcaggaagaggcgggtctttaggctcacaagagctcggccaggcggccccgcggggtggtcgtggccatgacagcggctccagacggctccccttccacgcccttcccgccggagatgaggggaagatgtctgtgtcaagattcaaggccaaactgaagttgctggcgtctatcttccacgagaaccaggaggctcagctgcggctcacgctccactgcaacatgagaatgggacaacagaagaagtgacttcagaggaagaggaagaagaggagatggctgaagatagggtctcctgtcacccaggctggagtggagtggcatggtcacggtcactgcaaccttgaactcccaggttcaagcaatcctcctgagtagcttggaactacaggcgggtgccccacgtcggctaattttttcaattttctgtagaagttgaagtctcgcatctgttgcccaggctggtcttgaaactcctggctcaagtgattccacactcggctcccaaagtgcttgggattacatgcgtgcaccactgtgcctggctgtaggcttgtttataaagtctgggagtaaaatacttctttaaattggtccaatagcatg

SEQ ID NO: 422340 - DNA, 4602 bp, Homo sapiens
  misc_feature (1326)..(1326): n is a, c, g, or t
  misc_feature (1484)..(1484): n is a, c, g, or t
  misc_feature (1946)..(1946): n is a, c, g, or t
  misc_feature (2417)..(2417): n is a, c, g, or t
  misc_feature (4497)..(4497): n is a, c, g, or t
  misc_feature (4546)..(4546): n is a, c, g, or t
gccctttcccaggcggtagcgggggcggtggttctgttgtcctgttgcccttttaagctgcggcttgacaggggccgcgcctcctgtcggtggagtcggttacaaagggagcagccccccaggccgccacacagctcccgccaagacctggtgccccttgccattttccagccgcgctcccaggagagtggaggctgcaggaagaggcgggtctttaggctcacaagagctcggccaggcggccccgcggggtggtcgtggccatgacagcggctccagacggctccccttccacgcccttcccgccggagatgaggggaagatgtctgtgtcaagattcaaggccaaactgaagttgctggcgtctatcttccacgagaaccaggaggctcagctgcggctcacgctccactgcaacatgagaatgggacaacagaagaagtgacttcagaggaagaggaagaagaggagatggctgaaacatataggaggtccaggcagcatgaacagctccctggtcagagacacatggatttgctcactggttactcaaagctgattcaaagccgattaaagctgctgcttcatctggggtcccaacctccagtgggaaaaacattcttcttttcctgctggtgtcacccactgttccacggatccaaaacaacacccaatgtttggtacaaatttagtgaaacagctctttccattcttaactcatgccaagcatctcagcttggggtcaggaaaatgccaggggacatgagctcttctcctagagttagagaattctctgccttagttgcaataaaggaaaagatacacattcttcctacaaatgccaaagtaggctcaaaacttggttcctagagtagagtattgaagtcgtggcaaagatctttccagtgatcaaagcagtggctcgttatgttccctcagactgaagctacagtctcatcttcactttctgttagctccctccatcctctgcgtaggcccacacctgcttcttacagttgtgtggattatagcacctcctctccagcctcaggacctttgtgagtgctgctccttcttccttgactgctcttcaccagggatcctcagggcacagcccttacctcctgcaagtcttgacttaaatgtcactttctcagggaggcccacactcatcaccatttcacacccacctcccacatgaccttattttacctgttctctcttctcctcttttttttagagtacttatgatctcatgtggtacattttggggtttttggttcttctgtatccgccactgccatgatcagttagaatgttggaaancaaggaaacttggttttttggcctgtgatgaaaactatggggtctaatagtatctgataaagtggcagaccctcaattattatttgctgagtaaatgaatgaaggtgtgtagacaactagctctagaagcttaaatgagtgataccatgttttataanattggaagaggccgggaatggtggctcacgcctgtaatctcagcattttgggaggccaaggtggatggatctcttgaggtcaggagtttgagaccagcctggccaacatggtgaaaccttgtctctactaaaaatgcaaaaattagctggacgtggtggcacacgcctgtaatcccagctactctggaggctgaggcacagcatcacttgaacccaggaggcagaggttgcagtgagctgagatggtgccactgcactccagcctgggcaacagagtgagactctgtctccaaaaacagaaaaaagaaagggggggaagaaaagaagaaggaagaggaaagggaggaggaggatttatcattcacttacactagaaacagtgaaaatagataatagctataatttactcacatcttatctaaaacacaaattcagggtaatttatgagcaagtcattttccngtgggctttcgatagtgtgtgaatttggaatgaatgctggtacttccagctcccttccacctgcagcaccaggaagccattgttgtggggaggccaccaacttggctggcatgttgcttctgcctcagttagtgatgatggtgatttggagagaaaggacactctgctaggctccaaatccaaaggatcaagtggataaatgaaatgaatatctaaataaatatcaattaggtcaaaagtttgttttcatctaaatgaaatctgaacactacttagggctatgaaacatagccagaggacatggccagctctggagtggggcctggacttgctctcccctgctggaagtgcttttcctcccagagctcagagcaccatgtgcgtgtgacccctgccttttcacaggccattgccacagggcatctccctggtccacccgccccaagatgagccagcctcccactcaggaantgggtggggaagggaaagaaagacagaggagagagagacagtcacacacaggcagtggagctcccctgcacccaccagggagcttgagcagctcatctgcagagcagggaaacatttttactaccattgggaagacgctgagcagagaggtgaggggacagcatttcttgtctccctgtggcttgttccactcacagttcagtttctcctgttcttggggaaaaggagggaaactgtattagtcagggttctacagagaaacagacccaataagatgtgtgcatgtgtgtgtgtgtttatatatgttcacagaatgtatatatgtgtatatatatgtatatggataactgcatatatatattatttatagagagagagaagagcaggagacagagataaagagagattcatataaagaattatattcataatttatataataatttgttcctttaatcataaagtctggcaagtccaaaatctgcagggcaggccagaagcctgggcaccccggaaagagttgcatctagactctgaagacggtctggaggcagaattccctctttcccagggaattccagtctgttttctctgaaggcctttactgactagatgaggcccccacacacatggaaagcaatctgccctactgaaagtctactgacttagaggtttagctcatctaaaaaataccttcgtagcaatttcgagactggtatttgaccaaatagctgagtaggttggcctagccaatctgacacataaaattaactatcacagaaacaaaataatcaatataggtaataactgtgccagaatgctgtgatgtttcaggatgaccttgtttacatttacatttattgtcaaaacttaccttctctttttatatgggcaattaaatctgctactgagggtatcaagtactgatttaatttacaatcttaatagataagataggttcctattttctcctctccataaaagtaataagtttggagaaaccaggtcggaaatacctctccagattttaaagcataacctcttgtttggaataataagtatgtaaataagcaccataaaatatgaaaccaaacatttcatcattcttttatatacattatcccttgcatttttaaaaaataaggaacaccttattagccatattttcaaatggtgaaaccaacacccccagctcagactctgccgtggtaggctccagggtcactgataccagatcccatggtattttcactatatcccactctttctttgcatgtggctcttttttagctgcattgcgggtaaacaggtgtggctcttttcaaaccaattccatgcatatgtgaagaaaattgatcctgaagttccttttgccaaagatgcttatggagaagtgtctgtgtctggacagacaaaagtgtccatttttgcctcgaagcttggcaaaattgaaattgatgatggggaagctagaaatacttcagtctacatttcgaatcccagctgcggggaggctggttgaggattgcccatccctcagtctgggctggattctccctccagtctctggggttctcttttctattcacaagagggtgctaatgagatggtttaatctctataccctgtggtccacaaatacaagatgccagcgtggccaatggggcttccataagagtggcaatcaggggtctcaagcttaccatgacgttttgggccctggaatcagatcatagttctacagttgtcctggcactagaactcatgacaaggttgtgactagacagaaggagagaaggctggaggctgacaggaagcaatgtgaacaaatgccttcgcaggatgcatgggtttgggcaacagatggtcaggggaggtgctggtgcagacgggctcagtagcaaagcaataactgtggatggccattttatggctgcagatcacagcacatttataaaagatgtgtgtttcatgaaaatgtgcatttcatcgtggaaatactgtggttggaggagatttctcaaagctgataaataagtgtaggtgacttaacttgcaaaagatgatcatatgtgagaanggatgtctcaaattaggaaataacttgttaagtaaaaaagcctcatgtnttgatttgaagaaaaagatattttggtgctcatcaaaataaaagtataataagctg

SEQ ID NO: 422341 - DNA, 735 bp, Homo sapiens
agaggtgcccggtcgccccagcaaccaagtcgcacctggagctgtcctagcgcctagttctctcccggccgcagagctggccgcccagggggagtcgcagagtttggaagatctctctaacacctctcggccaacttcagaagtgtataagatcagctttatctttccaaatggagacaagtatgatggtgactgtacaagaacatcttctggaatctacgagagaaatggaataggtattcataccactcctaatgggattgtctacacaggaagctggaaagatgacaagatgaatggttttggaagacttgagcatttttcaggagcagtatatgaaggacaatttaaggataatatgtttcatggactggggacttacacattcccaaatggggcaaagtatactggaaatttcaatgaaaatagggtggaaggtgaaggggaatatactgatatccaaggactagaatggagtggtaactttcattttacagctgctccagacctgaaattaaagcttcacatgtagatgtgatgttaaattaaagttgaaatgtagtaattgaagcttttagttgtaaggaaagcaacttaatctgttatttgaaatgacttcatacactacccctataagtttgccaataaaaccatcacctgcttacacctttttgaactttatattcattgtcttacaattagtttaaaataaatgacatgattcaaaaaaaaatg

SEQ ID NO: 422342 - DNA, 680 bp, Homo sapiens
agaggtgcccggtcgccccagcaaccaagtcgcacctggagctgtcctagcgcctagttctctcccggccgcagagctggccgcccagggggagtcgcagagtttggaagatctctctaacacctctcggccaacttcagaagtgtataagatcagctttatctttccaaatggagacaagtatgatggtgactgtacaagaacatcttctggaatctacgagagaaatggaataggtattcataccactcctaatgggattgtctacacaggaagctggaaagatgacaagatgaatggttttggaagacttgagcatttttcaggagcagtatatgaaggacaatttaaggataatatgtttcatggactggggacttacacattcccaaatggggcaaagtatactggaaatttcaatgaaaatagtttcattttacagctgctccagacctgaaattaaagcttcacatgtagatgtgatgttaaattaaagttgaaatgtagtaattgaagcttttagttgtaaggaaagcaacttaatctgttatttgaaatgacttcatacactacccctataagtttgccaataaaaccatcacctgcttacacctttttgaactttatattcattgtcttacaattagtttaaaataaatgacatgattcaaaaaaaaatg

SEQ ID NO: 422343 - DNA, 323 bp, Homo sapiens
aggggaatatactgatatccaaggactagaatggagtggtaactttcattttacagctgctccagacctgaaatttcaatgaaaatagggtggaaggtgaaggggaatatactgatatccaaggactagaatggagtggtaactttcattttacagctgctccagacctgaaattaaagcttcacatgtagatgtgatgttaaattaaagttgaaatgtagtaattgaagcttttagttgtaaggaaagcaacttaatctgttatttgaaatgacttcatacactacccctataagtttgccaataaaaccatcacctgctta

SEQ ID NO: 422344 - DNA, 664 bp, Homo sapiens
agaggtgcccggtcgccccagcaaccaagtcgcacctggagctgtcctagcgcctagttctctcccggccgcagagctggccgcccagggggagtcgcagagtttggaagatctctctaacacctctcggccaacttcagaagtgtataagatcagctttatctttccaaatggagacaagtatgatggtgactgtacaagaacatcttctggaatctacgagagaaatggaataggtattcataccactcctaatgggattgtctacacaggaagctggaaagatgacaagatgaatggttttggaagacttgagcatttttcaggagcagtatatgaaggacaatttaaggataatatgtttcatggactggggacttacacattcccaaatggggcaaagtatactggaaatttcaatgaaaatagggtggaaggtgaaggggaatatactgatatccaaggactagaatggagtggtaactttcattttacagctgctccagacctgaaattaaagcttcacatgtagatgtgatgttaaattaaagttgaaatgtagtaattgaagcttttagttgtaaggaaagcaacttaatctgttatttgaaatgacttcatacactacccctataagtttgccaataaaaccatcacctgctta

SEQ ID NO: 422345 - DNA, 1193 bp, Homo sapiens
agaggtgcccggtcgccccagcaaccaagtcgcacctggagctgtcctagcgcctagttctctcccggccgcagagctggccgcccagggggagtcgcagagtttggaagatctctctaacacctctcggccaacttcagaagtgtataagatcagctttatctttccaaatggagacaagtatgatggtgactgtacaagaacatcttctggaatctacgagagaaatggaataggtattcataccactcctaatgggattgtctacacaggaagctggaaagatgacaagatgaatggttttggaagacttgagcatttttcaggagcagtatatgaaggacaatttaaggataatatgtttcatggactggggacttacacattcccaaatggggcaaagtatactggaaatttcaatgaaaatagaataggtaagcttaaaataaaaaaaaatcactgcatttctaaaagattattttctggtatgtttgcttaaatacttatttatttatttatttattgagacagagtctccctctgtcatccaggcaggagtgcagtggagtgatctcggctcactgcaacctctgcctcccgggttcaagcgattctcttgcctcagccacccaagtagctgggtccacagatgtgcactaccacacccagctattttttgtattttcagtagggacggggtttcaccgtgttgagcaggctggtctagaactcctgacctcaagtgatctgcctgcctcggcctctcagagtgctgagattacaggcgtgagccactgtgcccagctgcttaaatactatatttagttaattctaaatattcttttatgatatagtttctaaaaattgttggaggccaggtgcggtggcacagcacctcaaacatcattgatagtgaaaaaatatttgttgaataagtgaagtaattaagctagataaccgatataaacttttcatttttttaactcattgttttggttttgtgtgaacctagattatgtgatcctaaaatcttggacaccaaataattgtttgtttttgtttggaatagtatgtggtttttttttttttttttttggtttgtttgtttttttggtaggatatgaaagcaggatgctgggtttaaaagcaaagcttgaaagtagaggatataatcttcagacatagtatatatt

SEQ ID NO: 422346 - DNA, 289 bp, Homo sapiens
gagagagagagagagagagaagagagaagagagagagagagagagagagagagagagacagcagatcccagtgaagggttttgtgtgtttaggcctcatttctttgtctttttcctactccgttcctggcatttgctgatttctagtgtatactctgtagtctcagttcgtgtttgattccattccatggaaataaaaagtatgttgtacatactgccgaagaattgtcttgcaagttaaggcttccccctttactataagactataaataaaaacttattttatcctt

SEQ ID NO: 422347 - DNA, 2157 bp, Homo sapiens
cgggctggcgtcgcctggatgcggtttcttccgggatttgtagtttttctggagctacccgggccgtctgttagagggacaagaactacaagtctcggctgccccagcgctgcgagcctggtcacgtggcgggggccgaccgggcgtgcgtgccgccgttgatccggtgctgcagtgagggaggtggttcttgcccgtgttgtgtgtgtgtgtgagtgagagagcgagtgagtgagtgagtgagtgtgtgtgtgggggggactcggcttgttgttgtcggtgacttccccctccccttcaccccttcccctccccgccgccgctgcagtggccgctccctgggccgtaggaaatgagcgataacgatgacatcgaggtggagagcgacgctgacaaacgggctcatcataatgcactggaacgaaaacgtagggaccacatcaaagacagctttcacagtttgcgggactcagtcccatcactccaaggagagaaggcatcccgggcccaaatcctagacaaagccacagaatatatccagtatatgcgaaggaaaaaccacacacaccagcaagatattgacgacctcaagcggcagaatgctcttctggagcagcaagtccgtgcactggagaaggcgaggtcaagtgcccaactgcagaccaactacccctcctcagacaacagcctctacaccaacgccaagggcagcaccatctctgccttcgatgggggctcggactccagctcggagtctgagcctgaagagccccaaagcaggaagaagctccggatggaggccagctaagccactcggggcaggccagcaataaaaactgtctgtctccatcgtctcatcctcctttcagttcgttggtagagccctcagaaccatttaagagactctttatttttctctttctcccttttttttttaaatttttatttttacgtagaagctcttggacaacagctctcgttctccttccccatttccactgtatattttttaatgtattcccttcagggattccctgtccccaacaggaatttttaaaccaaaacaccccaacttggcagctttttctgtggaggacagacggccggccggacctctgagcacatagtgtcctgcccaccctaccagctcctccagccctgccgggcacatgcccgggggacgcctgccctgcccaggtggcctcctggcccgccctcacctctgatagactttgtgaatctgaactgctctactttgagaagatgaccggtttggagtaatcagaatgaaccctcctcctttttaagggttttttttttttcctttttctaaaaagctatgtatcgctcctattgaaagaccagatccttagagaagtttgtggtataaaaaggaagtggggacagattcgcagcacagagtcgctggcatgtttcactcctgcttctctcagccagctgtttaagcctgcggcgccagcctcacggagggccgtgtgacactctcgtggtatgtatgggagatggcagcagtgaagcagcagccaccagggagtggccatttggggttgggacagggagggtgttttgggtggcatagaggttttgtattgagggccagtgatgatgttttgatatttatttcctgctacttaaatttgaatctgagtgaattgtacctatttctgatgatgtcggtcttgcaaagcgacagattcataaagtaatgatgaaatctttctttcttcccgtgtgtatttctaagaaatagagccaactgattttgtatgtaaataccaagagcaatttacctggtactaaacccgcaccccagtgcggacccttcccagccctcatcccacttcctttcctactgtcctggaacctgtctccattgtgtgatccagccctggttctggctgtggtcagcagatcccagtgaagggttttgtgtgtttaggcctcatttctttgtctttttcctactccgttcctggcatttgctgatttctagtgtatactctgtagtctcagttcgtgtttgattccattccatggaaataaaaagtatgttgtacatactgccgaagaattgtcttgcaagttaaggcttccccctttactataagactataaataaaaacttattttatcctt

SEQ ID NO: 422348 - DNA, 2184 bp, Homo sapiens
cgggctggcgtcgcctggatgcggtttcttccgggatttgtagtttttctggagctacccgggccgtctgttagagggacaagaactacaagtctcggctgccccagcgctgcgagcctggtcacgtggcgggggccgaccgggcgtgcgtgccgccgttgatccggtgctgcagtgagggaggtggttcttgcccgtgttgtgtgtgtgtgtgagtgagagagcgagtgagtgagtgagtgagtgtgtgtgtgggggggactcggcttgttgttgtcggtgacttccccctccccttcaccccttcccctccccgccgccgctgcagtggccgctccctgggccgtaggaaatgagcgataacgatgacatcgaggtggagagcgacgaagagcaaccgaggtttcaatctgcggctgacaaacgggctcatcataatgcactggaacgaaaacgtagggaccacatcaaagacagctttcacagtttgcgggactcagtcccatcactccaaggagagaaggcatcccgggcccaaatcctagacaaagccacagaatatatccagtatatgcgaaggaaaaaccacacacaccagcaagatattgacgacctcaagcggcagaatgctcttctggagcagcaagtccgtgcactggagaaggcgaggtcaagtgcccaactgcagaccaactacccctcctcagacaacagcctctacaccaacgccaagggcagcaccatctctgccttcgatgggggctcggactccagctcggagtctgagcctgaagagccccaaagcaggaagaagctccggatggaggccagctaagccactcggggcaggccagcaataaaaactgtctgtctccatcgtctcatcctcctttcagttcgttggtagagccctcagaaccatttaagagactctttatttttctctttctcccttttttttttaaatttttatttttacgtagaagctcttggacaacagctctcgttctccttccccatttccactgtatattttttaatgtattcccttcagggattccctgtccccaacaggaatttttaaaccaaaacaccccaacttggcagctttttctgtggaggacagacggccggccggacctctgagcacatagtgtcctgcccaccctaccagctcctccagccctgccgggcacatgcccgggggacgcctgccctgcccaggtggcctcctggcccgccctcacctctgatagactttgtgaatctgaactgctctactttgagaagatgaccggtttggagtaatcagaatgaaccctcctcctttttaagggttttttttttttcctttttctaaaaagctatgtatcgctcctattgaaagaccagatccttagagaagtttgtggtataaaaaggaagtggggacagattcgcagcacagagtcgctggcatgtttcactcctgcttctctcagccagctgtttaagcctgcggcgccagcctcacggagggccgtgtgacactctcgtggtatgtatgggagatggcagcagtgaagcagcagccaccagggagtggccatttggggttgggacagggagggtgttttgggtggcatagaggttttgtattgagggccagtgatgatgttttgatatttatttcctgctacttaaatttgaatctgagtgaattgtacctatttctgatgatgtcggtcttgcaaagcgacagattcataaagtaatgatgaaatctttctttcttcccgtgtgtatttctaagaaatagagccaactgattttgtatgtaaataccaagagcaatttacctggtactaaacccgcaccccagtgcggacccttcccagccctcatcccacttcctttcctactgtcctggaacctgtctccattgtgtgatccagccctggttctggctgtggtcagcagatcccagtgaagggttttgtgtgtttaggcctcatttctttgtctttttcctactccgttcctggcatttgctgatttctagtgtatactctgtagtctcagttcgtgtttgattccattccatggaaataaaaagtatgttgtacatactgccgaagaattgtcttgcaagttaaggcttccccctttactataagactataaataaaaacttattttatcctt

SEQ ID NO: 422349 - DNA, 2068 bp, Homo sapiens
cgggctggcgtcgcctggatgcggtttcttccgggatttgtagtttttctggagctacccgggccgtctgttagagggacaagaactacaagtctcggctgccccagcgctgcgagcctggtcacgtggcgggggccgaccgggcgtgcgtgccgccgttgatccggtgctgcagtgaggaagagcaaccgaggtttcaatctgcggctgacaaacgggctcatcataatgcactggaacgaaaacgtagggaccacatcaaagacagctttcacagtttgcgggactcagtcccatcactccaaggagagaaggcatcccgggcccaaatcctagacaaagccacagaatatatccagtatatgcgaaggaaaaaccacacacaccagcaagatattgacgacctcaagcggcagaatgctcttctggagcagcaaggggaaagcgagagctgatcaagttctttgttcctggggaattcacttctcttcctccctcatggaagatgcaagtaaaaggaaatgcaagtaatccgtgcactggagaaggcgaggtcaagtgcccaactgcagaccaactacccctcctcagacaacagcctctacaccaacgccaagggcagcaccatctctgccttcgatgggggctcggactccagctcggagtctgagcctgaagagccccaaagcaggaagaagctccggatggaggccagctaagccactcggggcaggccagcaataaaaactgtctgtctccatcgtctcatcctcctttcagttcgttggtagagccctcagaaccatttaagagactctttatttttctctttctcccttttttttttaaatttttatttttacgtagaagctcttggacaacagctctcgttctccttccccatttccactgtatattttttaatgtattcccttcagggattccctgtccccaacaggaatttttaaaccaaaacaccccaacttggcagctttttctgtggaggacagacggccggccggacctctgagcacatagtgtcctgcccaccctaccagctcctccagccctgccgggcacatgcccgggggacgcctgccctgcccaggtggcctcctggcccgccctcacctctgatagactttgtgaatctgaactgctctactttgagaagatgaccggtttggagtaatcagaatgaaccctcctcctttttaagggttttttttttttcctttttctaaaaagctatgtatcgctcctattgaaagaccagatccttagagaagtttgtggtataaaaaggaagtggggacagattcgcagcacagagtcgctggcatgtttcactcctgcttctctcagccagctgtttaagcctgcggcgccagcctcacggagggccgtgtgacactctcgtggtatgtatgggagatggcagcagtgaagcagcagccaccagggagtggccatttggggttgggacagggagggtgttttgggtggcatagaggttttgtattgagggccagtgatgatgttttgatatttatttcctgctacttaaatttgaatctgagtgaattgtacctatttctgatgatgtcggtcttgcaaagcgacagattcataaagtaatgatgaaatctttctttcttcccgtgtgtatttctaagaaatagagccaactgattttgtatgtaaataccaagagcaatttacctggtactaaacccgcaccccagtgcggacccttcccagccctcatcccacttcctttcctactgtcctggaacctgtctccattgtgtgatccagccctggttctggctgtggtcagcagatcccagtgaagggttttgtgtgtttaggcctcatttctttgtctttttcctactccgttcctggcatttgctgatttctagtgtatactctgtagtctcagttcgtgtttgattccattccatggaaataaaaagtatgttgtacatactgccgaagaattgtcttgcaagttaaggcttccccctttactataagactataaataaaaacttattttatcctt

SEQ ID NO: 422350 - DNA, 2125 bp, Homo sapiens
agggatgggcagtgggtggtgtcagtgggttggttactgggccaggcagcctgcatgtaggggctatttgaaaagcccaggtattttatgtgtattggtgacttgcttccaagtgtccagcttgtcattccaagtggatcttgtacacgagagctaagccaaaactgttctttggctgatacgtcttatgtcatcctttcctgctgttgtgtggcctcacaccttgtggagcctcatgctcctgggccagcttctcctctgttattgcactgctgaatcccacagggagctcacgctccagtctctccacggggcttccacggcaggacggtgacatcacaagccttctcttcagagttgggtgggattgcagagtgtctgctggctcccaggtccagctgggaaaggcgggagggaaatgaagtgtgtgagtgaacagccacccgaagggagctacttctgagcatcttgagcctcgggggccaacaagcaagcccttaggaagaacaggctggaccctgagtctgagactcggttactccccaagtctccagaaggcagtaacacactcccttggttgccttttagtccgtgcactggagaaggcgaggtcaagtgcccaactgcagaccaactacccctcctcagacaacagcctctacaccaacgccaagggcagcaccatctctgccttcgatgggggctcggactccagctcggagtctgagcctgaagagccccaaagcaggaagaagctccggatggaggccagctaagccactcggggcaggccagcaataaaaactgtctgtctccatcgtctcatcctcctttcagttcgttggtagagccctcagaaccatttaagagactctttatttttctctttctcccttttttttttaaatttttatttttacgtagaagctcttggacaacagctctcgttctccttccccatttccactgtatattttttaatgtattcccttcagggattccctgtccccaacaggaatttttaaaccaaaacaccccaacttggcagctttttctgtggaggacagacggccggccggacctctgagcacatagtgtcctgcccaccctaccagctcctccagccctgccgggcacatgcccgggggacgcctgccctgcccaggtggcctcctggcccgccctcacctctgatagactttgtgaatctgaactgctctactttgagaagatgaccggtttggagtaatcagaatgaaccctcctcctttttaagggttttttttttttcctttttctaaaaagctatgtatcgctcctattgaaagaccagatccttagagaagtttgtggtataaaaaggaagtggggacagattcgcagcacagagtcgctggcatgtttcactcctgcttctctcagccagctgtttaagcctgcggcgccagcctcacggagggccgtgtgacactctcgtggtatgtatgggagatggcagcagtgaagcagcagccaccagggagtggccatttggggttgggacagggagggtgttttgggtggcatagaggttttgtattgagggccagtgatgatgttttgatatttatttcctgctacttaaatttgaatctgagtgaattgtacctatttctgatgatgtcggtcttgcaaagcgacagattcataaagtaatgatgaaatctttctttcttcccgtgtgtatttctaagaaatagagccaactgattttgtatgtaaataccaagagcaatttacctggtactaaacccgcaccccagtgcggacccttcccagccctcatcccacttcctttcctactgtcctggaacctgtctccattgtgtgatccagccctggttctggctgtggtcagcagatcccagtgaagggttttgtgtgtttaggcctcatttctttgtctttttcctactccgttcctggcatttgctgatttctagtgtatactctgtagtctcagttcgtgtttgattccattccatggaaataaaaagtatgttgtacatactgccgaagaattgtcttgcaagttaaggcttccccctttactataagactataaataaaaacttattttatcctt

SEQ ID NO: 422351 - DNA, 1766 bp, Homo sapiens
cgggctggcgtcgcctggatgcggtttcttccgggatttgtagtttttctggagctacccgggccgtctgttagagggacaagaactacaagtctcggctgccccagcgctgcgagcctggtcacgtggcgggggccgaccgggcgtgcgtgccgccgttgatccggtgctgcagtgagggaggtggttcttgcccgtgttgtgtgtgtgtgtgagtgagagagcgagtgagtgagtgagtgagtgtgtgtgtgggggggactcggcttgttgttgtcggtgacttccccctccccttcaccccttcccctccccgccgccgctgcagtggccgctccctgggccgtaggaaatgagcgataacgatgacatcgaggtggagagcgacgaagagcaaccgaggtttcaatctgcggctgacaaacgggctcatcataatgcactggaacgaaaacgtagggaccacatcaaagacagctttcacagtttgcgggactcagtcccatcactccaaggagagaaggcatcccgggcccaaatcctagacaaagccacagaatatatccagtatatgcgaaggaaaaaccacacacaccagcaagatattgacgacctcaagcggcagaatgctcttctggagcagcaagtccgtgcactggagaaggcgaggtcaagtgcccaactgcagaccaactacccctcctcagacaacagcctctacaccaacgccaagggcagcaccatctctgccttcgatgggggctcggactccagctcggagtctgagcctgaagagccccaaagcaggaagaagctccggatggaggccagctaagccactcggggcaggccagcaataaaaactgtctgtctccatcgtctcatcctcctttcagttcgttggtagagccctcagaaccatttaagagactctttatttttctctttctcccttttttttttaaatttttatttttacgtagaagctcttggacaacagctctcgttctccttccccatttccactgtatattttttaatgtattcccttcagggattccctgtccccaacaggaatttttaaaccaaaacaccccaacttggcagctttttctgtggaggacagacggccggccggacctctgagcacatagtgtcctgcccaccctaccagctcctccagccctgccgggcacatgcccgggggacgcctgccctgcccaggtggcctcctggcccgccctcacctctgatagactttgtgaatctgaactgctctactttgagaagatgaccggtttggagtaatcagaatgaaccctcctcctttttaagggttttttttttttcctttttctaaaaagctatgtatcgctcctattgaaagaccagatccttagagaagtttgtggtataaaaaggaagtggggacagattcgcagcacagagtcgctggcatgtttcactcctgcttctctcagccagctgtttaagcctgcggcgccagcctcacggagggccgtgtgacactctcgtggtatgtatgggagatggcagcagtgaagcagcagccaccagggagtggccatttggggttgggacagggagggtgttttgggtggcatagaggttttgtattgagggccagtgatgatgttttgatatttatttcctgctacttaaatttgaatctgagtgaattgtacctatttctgatgatgtcggtcttgcaaagcgacagattcataaagtaatgatgaaatctt

SEQ ID NO: 422352 - DNA, 1562 bp, Homo sapiens
cgggctggcgtcgcctggatgcggtttcttccgggatttgtagtttttctggagctacccgggccgtctgttagagggacaagaactacaagtctcggctgccccagcgctgcgagcctggtcacgtggcgggggccgaccgggcgtgcgtgccgccgttgatccggtgctgcagtgagggaggtggttcttgcccgtgttgtgtgtgtgtgtgagtgagagagcgagtgagtgagtgagtgagtgtgtgtgtgggggggactcggcttgttgttgtcggtgacttccccctccccttcaccccttcccctccccgccgccgctgcagtggccgctccctgggccgtaggaaatgagcgataacgatgacatcgaggtggagagcgacgaagagcaaccgaggtttcaatctgcggctgacaaacgggctcatcataatgcactggaacgaaaacgtagggaccacatcaaagacagctttcacagtttgcgggactcagtcccatcactccaaggagagaaggcatcccgggcccaaatcctagacaaagccacagaatatatccagtatatgcgaaggaaaaaccacacacaccagcaagatattgacgacctcaagcggcagaatgctcttctggagcagcaaggggaaagcgagagctgatcaagttctttgttcctggggaattcacttctcttcctccctcatggaagatgcaagtaaaaggaaatgcaagtaatccgtgcactggagaaggcgaggtcaagtgcccaactgcagaccaactacccctcctcagacaacagcctctacaccaacgccaagggcagcaccatctctgccttcgatgggggctcggactccagctcggagtctgagcctgaagagccccaaagcaggaagaagctccggatggaggccagctaagccactcggggcaggccagcaataaaaactgtctgtctccatcgtctcatcctcctttcagttcgttggtagagccctcagaaccatttaagagactctttatttttctctttctcccttttttttttaaatttttatttttacgtagaagctcttggacaacagctctcgttctccttccccatttccactgtatattttttaatgtattcccttcagggattccctgtccccaacaggaatttttaaaccaaaacaccccaacttggcagctttttctgtggaggacagacggccggccggacctctgagcacatagtgtcctgcccaccctaccagctcctccagccctgccgggcacatgcccgggggacgcctgccctgcccaggtggcctcctggcccgccctcacctctgatagactttgtgaatctgaactgctctactttgagaagatgaccggtttggagtaatcagaatgaaccctcctcctttttaagggttttttttttttcctttttctaaaaagctatgtatcgctcctattgaaagaccagatccttagagaagtttgtggtataaaaggaagtggggacgaatagtttactcgtaaagcgggatcctcagagtcaac

SEQ ID NO: 422353 - DNA, 1089 bp, Homo sapiens
cgggctggcgtcgcctggatgcggtttcttccgggatttgtagtttttctggagctacccgggccgtctgttagagggacaagaactacaagtctcggctgccccagcgctgcgagcctggtcacgtggcgggggccgaccgggcgtgcgtgccgccgttgatccggtgctgcagtgagggaggtggttcttgcccgtgttgtgtgtgtgtgtgagtgagagagcgagtgagtgagtgagtgagtgtgtgtgtgggggggactcggcttgttgttgtcggtgacttccccctccccttcaccccttcccctccccgccgccgctgcagtggccgctccctgggccgtaggaaatgagcgataacgatgacatcgaggtggagagcgacgaagagcaaccgaggtttcaatctgcggctgacaaacgggctcatcataatgcactggaacgaaaacgtagggaccacatcaaagacagctttcacagtttgcgggactcagtcccatcactccaaggagagaagctctatttcctcttttggaaattgtgtactcctgtccttcatcgtcaaagtttgatgcagaaatgccacaccttcatttcaagctaccaagtgcacaagaaaaaagaatgcaagatttaaaaaatgattgttttgaccccttacacaaatgtcttactcctggctttaattaagctgcttgagggctgatagctctgccttaccctggtaatcagcaaaatggtcctgtggctggggaggccctggcagcaggaagccttcaaggagccatgggtctgtgctgactctggccttacaaccttccagcctcctttgctggcattgatggggttccatttttgaatgaactagtttaatgtggatccaaatttattgtgcatattctttcgttttggttttcaaaagatggcttattcacatggaaatgtacaccagtttagccctgggccctccctttaccttcatatgtgtaaaagcttacacaggtttcagaaaataaatggtttcattttctctaaaataactagtacaaaataaaacagatgtcagttgttgaaaaagcagta

SEQ ID NO: 422354 - DNA, 850 bp, Homo sapiens
cgggctggcgtcgcctggatgcggtttcttccgggatttgtagtttttctggagctacccgggccgtctgttagagggacaagaactacaagtctcggctgccccagcgctgcgagcctggtcacgtggcgggggccgaccgggcgtgcgtgccgccgttgatccggtgctgcagtgagggaggtggttcttgcccgtgttgtgtgtgtgtgtgagtgagagagcgagtgagtgagtgagtgagtgtgtgtgtgggggggactcggcttgttgttgtcggtgacttccccctccccttcaccccttcccctccccgccgccgctgcagtggccgctccctgggccgtaggaaatgagcgataacgatgacatcgaggtggagagcgacgctgacaaacgggctcatcataatgcactggaacgaaaacgtagggaccacatcaaagacagctttcacagtttgcgggactcagtcccatcactccaaggagagaaggcatcccgggcccaaatcctagacaaagccacagaatatatccagtatatgcgaaggaaaaaccacacacaccagcaagatattgacgacctcaagcggcagaatgctcttctggagcagcaagtccgtgcactggagaaggcgaggtcaagtgcccaactgcagaccaactacccctcctcagacaacagcctctacaccaacgccaagggcagcaccatctctgccttcgatgggggctcggactccagctcggagtctgagcctgaagagccccaaagcaggaagaagctccggatggaggccagctaagccactcggggcaggccagcaataaaaactgtctgtctccat

SEQ ID NO: 422355 - DNA, 1062 bp, Homo sapiens
cgggctggcgtcgcctggatgcggtttcttccgggatttgtagtttttctggagctacccgggccgtctgttagagggacaagaactacaagtctcggctgccccagcgctgcgagcctggtcacgtggcgggggccgaccgggcgtgcgtgccgccgttgatccggtgctgcagtgagggaggtggttcttgcccgtgttgtgtgtgtgtgtgagtgagagagcgagtgagtgagtgagtgagtgtgtgtgtgggggggactcggcttgttgttgtcggtgacttccccctccccttcaccccttcccctccccgccgccgctgcagtggccgctccctgggccgtaggaaatgagcgataacgatgacatcgaggtggagagcgacgctgacaaacgggctcatcataatgcactggaacgaaaacgtagggaccacatcaaagacagctttcacagtttgcgggactcagtcccatcactccaaggagagaagctctatttcctcttttggaaattgtgtactcctgtccttcatcgtcaaagtttgatgcagaaatgccacaccttcatttcaagctaccaagtgcacaagaaaaaagaatgcaagatttaaaaaatgattgttttgaccccttacacaaatgtcttactcctggctttaattaagctgcttgagggctgatagctctgccttaccctggtaatcagcaaaatggtcctgtggctggggaggccctggcagcaggaagccttcaaggagccatgggtctgtgctgactctggccttacaaccttccagcctcctttgctggcattgatggggttccatttttgaatgaactagtttaatgtggatccaaatttattgtgcatattctttcgttttggttttcaaaagatggcttattcacatggaaatgtacaccagtttagccctgggccctccctttaccttcatatgtgtaaaagcttacacaggtttcagaaaataaatggtttcattttctctaaaataactagtacaaaataaaacagatgtcagttgttgaaaaagcagta

SEQ ID NO: 422356 - DNA, 635 bp, Homo sapiens
cgggctggcgtcgcctggatgcggtttcttccgggatttgtagtttttctggagctacccgggccgtctgttagagggacaagaactacaagtctcggctgccccagcgctgcgagcctggtcacgtggcgggggccgaccgggcgtgcgtgccgccgttgatccggtgctgcagtgagggaggtggttcttgcccgtgttgtgtgtgtgtgtgagtgagagagcgagtgagtgagtgagtgagtgtgtgtgtgggggggactcggcttgttgttgtcggtgacttccccctccccttcaccccttcccctccccgccgccgctgcagtggccgctccctgggccgtaggaaatgagcgataacgatgacatcgaggtggagagcgacgaagagcaaccgaggtttcaatctgcggctgacaaacgggctcatcataatgcactggaacgaaaacgtagggaccacatcaaagacagctttcacagtttgcgggactcagtcccatcactccaaggagagaagggaacaaagatgaagttaaccctcccacctgtctttccttatgaacacttgccttttccaactgttttctgccatggctaatcagaaaaagtttcttaaggaaatggtggca

SEQ ID NO: 422357 - DNA, 733 bp, Homo sapiens
cgggctggcgtcgcctggatgcggtttcttccgggatttgtagtttttctggagctacccgggccgtctgttagagggacaagaactacaagtctcggctgccccagcgctgcgagcctggtcacgtggcgggggccgaccgggcgtgcgtgccgccgttgatccggtgctgcagtgagggaggtggttcttgcccgtgttgtgtgtgtgtgtgagtgagagagcgagtgagtgagtgagtgagtgtgtgtgtgggggggactcggcttgttgttgtcggtgacttccccctccccttcaccccttcccctccccgccgccgctgcagtggccgctccctgggccgtaggaaatgagcgataacgatgacatcgaggtggagagcgacgaagagcaaccgaggtttcaatctgcggctgacaaacgggctcatcataatgcactggaacgaaaacgtagggaccacatcaaagacagctttcacagtttgcgggactcagtcccatcactccaaggagagaaggtgagtttcctgagaaagctgagtagctggccactactagcttggaacttgttgcagagcttagcagagcactcacctattgggaaggaaatgtagtcagagatattcaggtagcatggttgccttatttttgactgtttggaggatcactgcacaccttacgtactccagtttatccttaacaaaatatgtcagatataatggagctat

SEQ ID NO: 422358 - DNA, 761 bp, Homo sapiens
cgggctggcgtcgcctggatgcggtttcttccgggatttgtagtttttctggagctacccgggccgtctgttagagggacaagaactacaagtctcggctgccccagcgctgcgagcctggtcacgtggcgggggccgaccgggcgtgcgtgccgccgttgatccggtgctgcagtgagggaggtggttcttgcccgtgttgtgtgtgtgtgtgagtgagagagcgagtgagtgagtgagtgagtgtgtgtgtgggggggactcggcttgttgttgtcggtgacttccccctccccttcaccccttcccctccccgccgccgctgcagtggccgctccctgggccgtaggaaatgagcgataacgatgacatcgaggtggagagcgacgctgacaaacgggctcatcataatgcactggaacgaaaacgtagggaccacatcaaagacagctttcacagtttgcgggactcagtcccatcactccaaggagagaaggcatcccgggcccaaatcctagacaaagccacagaatatatccagtatatgcgaaggaaaaaccacacacaccagcaagatattgacgacctcaagcggcagaatgctcttctggagcagcaaggggaaagcgagagctgatcaagttctttgttcctggggaattcacttctcttcctccctcatggaagatgcaagtaaaaggaaatgcaagtaaccacctgggttagaaaacctcaaataaaataaaataaaataaattaaa

SEQ ID NO: 422359 - DNA, 428 bp, Homo sapiens
  misc_feature (4)..(4): n is a, c, g, or t
  misc_feature (38)..(38): n is a, c, g, or t
  misc_feature (42)..(42): n is a, c, g, or t
  misc_feature (141)..(141): n is a, c, g, or t
  misc_feature (170)..(170): n is a, c, g, or t
ccanttcggcaaagaattcacccctgaggtgcaggctncccnggcagaagatgggtgactggagtggccagtgccctgtcctcccagatacccactgagctcactgcccatgatgcagagctttccaaggataggctttantcctgcaagcaatcaaataataaatctantctgctaagagatcacaaaaaagtcagcagcagatcccagtgaagggttttgtgtgtttaggcctcatttctttgtctttttcctactccgttcctggcatttgctgatttctagtgtatactctgtagtctcagttcgtgtttgattccattccatggaaataaaaagtatgttgtacatactgccgaagaattgtcttgcaagttaaggcttccccctttactataagactataaataaaaacttattttatcctt

SEQ ID NO: 422360 - DNA, 2277 bp, Homo sapiens
cgggctggcgtcgcctggatgcggtttcttccgggatttgtagtttttctggagctacccgggccgtctgttagagggacaagaactacaagtctcggctgccccagcgctgcgagcctggtcacgtggcgggggccgaccgggcgtgcgtgccgccgttgatccggtgctgcagtgagggaggtggttcttgcccgtgttgtgtgtgtgtgtgagtgagagagcgagtgagtgagtgagtgagtgtgtgtgtgggggggactcggcttgttgttgtcggtgacttccccctccccttcaccccttcccctccccgccgccgctgcagtggccgctccctgggccgtaggaaatgagcgataacgatgacatcgaggtggagagcgacgaagagcaaccgaggtttcaatctgcggctgacaaacgggctcatcataatgcactggaacgaaaacgtagggaccacatcaaagacagctttcacagtttgcgggactcagtcccatcactccaaggagagaaggcatcccgggcccaaatcctagacaaagccacagaatatatccagtatatgcgaaggaaaaaccacacacaccagcaagatattgacgacctcaagcggcagaatgctcttctggagcagcaaggggaaagcgagagctgatcaagttctttgttcctggggaattcacttctcttcctccctcatggaagatgcaagtaaaaggaaatgcaagtaatccgtgcactggagaaggcgaggtcaagtgcccaactgcagaccaactacccctcctcagacaacagcctctacaccaacgccaagggcagcaccatctctgccttcgatgggggctcggactccagctcggagtctgagcctgaagagccccaaagcaggaagaagctccggatggaggccagctaagccactcggggcaggccagcaataaaaactgtctgtctccatcgtctcatcctcctttcagttcgttggtagagccctcagaaccatttaagagactctttatttttctctttctcccttttttttttaaatttttatttttacgtagaagctcttggacaacagctctcgttctccttccccatttccactgtatattttttaatgtattcccttcagggattccctgtccccaacaggaatttttaaaccaaaacaccccaacttggcagctttttctgtggaggacagacggccggccggacctctgagcacatagtgtcctgcccaccctaccagctcctccagccctgccgggcacatgcccgggggacgcctgccctgcccaggtggcctcctggcccgccctcacctctgatagactttgtgaatctgaactgctctactttgagaagatgaccggtttggagtaatcagaatgaaccctcctcctttttaagggttttttttttttcctttttctaaaaagctatgtatcgctcctattgaaagaccagatccttagagaagtttgtggtataaaaaggaagtggggacagattcgcagcacagagtcgctggcatgtttcactcctgcttctctcagccagctgtttaagcctgcggcgccagcctcacggagggccgtgtgacactctcgtggtatgtatgggagatggcagcagtgaagcagcagccaccagggagtggccatttggggttgggacagggagggtgttttgggtggcatagaggttttgtattgagggccagtgatgatgttttgatatttatttcctgctacttaaatttgaatctgagtgaattgtacctatttctgatgatgtcggtcttgcaaagcgacagattcataaagtaatgatgaaatctttctttcttcccgtgtgtatttctaagaaatagagccaactgattttgtatgtaaataccaagagcaatttacctggtactaaacccgcaccccagtgcggacccttcccagccctcatcccacttcctttcctactgtcctggaacctgtctccattgtgtgatccagccctggttctggctgtggtcagcagatcccagtgaagggttttgtgtgtttaggcctcatttctttgtctttttcctactccgttcctggcatttgctgatttctagtgtatactctgtagtctcagttcgtgtttgattccattccatggaaataaaaagtatgttgtacatactgccgaagaattgtcttgcaagttaaggcttccccctttactataagactataaataaaaacttattttatcctt

SEQ ID NO: 422361 - DNA, 2223 bp, Homo sapiens
cgggctggcgtcgcctggatgcggtttcttccgggatttgtagtttttctggagctacccgggccgtctgttagagggacaagaactacaagtctcggctgccccagcgctgcgagcctggtcacgtggcgggggccgaccgggcgtgcgtgccgccgttgatccggtgctgcagtgagggaggtggttcttgcccgtgttgtgtgtgtgtgtgagtgagagagcgagtgagtgagtgagtgagtgtgtgtgtgggggggactcggcttgttgttgtcggtgacttccccctccccttcaccccttcccctccccgccgccgctgcagtggccgctccctgggccgtaggaaatgagcgataacgatgacatcgaggtggagagcgacgaagagcaaccgaggtttcaatctgcggctgacaaacgggctcatcataatgcactggaacgaaaacgtagggaccacatcaaagacagctttcacagtttgcgggactcagtcccatcactccaaggagagaaggcatcccgggcccaaatcctagacaaagccacagaatatatccagtatatgcgaaggaaaaaccacacacaccagcaagatattgacgacctcaagcggcagaatgctcttctggagcagcaaggggaaagcgagagctgatcaagttctttgttcctggggaattcacttctcttcctccctcatggaagatgcaagtaaaaggaaatgcaagtaatccgtgcactggagaaggcgaggtcaagtgcccaactgcagaccaactacccctcctcagacaacagcctctacaccaacgccaagggcagcaccatctctgccttcgatgggggctcggactccagctcggagtctgagcctgaagagccccaaagcaggaagaagctccggatggaggccagctaagccactcggggcaggccagcaataaaaactgtctgtctccatcgtctcatcctcctttcagttcgttggtagagccctcagaaccatttaagagactctttatttttctctttctcccttttttttttaaatttttatttttacgtagaagctcttggacaacagctctcgttctccttccccatttccactgtatattttttaatgtattcccttcagggattccctgtccccaacaggaatttttaaaccaaaacaccccaacttggcagctttttctgtggaggacagacggccggccggacctctgagcacatagtgtcctgcccaccctaccagctcctccagccctgccgggcacatgcccgggggacgcctgccctgcccaggtggcctcctggcccgccctcacctctgatagactttgtgaatctgaactgctctactttgagaagatgaccggtttggagtaatcagaatgaaccctcctcctttttaagggttttttttttttcctttttctaaaaagctatgtatcgctcctattgaaagaccagatccttagagaagtttgtggtatagcttctctcagccagctgtttaagcctgcggcgccagcctcacggagggccgtgtgacactctcgtggtatgtatgggagatggcagcagtgaagcagcagccaccagggagtggccatttggggttgggacagggagggtgttttgggtggcatagaggttttgtattgagggccagtgatgatgttttgatatttatttcctgctacttaaatttgaatctgagtgaattgtacctatttctgatgatgtcggtcttgcaaagcgacagattcataaagtaatgatgaaatctttctttcttcccgtgtgtatttctaagaaatagagccaactgattttgtatgtaaataccaagagcaatttacctggtactaaacccgcaccccagtgcggacccttcccagccctcatcccacttcctttcctactgtcctggaacctgtctccattgtgtgatccagccctggttctggctgtggtcagcagatcccagtgaagggttttgtgtgtttaggcctcatttctttgtctttttcctactccgttcctggcatttgctgatttctagtgtatactctgtagtctcagttcgtgtttgattccattccatggaaataaaaagtatgttgtacatactgccgaagaattgtcttgcaagttaaggcttccccctttactataagactataaataaaaacttattttatcctt

SEQ ID NO: 422362 - DNA, 1276 bp, Homo sapiens
cgggctggcgtcgcctggatgcggtttcttccgggatttgtagtttttctggagctacccgggccgtctgttagagggacaagaactacaagtctcggctgccccagcgctgcgagcctggtcacgtggcgggggccgaccgggcgtgcgtgccgccgttgatccggtgctgcagtgagggaggtggttcttgcccgtgttgtgtgtgtgtgtgagtgagagagcgagtgagtgagtgagtgagtgtgtgtgtgggggggactcggcttgttgttgtcggtgacttccccctccccttcaccccttcccctccccgccgccgctgcagtggccgctccctgggccgtaggaaatgagcgataacgatgacatcgaggtggagagcgacgaagagcaaccgaggtttcaatctgcggctgacaaacgggctcatcataatgcactggaacgaaaacgtagggaccacatcaaagacagctttcacagtttgcgggactcagtcccatcactccaaggagagaaggcatcccgggcccaaatcctagacaaagccacagaatatatccagtatatgcgaaggaaaaaccacacacaccagcaagatattgacgacctcaagcggcagaatgctcttctggagcagcaagtccgtgcactggagaaggcgaggtcaatggccatttggggttgggacagggagggtgttttgggtggcatagaggttttgtattgagggccagtgatgatgttttgatatttatttcctgctacttaaatttgaatctgagtgaattgtacctatttctgatgatgtcggtcttgcaaagcgacagattcataaagtaatgatgaaatctttctttcttcccgtgtgtatttctaagaaatagagccaactgattttgtatgtaaataccaagagcaatttacctggtactaaacccgcaccccagtgcggacccttcccagccctcatcccacttcctttcctactgtcctggaacctgtctccattgtgtgatccagccctggttctggctgtggtcagcagatcccagtgaagggttttgtgtgtttaggcctcatttctttgtctttttcctactccgttcctggcatttgctgatttctagtgtatactctgtagtctcagttcgtgtttgattccattccatggaaataaaaagtatgttgtacatactgccgaagaattgtcttgcaagttaaggcttccccctttactataagactataaataaaaacttattttatcctt

SEQ ID NO: 422363 - DNA, 877 bp, Homo sapiens
cgggctggcgtcgcctggatgcggtttcttccgggatttgtagtttttctggagctacccgggccgtctgttagagggacaagaactacaagtctcggctgccccagcgctgcgagcctggtcacgtggcgggggccgaccgggcgtgcgtgccgccgttgatccggtgctgcagtgagggaggtggttcttgcccgtgttgtgtgtgtgtgtgagtgagagagcgagtgagtgagtgagtgagtgtgtgtgtgggggggactcggcttgttgttgtcggtgacttccccctccccttcaccccttcccctccccgccgccgctgcagtggccgctccctgggccgtaggaaatgagcgataacgatgacatcgaggtggagagcgacgaagagcaaccgaggtttcaatctgcggctgacaaacgggctcatcataatgcactggaacgaaaacgtagggaccacatcaaagacagctttcacagtttgcgggactcagtcccatcactccaaggagagaaggcatcccgggcccaaatcctagacaaagccacagaatatatccagtatatgcgaaggaaaaaccacacacaccagcaagatattgacgacctcaagcggcagaatgctcttctggagcagcaagtccgtgcactggagaaggcgaggtcaagtgcccaactgcagaccaactacccctcctcagacaacagcctctacaccaacgccaagggcagcaccatctctgccttcgatgggggctcggactccagctcggagtctgagcctgaagagccccaaagcaggaagaagctccggatggaggccagctaagccactcggggcaggccagcaataaaaactgtctgtctccat

SEQ ID NO: 422364 - DNA, 753 bp, Homo sapiens
cgggctggcgtcgcctggatgcggtttcttccgggatttgtagtttttctggagctacccgggccgtctgttagagggacaagaactacaagtctcggctgccccagcgctgcgagcctggtcacgtggcgggggccgaccgggcgtgcgtgccgccgttgatccggtgctgcagtgagggaggtggttcttgcccgtgttgtgtgtgtgtgtgagtgagagagcgagtgagtgagtgagtgagtgtgtgtgtgggggggactcggcttgttgttgtcggtgacttccccctccccttcaccccttcccctccccgccgccgctgcagtggccgctccctgggccgtaggaaatgagcgataacgatgacatcgaggtggagagcgacgaagagcaaccgaggtttcaatctgcggctgacaaacgggctcatcataatgcactggaacgaaaacgtagggaccacatcaaagacagctttcacagtttgcgggactcagtcccatcactccaaggagagaaggcatcccgggcccaaatcctagacaaagccacagaatatatccagtatatgcgaaggaaaaaccacacacaccagcaagatattgacgacctcaagcggcagaatgctcttctggagcagcaaggtgagcacccgagctcgtggggcagctggccctgctgtgctccagccaggtcaggctttggcacctgggcctgcagagtcagagccagtcatggagtatgtgctca

SEQ ID NO: 422365 - DNA, 365 bp, Homo sapiens
tcagaatgttgtctcaaaaccaatagcattagcatggcccaggaccttgttagaaatgcaaattctcaagccccatcccagatctacttaaaaattaagagatctgaatttgaaccagccctctgagtctgggcttggcaaacactgagcctgagggtcaaaccctgcgtgctatttcccttttacaaataagctaaagggaatctaggccagatgtagtggctcatgcctgtaaccccaacactttgcagggccgaggcagaattgcttggggccaagaatttgagaccagcctgggcaacttagcaagaacttatctctacaaaaaatgaaaaaaaaattagctaggatgtggtggcatatgc

SEQ ID NO: 422366 - DNA, 525 bp, Homo sapiens
caaagtgttgggattacaggtgtgagccaccgcaccctgcctagaaactattttaatagaagcaaatagtgcctgaatggtgggcgtctgttagcgagatggtgaactggcagatggcgcctgtgtgtcaatgcccatggccaccgtcctgctttcagacaccagttctcttccaggtaaccttctggcattttggggtttgagataccatttcctaaaggtgaattatcacaaaatactagaaataaccacataagtgtttaaaattattgttaaatacagtaagaaattcttcttcaaaagtttagcctgcttaagtttccttgtcctttgtttcctgctttcaaggccagacttccttactctctgtgtttcccctaccctggtaaacaaccttcctgccagtccttacccatacagcccacattccacatctgctacccactctgtgatttacctctcccgtcgcaatagcctctcccaccaaaactgatcttcccgccttcccaccagtgcaaccacatt

SEQ ID NO: 422367 - DNA, 598 bp, Homo sapiens
catcaccaccaccgggttcaaacaaagcagcattctcctgtgtcttttcctcataagtaagaacaaggtagcacattcatttttccattagtgcatttcaattcttttcctgcaagttgcattgctattgcttttctgaattgcttgatgatgaactgtgaagctgatgcttagctgcttgtgaaacttttcttaaaggaactgggtctaagaagcacacatacattaccctcaacaacctcaggtatcaagaagaggaccacactgctaacatgggtaatcctataacctggcttttcttgtggaactttgtaatttctataaaataccgccagctttgcgtattccactgagccccaacttagatatcagacgctagtgagtcctgcctattcaggaagctacgtattattcagcataatactgcccttttttttgataactggctttcaaatgggataatctcaagagaggtttcattgtatcctcttagagcgtatggatttaaatagagcctttcaaaaaaatagatgaaaacctacatctctaatatatttcctacttgggccttttgagcatattctgggcacatagagag

SEQ ID NO: 422368 - DNA, 590 bp, Homo sapiens
ctgggattacaggtgcccgccaccgtatctggctaattttgtatttttggtagagacgaggtttcgccatgtttcccaggctgatctcgaactcctgacctcaagtgatccacccgtcctggactcccaaagtgctgagattacaggcatgagctactgtgcctgaccttgaagcttctttctgactgatagagatgaggaggggagaaaactgtcttctcacatcaccacaattgataaatgtatcctggcatcccgtctctgagatctggcccttctgatgttccccaccaactgggctcaccttatgttgtctgctagcttctgtttggctcactggggaatattgacaaactgggaagtgtcattcctacgtgacctgtttttctttctgtttctttttagctgagattggggattttgatgaagccttggacagagagcacttagcaaaaaataaatacatacctcagcaagacgcactagaggacaaaatcgtggcctggtcacagcatgcatccctggcatacacctttcctagataaaccctgctccgagtgatagctgttccccgatcaaagctgtgtacc

SEQ ID NO: 422369 - DNA, 5682 bp, Homo sapiens
acgcggccgctgcccgctttgcgccgctcctccctgcgcgagtagcgctggccccggcgtcgaggcggccatggcgacccggagcccgctccccacccaccccgcctgctccgccctcccctccgccccgcgccacctttgatggctcggacctcagccggccaccgccagccctgctcgcgcgcccgcgccgccgccgcccgcgggtattaatagccggcgccgccgcgccctcggccgccgggggcttgggagccgccgatcccggagcccgagccgggagagggagccgccgcagccgccggcgctgtggagatattctctaagccgctttcatcatgggagaaatagagcagaggccgaccccaggatcacgactgggggccccggaaaattcggggatcagtaccttggaacgtggacagaagccgcccccaacaccttcaggaaaactcgtgtccatcaaaatccagatgctggatgacacccaggaggcatttgaagttccacaaagagctcctgggaaggtgctgctggatgcagtttgcaaccacctcaacctcgtggaaggtgactattttggcctcgagtttcctgatcacaaaaagatcacggtgtggctggatctcctaaaacccattgtgaaacagattagaaggccaaagcacgttgttgttaagtttgtggtgaaattctttccgcctgaccacacacaactccaagaagaactcacaaggtacctgttcgcgctgcaggtgaagcaggacttggctcaaggcaggttgacgtgtaatgacaccagcgcagctctcttgatttcacacattgtgcaatctgagattggggattttgatgaagccttggacagagagcacttagcaaaaaataaatacatacctcagcaagacgcactagaggacaaaatcgtggaatttcaccataaccacattggacaaacaccagcagaatcagatttccagctcctagagattgcccgtcggctagagatgtatggaatccggttgcacccggccaaggacagggaaggcacgaagatcaatctggccgttgccaacacgggaattctagtgtttcagggtttcactaagatcaatgccttcaactgggccaaggtgcggaagctgagcttcaagaggaagcgctttctcatcaagctccggccagatgccaatagtgcgtaccaggataccttggaattcctgatggccagtcgggatttctgcaagtccttctggaaaatctgtgttgaacatcatgccttctttagactttttgaagagcccaaaccaaagcccaagcccgtcctctttagccgggggtcatcatttcggttcagtggtcggactcagaagcaggttctcgactatgttaaagaaggaggacataagaaggtgcagtttgaaaggaagcacagcaagattcattctatccggagccttgcttcacagcctacagaactgaattcggaagtgctggagcagtctcagcagagcaccagccttacatttggagaaggtgccgaatctccagggggccagagctgccggcgaggaaaggaaccgaaggtttccgccggggagccggggtcgcacccgagccctgcgccgaggagaagccccgcgggtaacaagcaggcggacggagccgcctcggcgcccacggaggaagaggaggaggtcgttaaggataggacccagcagagtaaacctcagcccccgcagccaagcacaggctccctgactggcagtcctcacctttccgagctgtctgtgaactcgcaggggggagtggcccctgccaacgtgaccttgtctcccaacctgagccccgacaccaagcaggcctctcccttgatcagcccgctgctgaatgaccaggcctgcccccggacggacgatgaggatgagggccggaggaagagattcccaactgataaagcgtacttcatagctaaggaagtgtctaccaccgagcgaacatatctgaaggatctcgaagttatcacttcgtggtttcagagcacagtgagcaaagaggacgccatgccggaagcactgaaaagtctcatattcccgaattttgaacctttgcacaaatttcatactaattttctcaaggaaattgagcaacgacttgccctgtgggaaggccgctcaaatgcccaaatcagagattaccaaagaatcggcgatgtcatgctgaagaacattcagggcatgaagcacctggcggctcacctgtggaagcacagcgaggccttggaggccctggagaatggaatcaagagctcccggcggctggagaacttctgcagagactttgagctgcagaaggtgtgttacctaccgctcaacaccttcctcctgcggccactgcaccggctcatgcactacaagcaggtcctggagcggctgtgcaaacaccacccgccgagccacgccgacttcagggactgccgagccgctttggcagagatcacggagatggtggcacagctccacggtacgatgatcaagatggagaatttccagaagctgcacgaactcaagaaagatttgattggcattgacaatcttgtggttccgggaagggagttcatccgtctgggcagcctcagcaagctctcggggaaggggctccagcagcgcatgttcttcctgttcaacgacgtcctgctatacacgagccgggggctgacggcctccaatcagtttaaagtccacgggcagctcccgctctatggcatgacgattgaggagagcgaagacgagtggggggtgccccactgcctgaccctccggggccagcggcagtccatcatcgtggccgccagttctcggtccgagatggagaagtgggttgaggacatccagatggccattgacctggcggagaagagcagcagccccgcccctgagttcctggccagcagcccccctgacaacaagtcccctgatgaagccaccgcggctgaccaggagtcagaggatgacctgagcgcctcgcgcacatcgctggagcgccaggccccgcaccgcggcaacacaatggtgcacgtgtgctggcaccgcaacaccagcgtctccatggtggacttcagcatcgcagtggagaatcagttgtctggaaacctgctgaggaaattcaaaaacagcaacgggtggcagaagctgtgggtggtgttcacaaacttctgcctgttcttctacaaatcacaccaggacaatcatccccttgccagcctgcctctgctcggctactcgctcaccatcccctctgagtccgagaacatccagaaagactacgtgttcaagctgcacttcaagtcccacgtctactacttcagggcggaaagcgagtacacgttcgaaaggtggatggaagtgatccgcagtgccaccagctctgcctcgcgaccccacgtgttgagccacaaagagtctcttgtgtattgatggccggacacactcgtttccgcagtggctgctttcctggaagacgtttcctttcttctgtattaatgaagcctggtaaaattaacacctgtctgaaaatcaaaaacatggcttcccagcagctctcctgtctccacagccgcgttttttaaccccgacctctcagcgtctgaatgaacagcgctcccacctccagtcctggcatccgctgggggcgctgttctttagctagtgccagtattaaaacattgtcattacgagagtgccaaatgacatcttccctccaccctgcccctgaaaaacagtacacacacatccgttcaacacaagacagggcaagtgtttttcttcctaaaaaaagttctttcttttattattttcacctattggctgctgcattttacgaagtggacttcccggtgtttgttgtttgtttgcaatacactcagtgcagccttaagcaaatgagatcattttcagatttcatttttttttttcagtctttctacttttgtaataataggaagttagtaggactcacttctctgattaataagcaatttgcagcacacagcgttccactgcggggtttcacgctcacctgaaaacacctgttcccaacctacttcttggtgcaagttgaccaaatcgttttaagtgggtaactctttccaaccgtagcagggttgttttctgttaagcaaagccgagatccagtgcaatacctggactgtcaccgtcctgtgagtggtgtacacaatgggaagataataagccgtggtgttttgctgtctgtctgtgtcacaagcatgaaaacccgtgtgtcattgatcagcaccatttgtggtatgttccgtgatgagcgtttagtgagcctgctggctgcagagcactatgaaatcatggtacgtagtccccggcacctgtcgttattcctatatcctcctgcaactgtggtttgaaactgcgcattctctagtagtatatatcgtgcctgtcttcaaaaacatttccctttttatactcattccccccaggcatggggtagtgtcagtcggactgcacagggaacacggtttccagtggctttggcccctactcgggaaacgtctgcctgttctcgatggtgatggggtggctgccattcccttggttttcctaagccctttctaacgagagtctcaaacaagcggaggcgagggccaattcaaccccattctttccagcgccccgcaccatagcacctgcccacctgagaaccaggaacgcaccctctctgtggagctctgactggtgtagctggaaacaaacagcaacttgcaaacggacgaagagcctgccgtgtgttaatcatttgccttacaagatgtaccagacggtttccagtactaacaaagggaataaaaatacctcacgccacaatccagcatattgatgttttaaggcaaaacaaaaaaaaaccaaaaaacaaaacaagaaaaacaaaaacgggtgggggtgggccgaaaaatttacccctcgttggggcgcgccaatgtatgcaccggccagggcaggacacgggccgaaagggggtcccaaaaacgggccggtgaacctgggtgggctggcacaggcggacacacccccgccgcacagaacaagaacacaacgtaagcaacgtacctgttcttacgctcttcgaacgacgacggcacaagataccaacagcaaatacaaagagagcaaaataacacaaccaacagacaaaacaagaaccacagacaacctacggaaccaacacgtaacagcgaagaagaaacgaaacaaccagagagacacaaacaacacagacacaagaacacaaactagaagaaccacaatgagcgaagcgagcagcgagggcacacgccaggggccgaacacaaggaacggccgagacagcgaaacaagaagggcaggaacagagcaacggaagacacataggagaacgcaagagagacgcaacaagaacgcaaacaagaccgagtagcaggaagacaacaagaaaagtggaaaaaggcgaaaaaaacgcgaaaagaaaaaaagagaaaaaacgccggaaaaaacacaaaaaacaacgcagaagacaaccaagaacaaacagtcaaagaacaaagaaacaagagcaacaaacagaaaacgaacaagaaacagaagaagcacaagaacacggagaaaaccagca

SEQ ID NO: 422370 - DNA, 5432 bp, Homo sapiens
cactccagcctgggtgacagagtgagacgggagagggagccgccgcagccgccggcgctgtggagatattctctaagccgctttcatcatgggagaaatagagcagaggccgaccccaggatcacgactgggggccccggaaaattcggggatcagtaccttggaacgtggacagaagccgcccccaacaccttcaggaaaactcgtgtccatcaaaatccagatgctggatgacacccaggaggcatttgaagttccacaaagagctcctgggaaggtgctgctggatgcagtttgcaaccacctcaacctcgtggaaggtgactattttggcctcgagtttcctgatcacaaaaagatcacggtgtggctggatctcctaaaacccattgtgaaacagattagaaggccaaagcacgttgttgttaagtttgtggtgaaattctttccgcctgaccacacacaactccaagaagaactcacaaggtacctgttcgcgctgcaggtgaagcaggacttggctcaaggcaggttgacgtgtaatgacaccagcgcagctctcttgatttcacacattgtgcaatctgagattggggattttgatgaagccttggacagagagcacttagcaaaaaataaatacatacctcagcaagacgcactagaggacaaaatcgtggaatttcaccataaccacattggacaaacaccagcagaatcagatttccagctcctagagattgcccgtcggctagagatgtatggaatccggttgcacccggccaaggacagggaaggcacgaagatcaatctggccgttgccaacacgggaattctagtgtttcagggtttcactaagatcaatgccttcaactgggccaaggtgcggaagctgagcttcaagaggaagcgctttctcatcaagctccggccagatgccaatagtgcgtaccaggataccttggaattcctgatggccagtcgggatttctgcaagtccttctggaaaatctgtgttgaacatcatgccttctttagactttttgaagagcccaaaccaaagcccaagcccgtcctctttagccgggggtcatcatttcggttcagtggtcggactcagaagcaggttctcgactatgttaaagaaggaggacataagaaggtgcagtttgaaaggaagcacagcaagattcattctatccggagccttgcttcacagcctacagaactgaattcggaagtgctggagcagtctcagcagagcaccagccttacatttggagaaggtgccgaatctccagggggccagagctgccggcgaggaaaggaaccgaaggtttccgccggggagccggggtcgcacccgagccctgcgccgaggagaagccccgcgggtaacaagcaggcggacggagccgcctcggcgcccacggaggaagaggaggaggtcgttaaggataggacccagcagagtaaacctcagcccccgcagccaagcacaggctccctgactggcagtcctcacctttccgagctgtctgtgaactcgcaggggggagtggcccctgccaacgtgaccttgtctcccaacctgagccccgacaccaagcaggcctctcccttgatcagcccgctgctgaatgaccaggcctgcccccggacggacgatgaggatgagggccggaggaagagattcccaactgataaagcgtacttcatagctaaggaagtgtctaccaccgagcgaacatatctgaaggatctcgaagttatcacttcgtggtttcagagcacagtgagcaaagaggacgccatgccggaagcactgaaaagtctcatattcccgaattttgaacctttgcacaaatttcatactaattttctcaaggaaattgagcaacgacttgccctgtgggaaggccgctcaaatgcccaaatcagagattaccaaagaatcggcgatgtcatgctgaagaacattcagggcatgaagcacctggcggctcacctgtggaagcacagcgaggccttggaggccctggagaatggaatcaagagctcccggcggctggagaacttctgcagagactttgagctgcagaaggtgtgttacctaccgctcaacaccttcctcctgcggccactgcaccggctcatgcactacaagcaggtcctggagcggctgtgcaaacaccacccgccgagccacgccgacttcagggactgccgagccgctttggcagagatcacggagatggtggcacagctccacggtacgatgatcaagatggagaatttccagaagctgcacgaactcaagaaagatttgattggcattgacaatcttgtggttccgggaagggagttcatccgtctgggcagcctcagcaagctctcggggaaggggctccagcagcgcatgttcttcctgttcaacgacgtcctgctatacacgagccgggggctgacggcctccaatcagtttaaagtccacgggcagctcccgctctatggcatgacgattgaggagagcgaagacgagtggggggtgccccactgcctgaccctccggggccagcggcagtccatcatcgtggccgccagttctcggtccgagatggagaagtgggttgaggacatccagatggccattgacctggcggagaagagcagcagccccgcccctgagttcctggccagcagcccccctgacaacaagtcccctgatgaagccaccgcggctgaccaggagtcagaggatgacctgagcgcctcgcgcacatcgctggagcgccaggccccgcaccgcggcaacacaatggtgcacgtgtgctggcaccgcaacaccagcgtctccatggtggacttcagcatcgcagtggagaatcagttgtctggaaacctgctgaggaaattcaaaaacagcaacgggtggcagaagctgtgggtggtgttcacaaacttctgcctgttcttctacaaatcacaccaggacaatcatccccttgccagcctgcctctgctcggctactcgctcaccatcccctctgagtccgagaacatccagaaagactacgtgttcaagctgcacttcaagtcccacgtctactacttcagggcggaaagcgagtacacgttcgaaaggtggatggaagtgatccgcagtgccaccagctctgcctcgcgaccccacgtgttgagccacaaagagtctcttgtgtattgatggccggacacactcgtttccgcagtggctgctttcctggaagacgtttcctttcttctgtattaatgaagcctggtaaaattaacacctgtctgaaaatcaaaaacatggcttcccagcagctctcctgtctccacagccgcgttttttaaccccgacctctcagcgtctgaatgaacagcgctcccacctccagtcctggcatccgctgggggcgctgttctttagctagtgccagtattaaaacattgtcattacgagagtgccaaatgacatcttccctccaccctgcccctgaaaaacagtacacacacatccgttcaacacaagacagggcaagtgtttttcttcctaaaaaaagttctttcttttattattttcacctattggctgctgcattttacgaagtggacttcccggtgtttgttgtttgtttgcaatacactcagtgcagccttaagcaaatgagatcattttcagatttcatttttttttttcagtctttctacttttgtaataataggaagttagtaggactcacttctctgattaataagcaatttgcagcacacagcgttccactgcggggtttcacgctcacctgaaaacacctgttcccaacctacttcttggtgcaagttgaccaaatcgttttaagtgggtaactctttccaaccgtagcagggttgttttctgttaagcaaagccgagatccagtgcaatacctggactgtcaccgtcctgtgagtggtgtacacaatgggaagataataagccgtggtgttttgctgtctgtctgtgtcacaagcatgaaaacccgtgtgtcattgatcagcaccatttgtggtatgttccgtgatgagcgtttagtgagcctgctggctgcagagcactatgaaatcatggtacgtagtccccggcacctgtcgttattcctatatcctcctgcaactgtggtttgaaactgcgcattctctagtagtatatatcgtgcctgtcttcaaaaacatttccctttttatactcattccccccaggcatggggtagtgtcagtcggactgcacagggaacacggtttccagtggctttggcccctactcgggaaacgtctgcctgttctcgatggtgatggggtggctgccattcccttggttttcctaagccctttctaacgagagtctcaaacaagcggaggcgagggccaattcaaccccattctttccagcgccccgcaccatagcacctgcccacctgagaaccaggaacgcaccctctctgtggagctctgactggtgtagctggaaacaaacagcaacttgcaaacggacgaagagcctgccgtgtgttaatcatttgccttacaagatgtaccagacggtttccagtactaacaaagggaataaaaatacctcacgccacaatccagcatattgatgttttaaggcaaaacaaaaaaaaaccaaaaaacaaaacaagaaaaacaaaaacgggtgggggtgggccgaaaaatttacccctcgttggggcgcgccaatgtatgcaccggccagggcaggacacgggccgaaagggggtcccaaaaacgggccggtgaacctgggtgggctggcacaggcggacacacccccgccgcacagaacaagaacacaacgtaagcaacgtacctgttcttacgctcttcgaacgacgacggcacaagataccaacagcaaatacaaagagagcaaaataacacaaccaacagacaaaacaagaaccacagacaacctacggaaccaacacgtaacagcgaagaagaaacgaaacaaccagagagacacaaacaacacagacacaagaacacaaactagaagaaccacaatgagcgaagcgagcagcgagggcacacgccaggggccgaacacaaggaacggccgagacagcgaaacaagaagggcaggaacagagcaacggaagacacataggagaacgcaagagagacgcaacaagaacgcaaacaagaccgagtagcaggaagacaacaagaaaagtggaaaaaggcgaaaaaaacgcgaaaagaaaaaaagagaaaaaacgccggaaaaaacacaaaaaacaacgcagaagacaaccaagaacaaacagtcaaagaacaaagaaacaagagcaacaaacagaaaacgaacaagaaacagaagaagcacaagaacacggagaaaaccagca

SEQ ID NO: 422371 - DNA, 5361 bp, Homo sapiens
acgcggccgctgcccgctttgcgccgctcctccctgcgcgagtagcgctggccccggcgtcgaggcggccatggcgacccggagcccgctccccacccaccccgcctgctccgccctcccctccgccccgcgccacctttgatggctcggacctcagccggccaccgccagccctgctcgcgcgcccgcgccgccgccgcccgcgggtattaatagccggcgccgccgcgccctcggccgccgggggcttgggagccgccgatcccggagcccgagccgggagagggagccgccgcagccgccggcgctgtggagatattctctaagccgctttcatcatgggagaaatagagcagaggccgaccccaggatcacgactgggggccccggaaaattcggggatcagtaccttggaacgtggacagaagccgcccccaacaccttcaggaaaactcgtgtccatcaaaatccagatgctggatgacacccaggaggcatttgaagttccacaaagagctcctgggaaggtgctgctggatgcagtttgcaaccacctcaacctcgtggaaggtgactattttggcctcgagtttcctgatcacaaaaagatcacggtgtggctggatctcctaaaacccattgtgaaacagattagaaggccaaagcacgttgttgttaagtttgtggtgaaattctttccgcctgaccacacacaactccaagaagaactcacaaggtacctgttcgcgctgcaggtgaagcaggacttggctcaaggcaggttgacgtgtaatgacaccagcgcagctctcttgatttcacacattgtgcaatctgagattggggattttgatgaagccttggacagagagcacttagcaaaaaataaatacatacctcagcaagacgcactagaggacaaaatcgtggaatttcaccataaccacattggacaaacaccagcagaatcagatttccagctcctagagattgcccgtcggctagagatgtatggaatccggttgcacccggccaaggacagggaaggcacgaagatcaatctggccgttgccaacacgggaattctagtgtttcagggtttcactaagatcaatgccttcaactgggccaaggtgcggaagctgagcttcaagaggaagcgctttctcatcaagctccggccagatgccaatagtgcgtaccaggataccttggaattcctgatggccagtcgggatttctgcaagtccttctggaaaatctgtgttgaacatcatgccttctttagactttttgaagagcccaaaccaaagcccaagcccgtcctctttagccgggggtcatcatttcggttcagtggtcggactcagaagcaggttctcgactatgttaaagaaggaggacataagaaggtgcagtttgaaaggaagcacagcaagattcattctatccggagccttgcttcacagcctacagaactgaattcggaagtgctggagcagtctcagcagagcaccagccttacatttggagaaggtgccgaatctccagggggccagagctgccggcgaggaaaggaaccgaaggtttccgccggggagccggggtcgcacccgagccctgcgccgaggagaagccccgcgggtaacaagcaggcggacggagccgcctcggcgcccacggaggaagaggaggaggtcgttaaggataggacccagcagagtaaacctcagcccccgcagccaagcacaggctccctgactggcagtcctcacctttccgagctgtctgtgaactcgcaggggggagtggcccctgccaacgtgaccttgtctcccaacctgagccccgacaccaagcaggcctctcccttgatcagcccgctgctgaatgaccaggcctgcccccggacggacgatgaggatgagggccggaggaagagattcccaactgataaagcgtacttcatagctaaggaagtgtctaccaccgagcgaacatatctgaaggatctcgaagttatcacttcgtggtttcagagcacagtgagcaaagaggacgccatgccggaagcactgaaaagtctcatattcccgaattttgaacctttgcacaaatttcatactaattttctcaaggaaattgagcaacgacttgccctgtgggaaggccgctcaaatgcccaaatcagagattaccaaagaatcggcgatgtcatgctgaagaacattcagggcatgaagcacctggcggctcacctgtggaagcacagcgaggccttggaggccctggagaatggaatcaagagctcccggcggctggagaacttctgcagagactttgagctgcagaaggtgtgttacctaccgctcaacaccttcctcctgcggccactgcaccggctcatgcactacaagcaggtcctggagcggctgtgcaaacaccacccgccgagccacgccgacttcagggactgccgagccgctttggcagagatcacggagatggtggcacagctccacggtacgatgatcaagatggagaatttccagaagctgcacgaactcaagaaagatttgattggcattgacaatcttgtggttccgggaagggagttcatccgtctgggcagcctcagcaagctctcggggaaggggctccagcagcgcatgttcttcctgttcaacgacgtcctgctatacacgagccgggggctgacggcctccaatcagtttaaagtccacgggcagctcccgctctatggcatgacgattgaggagagcgaagacgagtggggggtgccccactgcctgaccctccggggccagcggcagtccatcatcgtggccgccagttctcggtccgagatggagaagtgggttgaggacatccagatggccattgacctggcggagaagagcagcagccccgcccctgagttcctggccagcagcccccctgacaacaagtcccctgatgaagccaccgcggctgaccaggagtcagaggatgacctgagcgcctcgcgcacatcgctggagcgccaggccccgcaccgcggcaacacaatggtgcacgtgtgctggcaccgcaacaccagcgtctccatggtggacttcagcatcgcagtggagaatcagttgtctggaaacctgctgaggaaattcaaaaacagcaacgggtggcagaagctgtgggtggtgttcacaaacttctgcctgttcttctacaaatcacaccaggacaatcatccccttgccagcctgcctctgctcggctactcgctcaccatcccctctgagtccgagaacatccagaaagactacgtgttcaagctgcacttcaagtcccacgtctactacttcagggcggaaagcgagtacacgttcgaaaggtggatggaagtgatccgcagtgccaccagctctgcctcgcgaccccacgtgttgagccacaaagagtctcttgtgtattgatggccggacacactcgtttccgcagtggctgctttcctggaagacgtttcctttcttctgtattaatgaagcctggtaaaattaacacctgtctgaaaatcaaaaacatggcttcccagcagctctcctgtctccacagccgcgttttttaaccccgacctctcagcgtctgaatgaacagcgctcccacctccagtcctggcatccgctgggggcgctgttctttagctagtgccagtattaaaacattgtcattacgagagtgccaaatgacatcttccctccaccctgcccctgaaaaacagtacacacacatccgttcaacacaagacagggcaagtgtttttcttcctaaaaaaagttctttcttttattattttcacctattggctgctgcattttacgaagtggacttcccggtgtttgttgtttgtttgcaatacactcagtgcagccttaagcaaatgagatcattttcagatttcatttttttttttcagtctttctacttttgtaataataggaagttagtaggactcacttctctgattaataagcaatttgcagcacacagcgttccactgcggggtttcacgctcacctgaaaacacctgttcccaacctacttcttggtgcaagttgaccaaatcgttttaagtgggtaactctttccaaccgtagcagggttgttttctgttaagcaaagccgagatccagtgcaatacctggactgtcaccgtcctgtgagtggtgtacacaatgggaagataataagccgtggtgttttgctgtctgtctgtgtcacaagcatgaaaacccgtgtgtcattgatcagcaccatttgtggtatgttccgtgatgagcgtttagtgagcctgctggctgcagagcactatgaaatcatgcgccccgcaccatagcacctgcccacctgagaaccaggaacgcaccctctctgtggagctctgactggtgtagctggaaacaaacagcaacttgcaaacggacgaagagcctgccgtgtgttaatcatttgccttacaagatgtaccagacggtttccagtactaacaaagggaataaaaatacctcacgccacaatccagcatattgatgttttaaggcaaaacaaaaaaaaaccaaaaaacaaaacaagaaaaacaaaaacgggtgggggtgggccgaaaaatttacccctcgttggggcgcgccaatgtatgcaccggccagggcaggacacgggccgaaagggggtcccaaaaacgggccggtgaacctgggtgggctggcacaggcggacacacccccgccgcacagaacaagaacacaacgtaagcaacgtacctgttcttacgctcttcgaacgacgacggcacaagataccaacagcaaatacaaagagagcaaaataacacaaccaacagacaaaacaagaaccacagacaacctacggaaccaacacgtaacagcgaagaagaaacgaaacaaccagagagacacaaacaacacagacacaagaacacaaactagaagaaccacaatgagcgaagcgagcagcgagggcacacgccaggggccgaacacaaggaacggccgagacagcgaaacaagaagggcaggaacagagcaacggaagacacataggagaacgcaagagagacgcaacaagaacgcaaacaagaccgagtagcaggaagacaacaagaaaagtggaaaaaggcgaaaaaaacgcgaaaagaaaaaaagagaaaaaacgccggaaaaaacacaaaaaacaacgcagaagacaaccaagaacaaacagtcaaagaacaaagaaacaagagcaacaaacagaaaacgaacaagaaacagaagaagcacaagaacacggagaaaaccagca

SEQ ID NO: 422372 - DNA, 5789 bp, Homo sapiens
acgcggccgctgcccgctttgcgccgctcctccctgcgcgagtagcgctggccccggcgtcgaggcggccatggcgacccggagcccgctccccacccaccccgcctgctccgccctcccctccgccccgcgccacctttgatggctcggacctcagccggccaccgccagccctgctcgcgcgcccgcgccgccgccgcccgcgggtattaatagccggcgccgccgcgccctcggccgccgggggcttgggagccgccgatcccggagcccgagccgggagagggagccgccgcagccgccggcgctgtggagatggagtcttgctcttgttgcccaggctggagtgcaatggcgtgatctcagctcaccgcaacctccacctcccaggttcaagcgattctcctgtctcgacttcccagatattctctaagccgctttcatcatgggagaaatagagcagaggccgaccccaggatcacgactgggggccccggaaaattcggggatcagtaccttggaacgtggacagaagccgcccccaacaccttcaggaaaactcgtgtccatcaaaatccagatgctggatgacacccaggaggcatttgaagttccacaaagagctcctgggaaggtgctgctggatgcagtttgcaaccacctcaacctcgtggaaggtgactattttggcctcgagtttcctgatcacaaaaagatcacggtgtggctggatctcctaaaacccattgtgaaacagattagaaggccaaagcacgttgttgttaagtttgtggtgaaattctttccgcctgaccacacacaactccaagaagaactcacaaggtacctgttcgcgctgcaggtgaagcaggacttggctcaaggcaggttgacgtgtaatgacaccagcgcagctctcttgatttcacacattgtgcaatctgagattggggattttgatgaagccttggacagagagcacttagcaaaaaataaatacatacctcagcaagacgcactagaggacaaaatcgtggaatttcaccataaccacattggacaaacaccagcagaatcagatttccagctcctagagattgcccgtcggctagagatgtatggaatccggttgcacccggccaaggacagggaaggcacgaagatcaatctggccgttgccaacacgggaattctagtgtttcagggtttcactaagatcaatgccttcaactgggccaaggtgcggaagctgagcttcaagaggaagcgctttctcatcaagctccggccagatgccaatagtgcgtaccaggataccttggaattcctgatggccagtcgggatttctgcaagtccttctggaaaatctgtgttgaacatcatgccttctttagactttttgaagagcccaaaccaaagcccaagcccgtcctctttagccgggggtcatcatttcggttcagtggtcggactcagaagcaggttctcgactatgttaaagaaggaggacataagaaggtgcagtttgaaaggaagcacagcaagattcattctatccggagccttgcttcacagcctacagaactgaattcggaagtgctggagcagtctcagcagagcaccagccttacatttggagaaggtgccgaatctccagggggccagagctgccggcgaggaaaggaaccgaaggtttccgccggggagccggggtcgcacccgagccctgcgccgaggagaagccccgcgggtaacaagcaggcggacggagccgcctcggcgcccacggaggaagaggaggaggtcgttaaggataggacccagcagagtaaacctcagcccccgcagccaagcacaggctccctgactggcagtcctcacctttccgagctgtctgtgaactcgcaggggggagtggcccctgccaacgtgaccttgtctcccaacctgagccccgacaccaagcaggcctctcccttgatcagcccgctgctgaatgaccaggcctgcccccggacggacgatgaggatgagggccggaggaagagattcccaactgataaagcgtacttcatagctaaggaagtgtctaccaccgagcgaacatatctgaaggatctcgaagttatcacttcgtggtttcagagcacagtgagcaaagaggacgccatgccggaagcactgaaaagtctcatattcccgaattttgaacctttgcacaaatttcatactaattttctcaaggaaattgagcaacgacttgccctgtgggaaggccgctcaaatgcccaaatcagagattaccaaagaatcggcgatgtcatgctgaagaacattcagggcatgaagcacctggcggctcacctgtggaagcacagcgaggccttggaggccctggagaatggaatcaagagctcccggcggctggagaacttctgcagagactttgagctgcagaaggtgtgttacctaccgctcaacaccttcctcctgcggccactgcaccggctcatgcactacaagcaggtcctggagcggctgtgcaaacaccacccgccgagccacgccgacttcagggactgccgagccgctttggcagagatcacggagatggtggcacagctccacggtacgatgatcaagatggagaatttccagaagctgcacgaactcaagaaagatttgattggcattgacaatcttgtggttccgggaagggagttcatccgtctgggcagcctcagcaagctctcggggaaggggctccagcagcgcatgttcttcctgttcaacgacgtcctgctatacacgagccgggggctgacggcctccaatcagtttaaagtccacgggcagctcccgctctatggcatgacgattgaggagagcgaagacgagtggggggtgccccactgcctgaccctccggggccagcggcagtccatcatcgtggccgccagttctcggtccgagatggagaagtgggttgaggacatccagatggccattgacctggcggagaagagcagcagccccgcccctgagttcctggccagcagcccccctgacaacaagtcccctgatgaagccaccgcggctgaccaggagtcagaggatgacctgagcgcctcgcgcacatcgctggagcgccaggccccgcaccgcggcaacacaatggtgcacgtgtgctggcaccgcaacaccagcgtctccatggtggacttcagcatcgcagtggagaatcagttgtctggaaacctgctgaggaaattcaaaaacagcaacgggtggcagaagctgtgggtggtgttcacaaacttctgcctgttcttctacaaatcacaccaggacaatcatccccttgccagcctgcctctgctcggctactcgctcaccatcccctctgagtccgagaacatccagaaagactacgtgttcaagctgcacttcaagtcccacgtctactacttcagggcggaaagcgagtacacgttcgaaaggtggatggaagtgatccgcagtgccaccagctctgcctcgcgaccccacgtgttgagccacaaagagtctcttgtgtattgatggccggacacactcgtttccgcagtggctgctttcctggaagacgtttcctttcttctgtattaatgaagcctggtaaaattaacacctgtctgaaaatcaaaaacatggcttcccagcagctctcctgtctccacagccgcgttttttaaccccgacctctcagcgtctgaatgaacagcgctcccacctccagtcctggcatccgctgggggcgctgttctttagctagtgccagtattaaaacattgtcattacgagagtgccaaatgacatcttccctccaccctgcccctgaaaaacagtacacacacatccgttcaacacaagacagggcaagtgtttttcttcctaaaaaaagttctttcttttattattttcacctattggctgctgcattttacgaagtggacttcccggtgtttgttgtttgtttgcaatacactcagtgcagccttaagcaaatgagatcattttcagatttcatttttttttttcagtctttctacttttgtaataataggaagttagtaggactcacttctctgattaataagcaatttgcagcacacagcgttccactgcggggtttcacgctcacctgaaaacacctgttcccaacctacttcttggtgcaagttgaccaaatcgttttaagtgggtaactctttccaaccgtagcagggttgttttctgttaagcaaagccgagatccagtgcaatacctggactgtcaccgtcctgtgagtggtgtacacaatgggaagataataagccgtggtgttttgctgtctgtctgtgtcacaagcatgaaaacccgtgtgtcattgatcagcaccatttgtggtatgttccgtgatgagcgtttagtgagcctgctggctgcagagcactatgaaatcatggtacgtagtccccggcacctgtcgttattcctatatcctcctgcaactgtggtttgaaactgcgcattctctagtagtatatatcgtgcctgtcttcaaaaacatttccctttttatactcattccccccaggcatggggtagtgtcagtcggactgcacagggaacacggtttccagtggctttggcccctactcgggaaacgtctgcctgttctcgatggtgatggggtggctgccattcccttggttttcctaagccctttctaacgagagtctcaaacaagcggaggcgagggccaattcaaccccattctttccagcgccccgcaccatagcacctgcccacctgagaaccaggaacgcaccctctctgtggagctctgactggtgtagctggaaacaaacagcaacttgcaaacggacgaagagcctgccgtgtgttaatcatttgccttacaagatgtaccagacggtttccagtactaacaaagggaataaaaatacctcacgccacaatccagcatattgatgttttaaggcaaaacaaaaaaaaaccaaaaaacaaaacaagaaaaacaaaaacgggtgggggtgggccgaaaaatttacccctcgttggggcgcgccaatgtatgcaccggccagggcaggacacgggccgaaagggggtcccaaaaacgggccggtgaacctgggtgggctggcacaggcggacacacccccgccgcacagaacaagaacacaacgtaagcaacgtacctgttcttacgctcttcgaacgacgacggcacaagataccaacagcaaatacaaagagagcaaaataacacaaccaacagacaaaacaagaaccacagacaacctacggaaccaacacgtaacagcgaagaagaaacgaaacaaccagagagacacaaacaacacagacacaagaacacaaactagaagaaccacaatgagcgaagcgagcagcgagggcacacgccaggggccgaacacaaggaacggccgagacagcgaaacaagaagggcaggaacagagcaacggaagacacataggagaacgcaagagagacgcaacaagaacgcaaacaagaccgagtagcaggaagacaacaagaaaagtggaaaaaggcgaaaaaaacgcgaaaagaaaaaaagagaaaaaacgccggaaaaaacacaaaaaacaacgcagaagacaaccaagaacaaacagtcaaagaacaaagaaacaagagcaacaaacagaaaacgaacaagaaacagaagaagcacaagaacacggagaaaaccagca

SEQ ID NO: 422373 - DNA, 5628 bp, Homo sapiens
acgcggccgctgcccgctttgcgccgctcctccctgcgcgagtagcgctggccccggcgtcgaggcggccatggcgacccggagcccgctccccacccaccccgcctgctccgccctcccctccgccccgcgccacctttgatggctcggacctcagccggccaccgccagccctgctcgcgcgcccgcgccgccgccgcccgcgggtattaatagccggcgccgccgcgccctcggccgccgggggcttgggagccgccgatcccggagcccgagccgggagagggagccgccgcagccgccggcgctgtggagatattctctaagccgctttcatcatgggagaaatagagcagaggccgaccccaggatcacgactgggggccccggaaaattcggggatcagtaccttggaacgtggacagaagccgcccccaacaccttcaggaaaactcgtgtccatcaaaatccagatgctggatgacacccaggaggcatttgaagttccacaaagagctcctgggaaggtgctgctggatgcagtttgcaaccacctcaacctcgtggaaggtgactattttggcctcgagtttcctgatcacaaaaagatcacggtgtggctggatctcctaaaacccattgtgaaacagattagaaggccaaagcacgttgttgttaagtttgtggtgaaattctttccgcctgaccacacacaactccaagaagaactcacaaggtacctgttcgcgctgcaggtgaagcaggacttggctcaaggcaggttgacgtgtaatgacaccagcgcagctctcttgatttcacacattgtgcaatctgagattggggattttgatgaagccttggacagagagcacttagcaaaaaataaatacatacctcagcaagacgcactagaggacaaaatcgtggaatttcaccataaccacattggacaaacaccagcagaatcagatttccagctcctagagattgcccgtcggctagagatgtatggaatccggttgcacccggccaaggacagggaaggcacgaagatcaatctggccgttgccaacacgggaattctagtgtttcagggtttcactaagatcaatgccttcaactgggccaaggtgcggaagctgagcttcaagaggaagcgctttctcatcaagctccggccagatgccaatagtgcgtaccaggataccttggaattcctgatggccagtcgggatttctgcaagtccttctggaaacccaagcccgtcctctttagccgggggtcatcatttcggttcagtggtcggactcagaagcaggttctcgactatgttaaagaaggaggacataagaaggtgcagtttgaaaggaagcacagcaagattcattctatccggagccttgcttcacagcctacagaactgaattcggaagtgctggagcagtctcagcagagcaccagccttacatttggagaaggtgccgaatctccagggggccagagctgccggcgaggaaaggaaccgaaggtttccgccggggagccggggtcgcacccgagccctgcgccgaggagaagccccgcgggtaacaagcaggcggacggagccgcctcggcgcccacggaggaagaggaggaggtcgttaaggataggacccagcagagtaaacctcagcccccgcagccaagcacaggctccctgactggcagtcctcacctttccgagctgtctgtgaactcgcaggggggagtggcccctgccaacgtgaccttgtctcccaacctgagccccgacaccaagcaggcctctcccttgatcagcccgctgctgaatgaccaggcctgcccccggacggacgatgaggatgagggccggaggaagagattcccaactgataaagcgtacttcatagctaaggaagtgtctaccaccgagcgaacatatctgaaggatctcgaagttatcacttcgtggtttcagagcacagtgagcaaagaggacgccatgccggaagcactgaaaagtctcatattcccgaattttgaacctttgcacaaatttcatactaattttctcaaggaaattgagcaacgacttgccctgtgggaaggccgctcaaatgcccaaatcagagattaccaaagaatcggcgatgtcatgctgaagaacattcagggcatgaagcacctggcggctcacctgtggaagcacagcgaggccttggaggccctggagaatggaatcaagagctcccggcggctggagaacttctgcagagactttgagctgcagaaggtgtgttacctaccgctcaacaccttcctcctgcggccactgcaccggctcatgcactacaagcaggtcctggagcggctgtgcaaacaccacccgccgagccacgccgacttcagggactgccgagccgctttggcagagatcacggagatggtggcacagctccacggtacgatgatcaagatggagaatttccagaagctgcacgaactcaagaaagatttgattggcattgacaatcttgtggttccgggaagggagttcatccgtctgggcagcctcagcaagctctcggggaaggggctccagcagcgcatgttcttcctgttcaacgacgtcctgctatacacgagccgggggctgacggcctccaatcagtttaaagtccacgggcagctcccgctctatggcatgacgattgaggagagcgaagacgagtggggggtgccccactgcctgaccctccggggccagcggcagtccatcatcgtggccgccagttctcggtccgagatggagaagtgggttgaggacatccagatggccattgacctggcggagaagagcagcagccccgcccctgagttcctggccagcagcccccctgacaacaagtcccctgatgaagccaccgcggctgaccaggagtcagaggatgacctgagcgcctcgcgcacatcgctggagcgccaggccccgcaccgcggcaacacaatggtgcacgtgtgctggcaccgcaacaccagcgtctccatggtggacttcagcatcgcagtggagaatcagttgtctggaaacctgctgaggaaattcaaaaacagcaacgggtggcagaagctgtgggtggtgttcacaaacttctgcctgttcttctacaaatcacaccaggacaatcatccccttgccagcctgcctctgctcggctactcgctcaccatcccctctgagtccgagaacatccagaaagactacgtgttcaagctgcacttcaagtcccacgtctactacttcagggcggaaagcgagtacacgttcgaaaggtggatggaagtgatccgcagtgccaccagctctgcctcgcgaccccacgtgttgagccacaaagagtctcttgtgtattgatggccggacacactcgtttccgcagtggctgctttcctggaagacgtttcctttcttctgtattaatgaagcctggtaaaattaacacctgtctgaaaatcaaaaacatggcttcccagcagctctcctgtctccacagccgcgttttttaaccccgacctctcagcgtctgaatgaacagcgctcccacctccagtcctggcatccgctgggggcgctgttctttagctagtgccagtattaaaacattgtcattacgagagtgccaaatgacatcttccctccaccctgcccctgaaaaacagtacacacacatccgttcaacacaagacagggcaagtgtttttcttcctaaaaaaagttctttcttttattattttcacctattggctgctgcattttacgaagtggacttcccggtgtttgttgtttgtttgcaatacactcagtgcagccttaagcaaatgagatcattttcagatttcatttttttttttcagtctttctacttttgtaataataggaagttagtaggactcacttctctgattaataagcaatttgcagcacacagcgttccactgcggggtttcacgctcacctgaaaacacctgttcccaacctacttcttggtgcaagttgaccaaatcgttttaagtgggtaactctttccaaccgtagcagggttgttttctgttaagcaaagccgagatccagtgcaatacctggactgtcaccgtcctgtgagtggtgtacacaatgggaagataataagccgtggtgttttgctgtctgtctgtgtcacaagcatgaaaacccgtgtgtcattgatcagcaccatttgtggtatgttccgtgatgagcgtttagtgagcctgctggctgcagagcactatgaaatcatggtacgtagtccccggcacctgtcgttattcctatatcctcctgcaactgtggtttgaaactgcgcattctctagtagtatatatcgtgcctgtcttcaaaaacatttccctttttatactcattccccccaggcatggggtagtgtcagtcggactgcacagggaacacggtttccagtggctttggcccctactcgggaaacgtctgcctgttctcgatggtgatggggtggctgccattcccttggttttcctaagccctttctaacgagagtctcaaacaagcggaggcgagggccaattcaaccccattctttccagcgccccgcaccatagcacctgcccacctgagaaccaggaacgcaccctctctgtggagctctgactggtgtagctggaaacaaacagcaacttgcaaacggacgaagagcctgccgtgtgttaatcatttgccttacaagatgtaccagacggtttccagtactaacaaagggaataaaaatacctcacgccacaatccagcatattgatgttttaaggcaaaacaaaaaaaaaccaaaaaacaaaacaagaaaaacaaaaacgggtgggggtgggccgaaaaatttacccctcgttggggcgcgccaatgtatgcaccggccagggcaggacacgggccgaaagggggtcccaaaaacgggccggtgaacctgggtgggctggcacaggcggacacacccccgccgcacagaacaagaacacaacgtaagcaacgtacctgttcttacgctcttcgaacgacgacggcacaagataccaacagcaaatacaaagagagcaaaataacacaaccaacagacaaaacaagaaccacagacaacctacggaaccaacacgtaacagcgaagaagaaacgaaacaaccagagagacacaaacaacacagacacaagaacacaaactagaagaaccacaatgagcgaagcgagcagcgagggcacacgccaggggccgaacacaaggaacggccgagacagcgaaacaagaagggcaggaacagagcaacggaagacacataggagaacgcaagagagacgcaacaagaacgcaaacaagaccgagtagcaggaagacaacaagaaaagtggaaaaaggcgaaaaaaacgcgaaaagaaaaaaagagaaaaaacgccggaaaaaacacaaaaaacaacgcagaagacaaccaagaacaaacagtcaaagaacaaagaaacaagagcaacaaacagaaaacgaacaagaaacagaagaagcacaagaacacggagaaaaccagca

SEQ ID NO: 422374 - DNA, 5313 bp, Homo sapiens
acgcggccgctgcccgctttgcgccgctcctccctgcgcgagtagcgctggccccggcgtcgaggcggccatggcgacccggagcccgctccccacccaccccgcctgctccgccctcccctccgccccgcgccacctttgatggctcggacctcagccggccaccgccagccctgctcgcgcgcccgcgccgccgccgcccgcgggtattaatagccggcgccgccgcgccctcggccgccgggggcttgggagccgccgatcccggagcccgagccgggagagggagccgccgcagccgccggcgctgtggagatattctctaagccgctttcatcatgggagaaatagagcagaggccgaccccaggatcacgactgggggccccggaaaattcggggatcagtaccttggaacgtggacagaagccgcccccaacaccttcaggaaaactcgtgtccatcaaaatccagatgctggatgacacccaggaggcatttgaagttccacaaagagctcctgggaaggtgctgctggatgcagtttgcaaccacctcaacctcgtggaaggtgactattttggcctcgagtttcctgatcacaaaaagatcacggtgtggctggatctcctaaaacccattgtgaaacagattagaaggccaaagcacgttgttgttaagtttgtggtgaaattctttccgcctgaccacacacaactccaagaagaactcacaaggtacctgttcgcgctgcaggtgaagcaggacttggctcaaggcaggttgacgtgtaatgacaccagcgcagctctcttgatttcacacattgtgcaatctgagattggggattttgatgaagccttggacagagagcacttagcaaaaaataaatacatacctcagcaagacgcactagaggacaaaatcgtggaatttcaccataaccacattggacaaacaccagcagaatcagatttccagctcctagagattgcccgtcggctagagatgtatggaatccggttgcacccggccaaggacagggaaggcacgaagatcaatctggccgttgccaacacgggaattctagtgtttcagggtttcactaagatcaatgccttcaactgggccaaggtgcggaagctgagcttcaagaggaagcgctttctcatcaagctccggccagatgccaatagtgcgtaccaggataccttggaattcctgatggccagtcgggatttctgcaagtccttctggaaaatctgtgttgaacatcatgccttctttagactttttgaagagcccaaaccaaagcccaagcccgtcctctttagccgggggtcatcatttcggttcagtggtcggactcagaagcaggttctcgactatgttaaagaaggaggacataagaaggtgcagtttgaaaggaagcacagcaagattcattctatccggagccttgcttcacagcctacagaactgaattcggaagtgctggagcagtctcagcagagcaccagccttacatttggagaaggtgccgaatctccagggggccagagctgccggcgaggaaaggaaccgaaggtttccgccggggagccggggtcgcacccgagccctgcgccgaggagaagccccgcgggtaacaagcaggcggacggagccgcctcggcgcccacggaggaagaggaggaggtcgttaaggataggacccagcagagtaaacctcagcccccgcagccaagcacaggctccctgactggcagtcctcacctttccgagctgtctgtgaactcgcaggggggagtggcccctgccaacgtgaccttgtctcccaacctgagccccgacaccaagcaggcctctcccttgatcagcccgctgctgaatgaccaggcctgcccccggacggacgatgaggatgagggccggaggaagagattcccaactgataaagcgtacttcatagctaaggaagtgtctaccaccgagcgaacatatctgaaggatctcgaagttatcacttcgtggtttcagagcacagtgagcaaagaggacgccatgccggaagcactgaaaagtctcatattcccgaattttgaacctttgcacaaatttcatactaattttctcaaggaaattgagcaacgacttgccctgtgggaaggccgctcaaatgcccaaatcagagattaccaaagaatcggcgatgtcatgctgaagaacattcagggcatgaaggagttcatccgtctgggcagcctcagcaagctctcggggaaggggctccagcagcgcatgttcttcctgttcaacgacgtcctgctatacacgagccgggggctgacggcctccaatcagtttaaagtccacgggcagctcccgctctatggcatgacgattgaggagagcgaagacgagtggggggtgccccactgcctgaccctccggggccagcggcagtccatcatcgtggccgccagttctcggtccgagatggagaagtgggttgaggacatccagatggccattgacctggcggagaagagcagcagccccgcccctgagttcctggccagcagcccccctgacaacaagtcccctgatgaagccaccgcggctgaccaggagtcagaggatgacctgagcgcctcgcgcacatcgctggagcgccaggccccgcaccgcggcaacacaatggtgcacgtgtgctggcaccgcaacaccagcgtctccatggtggacttcagcatcgcagtggagaatcagttgtctggaaacctgctgaggaaattcaaaaacagcaacgggtggcagaagctgtgggtggtgttcacaaacttctgcctgttcttctacaaatcacaccaggacaatcatccccttgccagcctgcctctgctcggctactcgctcaccatcccctctgagtccgagaacatccagaaagactacgtgttcaagctgcacttcaagtcccacgtctactacttcagggcggaaagcgagtacacgttcgaaaggtggatggaagtgatccgcagtgccaccagctctgcctcgcgaccccacgtgttgagccacaaagagtctcttgtgtattgatggccggacacactcgtttccgcagtggctgctttcctggaagacgtttcctttcttctgtattaatgaagcctggtaaaattaacacctgtctgaaaatcaaaaacatggcttcccagcagctctcctgtctccacagccgcgttttttaaccccgacctctcagcgtctgaatgaacagcgctcccacctccagtcctggcatccgctgggggcgctgttctttagctagtgccagtattaaaacattgtcattacgagagtgccaaatgacatcttccctccaccctgcccctgaaaaacagtacacacacatccgttcaacacaagacagggcaagtgtttttcttcctaaaaaaagttctttcttttattattttcacctattggctgctgcattttacgaagtggacttcccggtgtttgttgtttgtttgcaatacactcagtgcagccttaagcaaatgagatcattttcagatttcatttttttttttcagtctttctacttttgtaataataggaagttagtaggactcacttctctgattaataagcaatttgcagcacacagcgttccactgcggggtttcacgctcacctgaaaacacctgttcccaacctacttcttggtgcaagttgaccaaatcgttttaagtgggtaactctttccaaccgtagcagggttgttttctgttaagcaaagccgagatccagtgcaatacctggactgtcaccgtcctgtgagtggtgtacacaatgggaagataataagccgtggtgttttgctgtctgtctgtgtcacaagcatgaaaacccgtgtgtcattgatcagcaccatttgtggtatgttccgtgatgagcgtttagtgagcctgctggctgcagagcactatgaaatcatggtacgtagtccccggcacctgtcgttattcctatatcctcctgcaactgtggtttgaaactgcgcattctctagtagtatatatcgtgcctgtcttcaaaaacatttccctttttatactcattccccccaggcatggggtagtgtcagtcggactgcacagggaacacggtttccagtggctttggcccctactcgggaaacgtctgcctgttctcgatggtgatggggtggctgccattcccttggttttcctaagccctttctaacgagagtctcaaacaagcggaggcgagggccaattcaaccccattctttccagcgccccgcaccatagcacctgcccacctgagaaccaggaacgcaccctctctgtggagctctgactggtgtagctggaaacaaacagcaacttgcaaacggacgaagagcctgccgtgtgttaatcatttgccttacaagatgtaccagacggtttccagtactaacaaagggaataaaaatacctcacgccacaatccagcatattgatgttttaaggcaaaacaaaaaaaaaccaaaaaacaaaacaagaaaaacaaaaacgggtgggggtgggccgaaaaatttacccctcgttggggcgcgccaatgtatgcaccggccagggcaggacacgggccgaaagggggtcccaaaaacgggccggtgaacctgggtgggctggcacaggcggacacacccccgccgcacagaacaagaacacaacgtaagcaacgtacctgttcttacgctcttcgaacgacgacggcacaagataccaacagcaaatacaaagagagcaaaataacacaaccaacagacaaaacaagaaccacagacaacctacggaaccaacacgtaacagcgaagaagaaacgaaacaaccagagagacacaaacaacacagacacaagaacacaaactagaagaaccacaatgagcgaagcgagcagcgagggcacacgccaggggccgaacacaaggaacggccgagacagcgaaacaagaagggcaggaacagagcaacggaagacacataggagaacgcaagagagacgcaacaagaacgcaaacaagaccgagtagcaggaagacaacaagaaaagtggaaaaaggcgaaaaaaacgcgaaaagaaaaaaagagaaaaaacgccggaaaaaacacaaaaaacaacgcagaagacaaccaagaacaaacagtcaaagaacaaagaaacaagagcaacaaacagaaaacgaacaagaaacagaagaagcacaagaacacggagaaaaccagca

SEQ ID NO: 422375 - DNA, 4573 bp, Homo sapiens
aaggaaatgtacgtagacgaggcggtgtattcgtacgggggagctagcttagaggaggcttgtcatccagctcggcagatgcatagtgcgtaccaggataccttggaattcctgatggccagtcgggatttctgcaagtccttctggaaaatctgtgttgaacatcatgccttctttagactttttgaagagcccaaaccaaagcccaagcccgtcctctttagccgggggtcatcatttcggttcagtggtcggactcagaagcaggttctcgactatgttaaagaaggaggacataagaaggtgcagtttgaaaggaagcacagcaagattcattctatccggagccttgcttcacagcctacagaactgaattcggaagtgctggagcagtctcagcagagcaccagccttacatttggagaaggtgccgaatctccagggggccagagctgccggcgaggaaaggaaccgaaggtttccgccggggagccggggtcgcacccgagccctgcgccgaggagaagccccgcgggtaacaagcaggcggacggagccgcctcggcgcccacggaggaagaggaggaggtcgttaaggataggacccagcagagtaaacctcagcccccgcagccaagcacaggctccctgactggcagtcctcacctttccgagctgtctgtgaactcgcaggggggagtggcccctgccaacgtgaccttgtctcccaacctgagccccgacaccaagcaggcctctcccttgatcagcccgctgctgaatgaccaggcctgcccccggacggacgatgaggatgagggccggaggaagagattcccaactgataaagcgtacttcatagctaaggaagtgtctaccaccgagcgaacatatctgaaggatctcgaagttatcacttcgtggtttcagagcacagtgagcaaagaggacgccatgccggaagcactgaaaagtctcatattcccgaattttgaacctttgcacaaatttcatactaattttctcaaggaaattgagcaacgacttgccctgtgggaaggccgctcaaatgcccaaatcagagattaccaaagaatcggcgatgtcatgctgaagaacattcagggcatgaagcacctggcggctcacctgtggaagcacagcgaggccttggaggccctggagaatggaatcaagagctcccggcggctggagaacttctgcagagactttgagctgcagaaggtgtgttacctaccgctcaacaccttcctcctgcggccactgcaccggctcatgcactacaagcaggtcctggagcggctgtgcaaacaccacccgccgagccacgccgacttcagggactgccgagccgctttggcagagatcacggagatggtggcacagctccacggtacgatgatcaagatggagaatttccagaagctgcacgaactcaagaaagatttgattggcattgacaatcttgtggttccgggaagggagttcatccgtctgggcagcctcagcaagctctcggggaaggggctccagcagcgcatgttcttcctgttcaacgacgtcctgctatacacgagccgggggctgacggcctccaatcagtttaaagtccacgggcagctcccgctctatggcatgacgattgaggagagcgaagacgagtggggggtgccccactgcctgaccctccggggccagcggcagtccatcatcgtggccgccagttctcggtccgagatggagaagtgggttgaggacatccagatggccattgacctggcggagaagagcagcagccccgcccctgagttcctggccagcagcccccctgacaacaagtcccctgatgaagccaccgcggctgaccaggagtcagaggatgacctgagcgcctcgcgcacatcgctggagcgccaggccccgcaccgcggcaacacaatggtgcacgtgtgctggcaccgcaacaccagcgtctccatggtggacttcagcatcgcagtggagaatcagttgtctggaaacctgctgaggaaattcaaaaacagcaacgggtggcagaagctgtgggtggtgttcacaaacttctgcctgttcttctacaaatcacaccaggacaatcatccccttgccagcctgcctctgctcggctactcgctcaccatcccctctgagtccgagaacatccagaaagactacgtgttcaagctgcacttcaagtcccacgtctactacttcagggcggaaagcgagtacacgttcgaaaggtggatggaagtgatccgcagtgccaccagctctgcctcgcgaccccacgtgttgagccacaaagagtctcttgtgtattgatggccggacacactcgtttccgcagtggctgctttcctggaagacgtttcctttcttctgtattaatgaagcctggtaaaattaacacctgtctgaaaatcaaaaacatggcttcccagcagctctcctgtctccacagccgcgttttttaaccccgacctctcagcgtctgaatgaacagcgctcccacctccagtcctggcatccgctgggggcgctgttctttagctagtgccagtattaaaacattgtcattacgagagtgccaaatgacatcttccctccaccctgcccctgaaaaacagtacacacacatccgttcaacacaagacagggcaagtgtttttcttcctaaaaaaagttctttcttttattattttcacctattggctgctgcattttacgaagtggacttcccggtgtttgttgtttgtttgcaatacactcagtgcagccttaagcaaatgagatcattttcagatttcatttttttttttcagtctttctacttttgtaataataggaagttagtaggactcacttctctgattaataagcaatttgcagcacacagcgttccactgcggggtttcacgctcacctgaaaacacctgttcccaacctacttcttggtgcaagttgaccaaatcgttttaagtgggtaactctttccaaccgtagcagggttgttttctgttaagcaaagccgagatccagtgcaatacctggactgtcaccgtcctgtgagtggtgtacacaatgggaagataataagccgtggtgttttgctgtctgtctgtgtcacaagcatgaaaacccgtgtgtcattgatcagcaccatttgtggtatgttccgtgatgagcgtttagtgagcctgctggctgcagagcactatgaaatcatggtacgtagtccccggcacctgtcgttattcctatatcctcctgcaactgtggtttgaaactgcgcattctctagtagtatatatcgtgcctgtcttcaaaaacatttccctttttatactcattccccccaggcatggggtagtgtcagtcggactgcacagggaacacggtttccagtggctttggcccctactcgggaaacgtctgcctgttctcgatggtgatggggtggctgccattcccttggttttcctaagccctttctaacgagagtctcaaacaagcggaggcgagggccaattcaaccccattctttccagcgccccgcaccatagcacctgcccacctgagaaccaggaacgcaccctctctgtggagctctgactggtgtagctggaaacaaacagcaacttgcaaacggacgaagagcctgccgtgtgttaatcatttgccttacaagatgtaccagacggtttccagtactaacaaagggaataaaaatacctcacgccacaatccagcatattgatgttttaaggcaaaacaaaaaaaaaccaaaaaacaaaacaagaaaaacaaaaacgggtgggggtgggccgaaaaatttacccctcgttggggcgcgccaatgtatgcaccggccagggcaggacacgggccgaaagggggtcccaaaaacgggccggtgaacctgggtgggctggcacaggcggacacacccccgccgcacagaacaagaacacaacgtaagcaacgtacctgttcttacgctcttcgaacgacgacggcacaagataccaacagcaaatacaaagagagcaaaataacacaaccaacagacaaaacaagaaccacagacaacctacggaaccaacacgtaacagcgaagaagaaacgaaacaaccagagagacacaaacaacacagacacaagaacacaaactagaagaaccacaatgagcgaagcgagcagcgagggcacacgccaggggccgaacacaaggaacggccgagacagcgaaacaagaagggcaggaacagagcaacggaagacacataggagaacgcaagagagacgcaacaagaacgcaaacaagaccgagtagcaggaagacaacaagaaaagtggaaaaaggcgaaaaaaacgcgaaaagaaaaaaagagaaaaaacgccggaaaaaacacaaaaaacaacgcagaagacaaccaagaacaaacagtcaaagaacaaagaaacaagagcaacaaacagaaaacgaacaagaaacagaagaagcacaagaacacggagaaaaccagca

SEQ ID NO: 422376 - DNA, 3601 bp, Homo sapiens
acgcggccgctgcccgctttgcgccgctcctccctgcgcgagtagcgctggccccggcgtcgaggcggccatggcgacccggagcccgctccccacccaccccgcctgctccgccctcccctccgccccgcgccacctttgatggctcggacctcagccggccaccgccagccctgctcgcgcgcccgcgccgccgccgcccgcgggtattaatagccggcgccgccgcgccctcggccgccgggggcttgggagccgccgatcccggagcccgagccgggagagggagccgccgcagccgccggcgctgtggagatattctctaagccgctttcatcatgggagaaatagagcagaggccgaccccaggatcacgactgggggccccggaaaattcggggatcagtaccttggaacgtggacagaagccgcccccaacaccttcaggaaaactcgtgtccatcaaaatccagatgctggatgacacccaggaggcatttgaagttccacaaagagctcctgggaaggtgctgctggatgcagtttgcaaccacctcaacctcgtggaaggtgactattttggcctcgagtttcctgatcacaaaaagatcacggtgtggctggatctcctaaaacccattgtgaaacagattagaaggccaaagcacgttgttgttaagtttgtggtgaaattctttccgcctgaccacacacaactccaagaagaactcacaaggtacctgttcgcgctgcaggtgaagcaggacttggctcaaggcaggttgacgtgtaatgacaccagcgcagctctcttgatttcacacattgtgcaatctgagattggggattttgatgaagccttggacagagagcacttagcaaaaaataaatacatacctcagcaagacgcactagaggacaaaatcgtggaatttcaccataaccacattggacaaacaccagcagaatcagatttccagctcctagagattgcccgtcggctagagatgtatggaatccggttgcacccggccaaggacagggaaggcacgaagatcaatctggccgttgccaacacgggaattctagtgtttcagggtttcactaagatcaatgccttcaactgggccaaggtgcggaagctgagcttcaagaggaagcgctttctcatcaagctccggccagatgccaatagtgcgtaccaggataccttggaattcctgatggccagtcgggatttctgcaagtccttctggaaaatctgtgttgaacatcatgccttctttagactttttgaagagcccaaaccaaagcccaagcccgtcctctttagccgggggtcatcatttcggttcagtggtcggactcagaagcaggttctcgactatgttaaagaaggaggacataagaaggtgcagtttgaaaggaagcacagcaagattcattctatccggagccttgcttcacagcctacagaactgaattcggaagtgctggagcagtctcagcagagcaccagccttacatttggagaaggtgccgaatctccagggggccagagctgccggcgaggaaaggaaccgaaggtttccgccggggagccggggtcgcacccgagccctgcgccgaggagaagccccgcgggtaacaagcaggcggacggagccgcctcggcgcccacggaggaagaggaggaggtcgttaaggataggacccagcagagtaaacctcagcccccgcagccaagcacaggctccctgactggcagtcctcacctttccgagctgtctgtgaactcgcaggggggagtggcccctgccaacgtgaccttgtctcccaacctgagccccgacaccaagcaggcctctcccttgatcagcccgctgctgaatgaccaggcctgcccccggacggacgatgaggatgagggccggaggaagagattcccaactgataaagcgtacttcatagctaaggaagtgtctaccaccgagcgaacatatctgaaggatctcgaagttatcacttcgtggtttcagagcacagtgagcaaagaggacgccatgccggaagcactgaaaagtctcatattcccgaattttgaacctttgcacaaatttcatactaattttctcaaggaaattgagcaacgacttgccctgtgggaaggccgctcaaatgcccaaatcagagattaccaaagaatcggcgatgtcatgctgaagaacattcagggcatgaagcacctggcggctcacctgtggaagcacagcgaggccttggaggccctggagaatggaatcaagagctcccggcggctggagaacttctgcagagactttgagctgcagaaggtgtgttacctaccgctcaacaccttcctcctgcggccactgcaccggctcatgcactacaagcaggtcctggagcggctgtgcaaacaccacccgccgagccacgccgacttcagggactgccgagccgctttggcagagatcacggagatggtggcacagctccacggtacgatgatcaagatggagaatttccagaagctgcacgaactcaagaaagatttgattggcattgacaatcttgtggttccgggaagggagttcatccgtctgggcagcctcagcaagctctcggggaaggggctccagcagcgcatgttcttcctgttcaacgacgtcctgctatacacgagccgggggctgacggcctccaatcagtttaaagtccacgggcagctcccgctctatggcatgacgattgaggagagcgaagacgagtggggggtgccccactgcctgaccctccggggccagcggcagtccatcatcgtggccgccagttctcggtccgagatggagaagtgggttgaggacatccagatggccattgacctggcggagaagagcagcagccccgcccctgagttcctggccagcagcccccctgacaacaagtcccctgatgaagccaccgcggctgaccaggagtcagaggatgacctgagcgcctcgcgcacatcgctggagcgccaggccccgcaccgcggcaacacaatggtgcacgtgtgctggcaccgcaacaccagcgtctccatggtggacttcagcatcgcagtggagaatcagttgtctggaaacctgctgaggaaattcaaaaacagcaacgggtggcagaagctgtgggtggtgttcacaaacttctgcctgttcttctacaaatcacaccaggacaatcatccccttgccagcctgcctctgctcggctactcgctcaccatcccctctgagtccgagaacatccagaaagactacgtgttcaagctgcacttcaagtcccacgtctactacttcagggcggaaagcgagtacacgttcgaaaggtggatggaagtgatccgcagtgccaccagctctgcctcgcgaccccacgtgttgagccacaaagagtctcttgtgtattgatggccggacacactcgtttccgcagtggctgctttcctggaagacgtttcctttcttctgtattaatgaagcctggtaaaattaacacctgtctgaaaatcaaaaacatggcttcccagcagctc

SEQ ID NO: 422377 - DNA, 2310 bp, Homo sapiens
acgcggccgctgcccgctttgcgccgctcctccctgcgcgagtagcgctggccccggcgtcgaggcggccatggcgacccggagcccgctccccacccaccccgcctgctccgccctcccctccgccccgcgccacctttgatggctcggacctcagccggccaccgccagccctgctcgcgcgcccgcgccgccgccgcccgcgggtattaatagccggcgccgccgcgccctcggccgccgggggcttgggagccgccgatcccggagcccgagccgggagagggagccgccgcagccgccggcgctgtggagatattctctaagccgctttcatcatgggagaaatagagcagaggccgaccccaggatcacgactgggggccccggaaaattcggggatcagtaccttggaacgtggacagaagccgcccccaacaccttcaggaaaactcgtgtccatcaaaatccagatgctggatgacacccaggaggcatttgaagttccacaaagagctcctgggaaggtgctgctggatgcagtttgcaaccacctcaacctcgtggaaggtgactattttggcctcgagtttcctgatcacaaaaagatcacggtgtggctggatctcctaaaacccattgtgaaacagattagaaggccaaagcacgttgttgttaagtttgtggtgaaattctttccgcctgaccacacacaactccaagaagaactcacaaggtacctgttcgcgctgcaggtgaagcaggacttggctcaaggcaggttgacgtgtaatgacaccagcgcagctctcttgatttcacacattgtgcaatctgagattggggattttgatgaagccttggacagagagcacttagcaaaaaataaatacatacctcagcaagacgcactagaggacaaaatcgtggaatttcaccataaccacattggacaaacaccagcagaatcagatttccagctcctagagattgcccgtcggctagagatgtatggaatccggttgcacccggccaaggacagggaaggcacgaagatcaatctggccgttgccaacacgggaattctagtgtttcagggtttcactaagatcaatgccttcaactgggccaaggtgcggaagctgagcttcaagaggaagcgctttctcatcaagctccggccagatgccaatagtgcgtaccaggataccttggaattcctgatggccagtcgggatttctgcaagtccttctggaaaatctgtgttgaacatcatgccttctttagactttttgaagagcccaaaccaaagcccaagcccgtcctctttagccgggggtcatcatttcggttcagtggtcggactcagaagcaggttctcgactatgttaaagaaggaggacataagaaggtgcagtttgaaaggaagcacagcaagattcattctatccggagccttgcttcacagcctacagaactgaattcggaagtgctggagcagtctcagcagagcaccagccttacatttggagaaggtgccgaatctccagggggccagagctgccggcgaggaaaggaaccgaaggtttccgccggggagccggggtcgcacccgagccctgcgccgaggagaagccccgcgggtaacaagcaggcggacggagccgcctcggcgcccacggaggaagaggaggaggtcgttaaggataggacccagcagagtaaacctcagcccccgcagccaagcacaggctccctgactggcagtcctcacctttccgagctgtctgtgaactcgcaggggggagtggcccctgccaacgtgaccttgtctcccaacctgagccccgacaccaagcaggcctctcccttgatcagcccgctgctgaatgaccaggcctgcccccggacggacgatgaggatgagggccggaggaagagattcccaactgataaagcgtacttcatagctaaggaagtgtctaccaccgagcgaacatatctgaaggatctcgaagttatcacttcgtggtttcagagcacagtgagcaaagaggacgccatgccggaagcactgaaaagtctcatattcccgaattttgaacctttgcacaaatttcatactaattttctcaaggaaattgagcaacgacttgccctgtgggaaggccgctcaaatgcccaaatcagagattaccaaagaatcggcgatgtcatgctgaagaacattcagggcatgaaggctggagtgcgatggcgcgatctcggctcactgcagcctccgcctcctaagttcagagccattctcc

SEQ ID NO: 422378 - DNA, 826 bp, Homo sapiens
acgcggccgctgcccgctttgcgccgctcctccctgcgcgagtagcgctggccccggcgtcgaggcggccatggcgacccggagcccgctccccacccaccccgcctgctccgccctcccctccgccccgcgccacctttgatggctcggacctcagccggccaccgccagccctgctcgcgcgcccgcgccgccgccgcccgcgggtattaatagccggcgccgccgcgccctcggccgccgggggcttgggagccgccgatcccggagcccgagccgggagagggagccgccgcagccgccggcgctgtggagatggagtcttgctcttgttgcccaggctggagtgcaatggcgtgatctcagctcaccgcaacctccacctcccaggttcaagcgattctcctgtctcgacttcccagatattctctaagccgctttcatcatgggagaaatagagcagaggccgaccccaggatcacgactgggggccccggaaaattcggggatcagtaccttggaacgtggacagaagccgcccccaacaccttcaggaaaactcgtgtccatcaaaatccagatgctggatgacacccaggaggcatttgaagttccagctagcaggggccaagatggatccaagtggagtgagctgtttggaaatatcaggatatggggaaaccagcgattttctaaatgagacaaacatgttagtgaatctgtgaagaaaaagaaagcaggagaatcagttgaacccgggaggtggaggttgcagtgagctgagatcacaccattgcactccagcctgggcaataagagcaaaact

SEQ ID NO: 422379 - DNA, 691 bp, Homo sapiens
acgcggccgctgcccgctttgcgccgctcctccctgcgcgagtagcgctggccccggcgtcgaggcggccatggcgacccggagcccgctccccacccaccccgcctgctccgccctcccctccgccccgcgccacctttgatggctcggacctcagccggccaccgccagccctgctcgcgcgcccgcgccgccgccgcccgcgggtattaatagccggcgccgccgcgccctcggccgccgggggcttgggagccgccgatcccggagcccgagccgggagagggagccgccgcagccgccggcgctgtggagatattctctaagccgctttcatcatgggagaaatagagcagaggccgaccccaggatcacgactgggggccccggaaaattcggggatcagtaccttggaacgtggacagaagccgcccccaacaccttcaggaaaactcgtgtccatcaaaatccagatgctggatgacacccaggaggcatttgaagttccaatggtgtcctcatcctccttcctcaaagccaccggctcctcctggacgggttgggtactgagatgctccatgaagcccaagcaccattcacatctaattgagaagtttggagaggacagaattctcactcatcttacaggctctatttcttacacaaactgggctggaagtagaagcttagc

SEQ ID NO: 422380 - DNA, 487 bp, Homo sapiens
agattcccaactgataaagcgtacttcatagctaaggaagtgtctaccaccgagcgaacatatctgaaggatctcgaagttatcacttcggtatgtgcagtatttccccaaaagcattcgattacatgatttatctcagctaatactcagctatacggggaggctggagctaattaaatgttggattcgctgacttcagttgaaaggattgtggtcctagggtatagaaattaaatgctaatagtatatttaattgggaatatatgctataacatttttgataatgatgattttcaagtgcaaaagaaggaagttcctaaggcagagaaaattaaaattaaacattttaccatctgtgtgcaccagtccagaacatgtcgtgttttgcccattgccaagtataactgctgatttttgttcacgggagacctcggaggtgaacaggagattcattttatctttgataataaattgagccttgtccgca

SEQ ID NO: 422381 - DNA, 642 bp, Homo sapiens
ccaggaggtagctacagtgggcgataactgcaccactgaactccagtatgagtgacagagccagaccctgtctcaaaaaaaaaagaaaaagaaaaaaggaagggagagcttccactaagcaggatgggacacgtcccgccattctctgccatgtccatgaaaataggaggtagcgttctccccagcaaccagaggccacctcgctcctaactgctccaatggagcgggcagtgtcactgcagcaaggtacttccagctccacactgagtgagtgcccaggccagtgggtctccactgtacctcaggaacgcctgggtgctggctgttcccttgctcttctgctgaagtggcagattaccaaccaggcggcctgacttcaccttgtgtttctgtaagcgatgcccaccaaagtgtcaggagtccgtccaaacaaaaggttgactaactggcgttcccgtgttgcaggtggatggaagtgatccgcagtgccaccagctctgcctcgcgaccccacgtgttgagccacaaagagtctcttgtgtattgatggccggacacactcgtttccgcagtggctgctttcctggaagacgtttcctttcttctgtattaatgaagcctggtaaaattaacacctgtctg

SEQ ID NO: 422382 - DNA, 725 bp, Homo sapiens
tgcggccgccccaacatcagaatggtaacacaccttctgcagctcaaagtctctgcagaaggtgtgttacctaccgctcaacaccttcctcctgcggccactgcaccggctcatgcactacaagcaggtcctggagcggctgtgcaaacaccacccgccgagccacgccgacttcagggactgccgagccgctttggcagagatcacggagatggtggcacagctccacggtacgatgatcaagatggagaatttccagaagctgcacgaactcaagaaagatttgattggcattgacaatcttgtggttccgggaagggtaagcagcagtggcctcactatgcactgcgcggggagcagaaaggaggcatcggagggacttacatttgaaccttttgaagagagacccttgcaaagcaaaatgtcctctttccatccacctgggagacaactggaaaaacacaacagtgtcgttagttcagaatcattgtgttcggaggagataaagcaatcctctgacctcatattctgctttttctccttacggggtgattcgcttctttaccttttcccctaccatatcccacagaagatttgagattgcttattttattttttttaaatgtacataaatgaaaatggaaaattaaaaaaaaaattaggtaaatagtaataaagccagaaaggtagtgcattaaattatgctagaaattcccatgcaggta

SEQ ID NO: 422383 - DNA, 4897 bp, Homo sapiens
acgcggccgctgcccgctttgcgccgctcctccctgcgcgagtagcgctggccccggcgtcgaggcggccatggcgacccggagcccgctccccacccaccccgcctgctccgccctcccctccgccccgcgccacctttgatggctcggacctcagccggccaccgccagccctgctcgcgcgcccgcgccgccgccgcccgcgggtattaatagccggcgccgccgcgccctcggccgccgggggcttgggagccgccgatcccggagcccgagccgggagagggagccgccgcagccgccggcgctgtggagatattctctaagccgctttcatcatgggagaaatagagcagaggccgaccccaggatcacgactgggggccccggaaaattcggggatcagtaccttggaacgtggacagaagccgcccccaacaccttcaggaaaactcgtgtccatcaaaatccagatgctggatgacacccaggaggcatttgaagttccacaaagagctcctgggaaggtgctgctggatgcagtttgcaaccacctcaacctcgtggaaggtgactattttggcctcgagtttcctgatcacaaaaagatcacggtgtggctggatctcctaaaacccattgtgaaacagattagaaggccaaagcacgttgttgttaagtttgtggtgaaattctttccgcctgaccacacacaactccaagaagaactcacaaggtacctgttcgcgctgcaggtgaagcaggacttggctcaaggcaggttgacgtgtaatgacaccagcgcagctctcttgatttcacacattgtgcaatctgagattggggattttgatgaagccttggacagagagcacttagcaaaaaataaatacatacctcagcaagacgcactagaggacaaaatcgtggaatttcaccataaccacattggacaaacaccagcagaatcagatttccagctcctagagattgcccgtcggctagagatgtatggaatccggttgcacccggccaaggacagggaaggcacgaagatcaatctggccgttgccaacacgggaattctagtgtttcagggtttcactaagatcaatgccttcaactgggccaaggtgcggaagctgagcttcaagaggaagcgctttctcatcaagctccggccagatgccaatagtgcgtaccaggataccttggaattcctgatggccagtcgggatttctgcaagtccttctggaaaatctgtgttgaacatcatgccttctttagactttttgaagagcccaaaccaaagcccaagcccgtcctctttagccgggggtcatcatttcggttcagtggtcggactcagaagcaggttctcgactatgttaaagaaggaggacataagaaggtgcagtttgaaaggaagcacagcaagattcattctatccggagccttgcttcacagcctacagaactgaattcggaagtgctggagcagtctcagcagagcaccagccttacatttggagaaggtgccgaatctccagggggccagagctgccggcgaggaaaggaaccgaaggtttccgccggggagccggggtcgcacccgagccctgcgccgaggagaagccccgcgggtaacaagcaggcggacggagccgcctcggcgcccacggaggaagaggaggaggtcgttaaggataggacccagcagagtaaacctcagcccccgcagccaagcacaggctccctgactggcagtcctcacctttccgagctgtctgtgaactcgcaggggggagtggcccctgccaacgtgaccttgtctcccaacctgagccccgacaccaagcaggcctctcccttgatcagcccgctgctgaatgaccaggcctgcccccggacggacgatgaggatgagggccggaggaagagattcccaactgataaagcgtacttcatagctaaggaagtgtctaccaccgagcgaacatatctgaaggatctcgaagttatcacttcgtggtttcagagcacagtgagcaaagaggacgccatgccggaagcactgaaaagtctcatattcccgaattttgaacctttgcacaaatttcatactaattttctcaaggaaattgagcaacgacttgccctgtgggaaggccgctcaaatgcccaaatcagagattaccaaagaatcggcgatgtcatgctgaagaacattcagggcatgaagcacctggcggctcacctgtggaagcacagcgaggccttggaggccctggagaatggaatcaagagctcccggcggctggagaacttctgcagagactttgagctgcagaaggtgtgttacctaccgctcaacaccttcctcctgcggccactgcaccggctcatgcactacaagcaggtcctggagcggctgtgcaaacaccacccgccgagccacgccgacttcagggactgccgagccgctttggcagagatcacggagatggtggcacagctccacggtacgatgatcaagatggagaatttccagaagctgcacgaactcaagaaagatttgattggcattgacaatcttgtggttccgggaagggagttcatccgtctgggcagcctcagcaagctctcggggaaggggctccagcagcgcatgttcttcctgttcaacgacgtcctgctatacacgagccgggggctgacggcctccaatcagtttaaagtccacgggcagctcccgctctatggcatgacgattgaggagagcgaagacgagtggggggtgccccactgcctgaccctccggggccagcggcagtccatcatcgtggccgccagttctcggtccgagatggagaagtgggttgaggacatccagatggccattgacctggcggagaagagcagcagccccgcccctgagttcctggccagcagcccccctgacaacaagtcccctgatgaagccaccgcggctgaccaggagtcagaggatgacctgagcgcctcgcgcacatcgctggagcgccaggccccgcaccgcggcaacacaatggtgcacgtgtgctggcaccgcaacaccagcgtctccatggtggacttcagcatcgcagtggagaatcagttgtctggaaacctgctgaggaaattcaaaaacagcaacgggtggcagaagctgtgggtggtgttcacaaacttctgcctgttcttctacaaatcacaccaggacaatcatccccttgccagcctgcctctgctcggctactcgctcaccatcccctctgagtccgagaacatccagaaagactacgtgttcaagctgcacttcaagtcccacgtctactacttcagggcggaaagcgagtacacgttcgaaaggtggatggaagtgatccgcagtgccaccagctctgcctcgcgaccccacgtgttgagccacaaagagtctcttgtgtattgatggccggacacactcgtttccgcagtggctgctttcctggaagacgtttcctttcttctgtattaatgaagcctggtaaaattaacacctgtctgaaaatcaaaaacatggcttcccagcagctctcctgtctccacagccgcgttttttaaccccgacctctcagcgtctgaatgaacagcgctcccacctccagtcctggcatccgctgggggcgctgttctttagctagtgccagtattaaaacattgtcattacgagagtgccaaatgacatcttccctccaccctgcccctgaaaaacagtacacacacatccgttcaacacaagacagggcaagtgtttttcttcctaaaaaaagttctttcttttattattttcacctattggctgctgcattttacgaagtggacttcccggtgtttgttgtttgtttgcaatacactcagtgcagccttaagcaaatgagatcattttcagatttcatttttttttttcagtctttctacttttgtaataataggaagttagtaggactcacttctctgattaataagcaatttgcagcacacagcgttccactgcggggtttcacgctcacctgaaaacacctgttcccaacctacttcttggtgcaagttgaccaaatcgttttaagtgggtaactctttccaaccgtagcagggttgttttctgttaagcaaagccgagatccagtgcaatacctggactgtcaccgtcctgtgagtggtgtacacaatgggaagataataagccgtggtgttttgctgtctgtctgtgtcacaagcatgaaaacccgtgtgtcattgatcagcaccatttgtggtatgttccgtgatgagcgtttagtgagcctgctggctgcagagcactatgaaatcatggtacgtagtccccggcacctgtcgttattcctatatcctcctgcaactgtggtttgaaactgcgcattctctagtagtatatatcgtgcctgtcttcaaaaacatttccctttttatactcattccccccaggcatggggtagtgtcagtcggactgcacagggaacacggtttccagtggctttggcccctactcgggaaacgtctgcctgttctcgatggtgatggggtggctgccattcccttggttttcctaagccctttctaacgagagtctcaaacaagcggaggcgagggccaattcaaccccattctttccagcgccccgcaccatagcacctgcccacctgagaaccaggaacgcaccctctctgtggagctctgactggtgtagctggaaacaaacagcaacttgcaaacggacgaagagcctgccgtgtgttaatcatttgccttacaagatgtaccagacggtttccagtactaacaaagggaataaaaatacctcacgccaca

SEQ ID NO: 422384 - DNA, 5561 bp, Homo sapiens
gtgccggaagcccgtgcctgtggctccgggggaggggagggctcggtgggtccctgaagactgtcctccccgcgcgacgtcgcaggcgaagcagccccaggcaggacctcaaaaagcgacctgcagagtccgagcccctgaccgcccgcctgccgctcccggcttcgccgtgcacacgtctcccgctctccccgatattctctaagccgctttcatcatgggagaaatagagcagaggccgaccccaggatcacgactgggggccccggaaaattcggggatcagtaccttggaacgtggacagaagccgcccccaacaccttcaggaaaactcgtgtccatcaaaatccagatgctggatgacacccaggaggcatttgaagttccacaaagagctcctgggaaggtgctgctggatgcagtttgcaaccacctcaacctcgtggaaggtgactattttggcctcgagtttcctgatcacaaaaagatcacggtgtggctggatctcctaaaacccattgtgaaacagattagaaggccaaagcacgttgttgttaagtttgtggtgaaattctttccgcctgaccacacacaactccaagaagaactcacaaggtacctgttcgcgctgcaggtgaagcaggacttggctcaaggcaggttgacgtgtaatgacaccagcgcagctctcttgatttcacacattgtgcaatctgagattggggattttgatgaagccttggacagagagcacttagcaaaaaataaatacatacctcagcaagacgcactagaggacaaaatcgtggaatttcaccataaccacattggacaaacaccagcagaatcagatttccagctcctagagattgcccgtcggctagagatgtatggaatccggttgcacccggccaaggacagggaaggcacgaagatcaatctggccgttgccaacacgggaattctagtgtttcagggtttcactaagatcaatgccttcaactgggccaaggtgcggaagctgagcttcaagaggaagcgctttctcatcaagctccggccagatgccaatagtgcgtaccaggataccttggaattcctgatggccagtcgggatttctgcaagtccttctggaaaatctgtgttgaacatcatgccttctttagactttttgaagagcccaaaccaaagcccaagcccgtcctctttagccgggggtcatcatttcggttcagtggtcggactcagaagcaggttctcgactatgttaaagaaggaggacataagaaggtgcagtttgaaaggaagcacagcaagattcattctatccggagccttgcttcacagcctacagaactgaattcggaagtgctggagcagtctcagcagagcaccagccttacatttggagaaggtgccgaatctccagggggccagagctgccggcgaggaaaggaaccgaaggtttccgccggggagccggggtcgcacccgagccctgcgccgaggagaagccccgcgggtaacaagcaggcggacggagccgcctcggcgcccacggaggaagaggaggaggtcgttaaggataggacccagcagagtaaacctcagcccccgcagccaagcacaggctccctgactggcagtcctcacctttccgagctgtctgtgaactcgcaggggggagtggcccctgccaacgtgaccttgtctcccaacctgagccccgacaccaagcaggcctctcccttgatcagcccgctgctgaatgaccaggcctgcccccggacggacgatgaggatgagggccggaggaagagattcccaactgataaagcgtacttcatagctaaggaagtgtctaccaccgagcgaacatatctgaaggatctcgaagttatcacttcgtggtttcagagcacagtgagcaaagaggacgccatgccggaagcactgaaaagtctcatattcccgaattttgaacctttgcacaaatttcatactaattttctcaaggaaattgagcaacgacttgccctgtgggaaggccgctcaaatgcccaaatcagagattaccaaagaatcggcgatgtcatgctgaagaacattcagggcatgaagcacctggcggctcacctgtggaagcacagcgaggccttggaggccctggagaatggaatcaagagctcccggcggctggagaacttctgcagagactttgagctgcagaaggtgtgttacctaccgctcaacaccttcctcctgcggccactgcaccggctcatgcactacaagcaggtcctggagcggctgtgcaaacaccacccgccgagccacgccgacttcagggactgccgagccgctttggcagagatcacggagatggtggcacagctccacggtacgatgatcaagatggagaatttccagaagctgcacgaactcaagaaagatttgattggcattgacaatcttgtggttccgggaagggagttcatccgtctgggcagcctcagcaagctctcggggaaggggctccagcagcgcatgttcttcctgttcaacgacgtcctgctatacacgagccgggggctgacggcctccaatcagtttaaagtccacgggcagctcccgctctatggcatgacgattgaggagagcgaagacgagtggggggtgccccactgcctgaccctccggggccagcggcagtccatcatcgtggccgccagttctcggtccgagatggagaagtgggttgaggacatccagatggccattgacctggcggagaagagcagcagccccgcccctgagttcctggccagcagcccccctgacaacaagtcccctgatgaagccaccgcggctgaccaggagtcagaggatgacctgagcgcctcgcgcacatcgctggagcgccaggccccgcaccgcggcaacacaatggtgcacgtgtgctggcaccgcaacaccagcgtctccatggtggacttcagcatcgcagtggagaatcagttgtctggaaacctgctgaggaaattcaaaaacagcaacgggtggcagaagctgtgggtggtgttcacaaacttctgcctgttcttctacaaatcacaccaggacaatcatccccttgccagcctgcctctgctcggctactcgctcaccatcccctctgagtccgagaacatccagaaagactacgtgttcaagctgcacttcaagtcccacgtctactacttcagggcggaaagcgagtacacgttcgaaaggtggatggaagtgatccgcagtgccaccagctctgcctcgcgaccccacgtgttgagccacaaagagtctcttgtgtattgatggccggacacactcgtttccgcagtggctgctttcctggaagacgtttcctttcttctgtattaatgaagcctggtaaaattaacacctgtctgaaaatcaaaaacatggcttcccagcagctctcctgtctccacagccgcgttttttaaccccgacctctcagcgtctgaatgaacagcgctcccacctccagtcctggcatccgctgggggcgctgttctttagctagtgccagtattaaaacattgtcattacgagagtgccaaatgacatcttccctccaccctgcccctgaaaaacagtacacacacatccgttcaacacaagacagggcaagtgtttttcttcctaaaaaaagttctttcttttattattttcacctattggctgctgcattttacgaagtggacttcccggtgtttgttgtttgtttgcaatacactcagtgcagccttaagcaaatgagatcattttcagatttcatttttttttttcagtctttctacttttgtaataataggaagttagtaggactcacttctctgattaataagcaatttgcagcacacagcgttccactgcggggtttcacgctcacctgaaaacacctgttcccaacctacttcttggtgcaagttgaccaaatcgttttaagtgggtaactctttccaaccgtagcagggttgttttctgttaagcaaagccgagatccagtgcaatacctggactgtcaccgtcctgtgagtggtgtacacaatgggaagataataagccgtggtgttttgctgtctgtctgtgtcacaagcatgaaaacccgtgtgtcattgatcagcaccatttgtggtatgttccgtgatgagcgtttagtgagcctgctggctgcagagcactatgaaatcatggtacgtagtccccggcacctgtcgttattcctatatcctcctgcaactgtggtttgaaactgcgcattctctagtagtatatatcgtgcctgtcttcaaaaacatttccctttttatactcattccccccaggcatggggtagtgtcagtcggactgcacagggaacacggtttccagtggctttggcccctactcgggaaacgtctgcctgttctcgatggtgatggggtggctgccattcccttggttttcctaagccctttctaacgagagtctcaaacaagcggaggcgagggccaattcaaccccattctttccagcgccccgcaccatagcacctgcccacctgagaaccaggaacgcaccctctctgtggagctctgactggtgtagctggaaacaaacagcaacttgcaaacggacgaagagcctgccgtgtgttaatcatttgccttacaagatgtaccagacggtttccagtactaacaaagggaataaaaatacctcacgccacaatccagcatattgatgttttaaggcaaaacaaaaaaaaaccaaaaaacaaaacaagaaaaacaaaaacgggtgggggtgggccgaaaaatttacccctcgttggggcgcgccaatgtatgcaccggccagggcaggacacgggccgaaagggggtcccaaaaacgggccggtgaacctgggtgggctggcacaggcggacacacccccgccgcacagaacaagaacacaacgtaagcaacgtacctgttcttacgctcttcgaacgacgacggcacaagataccaacagcaaatacaaagagagcaaaataacacaaccaacagacaaaacaagaaccacagacaacctacggaaccaacacgtaacagcgaagaagaaacgaaacaaccagagagacacaaacaacacagacacaagaacacaaactagaagaaccacaatgagcgaagcgagcagcgagggcacacgccaggggccgaacacaaggaacggccgagacagcgaaacaagaagggcaggaacagagcaacggaagacacataggagaacgcaagagagacgcaacaagaacgcaaacaagaccgagtagcaggaagacaacaagaaaagtggaaaaaggcgaaaaaaacgcgaaaagaaaaaaagagaaaaaacgccggaaaaaacacaaaaaacaacgcagaagacaaccaagaacaaacagtcaaagaacaaagaaacaagagcaacaaacagaaaacgaacaagaaacagaagaagcacaagaacacggagaaaaccagca

SEQ ID NO: 422385 - DNA, 5253 bp, Homo sapiens
ctgggattacaggtgcccgccaccgtatctggctaattttgtatttttggtagagacgaggtttcgccatgtttcccaggctgatctcgaactcctgacctcaagtgatccacccgtcctggactcccaaagtgctgagattacaggcatgagctactgtgcctgaccttgaagcttctttctgactgatagagatgaggaggggagaaaactgtcttctcacatcaccacaattgataaatgtatcctggcatcccgtctctgagatctggcccttctgatgttccccaccaactgggctcaccttatgttgtctgctagcttctgtttggctcactggggaatattgacaaactgggaagtgtcattcctacgtgacctgtttttctttctgtttctttttagctgagattggggattttgatgaagccttggacagagagcacttagcaaaaaataaatacatacctcagcaagacgcactagaggacaaaatcgtggaatttcaccataaccacattggacaaacaccagcagaatcagatttccagctcctagagattgcccgtcggctagagatgtatggaatccggttgcacccggccaaggacagggaaggcacgaagatcaatctggccgttgccaacacgggaattctagtgtttcagggtttcactaagatcaatgccttcaactgggccaaggtgcggaagctgagcttcaagaggaagcgctttctcatcaagctccggccagatgccaatagtgcgtaccaggataccttggaattcctgatggccagtcgggatttctgcaagtccttctggaaaatctgtgttgaacatcatgccttctttagactttttgaagagcccaaaccaaagcccaagcccgtcctctttagccgggggtcatcatttcggttcagtggtcggactcagaagcaggttctcgactatgttaaagaaggaggacataagaaggtgcagtttgaaaggaagcacagcaagattcattctatccggagccttgcttcacagcctacagaactgaattcggaagtgctggagcagtctcagcagagcaccagccttacatttggagaaggtgccgaatctccagggggccagagctgccggcgaggaaaggaaccgaaggtttccgccggggagccggggtcgcacccgagccctgcgccgaggagaagccccgcgggtaacaagcaggcggacggagccgcctcggcgcccacggaggaagaggaggaggtcgttaaggataggacccagcagagtaaacctcagcccccgcagccaagcacaggctccctgactggcagtcctcacctttccgagctgtctgtgaactcgcaggggggagtggcccctgccaacgtgaccttgtctcccaacctgagccccgacaccaagcaggcctctcccttgatcagcccgctgctgaatgaccaggcctgcccccggacggacgatgaggatgagggccggaggaagagattcccaactgataaagcgtacttcatagctaaggaagtgtctaccaccgagcgaacatatctgaaggatctcgaagttatcacttcgtggtttcagagcacagtgagcaaagaggacgccatgccggaagcactgaaaagtctcatattcccgaattttgaacctttgcacaaatttcatactaattttctcaaggaaattgagcaacgacttgccctgtgggaaggccgctcaaatgcccaaatcagagattaccaaagaatcggcgatgtcatgctgaagaacattcagggcatgaagcacctggcggctcacctgtggaagcacagcgaggccttggaggccctggagaatggaatcaagagctcccggcggctggagaacttctgcagagactttgagctgcagaaggtgtgttacctaccgctcaacaccttcctcctgcggccactgcaccggctcatgcactacaagcaggtcctggagcggctgtgcaaacaccacccgccgagccacgccgacttcagggactgccgagccgctttggcagagatcacggagatggtggcacagctccacggtacgatgatcaagatggagaatttccagaagctgcacgaactcaagaaagatttgattggcattgacaatcttgtggttccgggaagggagttcatccgtctgggcagcctcagcaagctctcggggaaggggctccagcagcgcatgttcttcctgttcaacgacgtcctgctatacacgagccgggggctgacggcctccaatcagtttaaagtccacgggcagctcccgctctatggcatgacgattgaggagagcgaagacgagtggggggtgccccactgcctgaccctccggggccagcggcagtccatcatcgtggccgccagttctcggtccgagatggagaagtgggttgaggacatccagatggccattgacctggcggagaagagcagcagccccgcccctgagttcctggccagcagcccccctgacaacaagtcccctgatgaagccaccgcggctgaccaggagtcagaggatgacctgagcgcctcgcgcacatcgctggagcgccaggccccgcaccgcggcaacacaatggtgcacgtgtgctggcaccgcaacaccagcgtctccatggtggacttcagcatcgcagtggagaatcagttgtctggaaacctgctgaggaaattcaaaaacagcaacgggtggcagaagctgtgggtggtgttcacaaacttctgcctgttcttctacaaatcacaccaggacaatcatccccttgccagcctgcctctgctcggctactcgctcaccatcccctctgagtccgagaacatccagaaagactacgtgttcaagctgcacttcaagtcccacgtctactacttcagggcggaaagcgagtacacgttcgaaaggtggatggaagtgatccgcagtgccaccagctctgcctcgcgaccccacgtgttgagccacaaagagtctcttgtgtattgatggccggacacactcgtttccgcagtggctgctttcctggaagacgtttcctttcttctgtattaatgaagcctggtaaaattaacacctgtctgaaaatcaaaaacatggcttcccagcagctctcctgtctccacagccgcgttttttaaccccgacctctcagcgtctgaatgaacagcgctcccacctccagtcctggcatccgctgggggcgctgttctttagctagtgccagtattaaaacattgtcattacgagagtgccaaatgacatcttccctccaccctgcccctgaaaaacagtacacacacatccgttcaacacaagacagggcaagtgtttttcttcctaaaaaaagttctttcttttattattttcacctattggctgctgcattttacgaagtggacttcccggtgtttgttgtttgtttgcaatacactcagtgcagccttaagcaaatgagatcattttcagatttcatttttttttttcagtctttctacttttgtaataataggaagttagtaggactcacttctctgattaataagcaatttgcagcacacagcgttccactgcggggtttcacgctcacctgaaaacacctgttcccaacctacttcttggtgcaagttgaccaaatcgttttaagtgggtaactctttccaaccgtagcagggttgttttctgttaagcaaagccgagatccagtgcaatacctggactgtcaccgtcctgtgagtggtgtacacaatgggaagataataagccgtggtgttttgctgtctgtctgtgtcacaagcatgaaaacccgtgtgtcattgatcagcaccatttgtggtatgttccgtgatgagcgtttagtgagcctgctggctgcagagcactatgaaatcatggtacgtagtccccggcacctgtcgttattcctatatcctcctgcaactgtggtttgaaactgcgcattctctagtagtatatatcgtgcctgtcttcaaaaacatttccctttttatactcattccccccaggcatggggtagtgtcagtcggactgcacagggaacacggtttccagtggctttggcccctactcgggaaacgtctgcctgttctcgatggtgatggggtggctgccattcccttggttttcctaagccctttctaacgagagtctcaaacaagcggaggcgagggccaattcaaccccattctttccagcgccccgcaccatagcacctgcccacctgagaaccaggaacgcaccctctctgtggagctctgactggtgtagctggaaacaaacagcaacttgcaaacggacgaagagcctgccgtgtgttaatcatttgccttacaagatgtaccagacggtttccagtactaacaaagggaataaaaatacctcacgccacaatccagcatattgatgttttaaggcaaaacaaaaaaaaaccaaaaaacaaaacaagaaaaacaaaaacgggtgggggtgggccgaaaaatttacccctcgttggggcgcgccaatgtatgcaccggccagggcaggacacgggccgaaagggggtcccaaaaacgggccggtgaacctgggtgggctggcacaggcggacacacccccgccgcacagaacaagaacacaacgtaagcaacgtacctgttcttacgctcttcgaacgacgacggcacaagataccaacagcaaatacaaagagagcaaaataacacaaccaacagacaaaacaagaaccacagacaacctacggaaccaacacgtaacagcgaagaagaaacgaaacaaccagagagacacaaacaacacagacacaagaacacaaactagaagaaccacaatgagcgaagcgagcagcgagggcacacgccaggggccgaacacaaggaacggccgagacagcgaaacaagaagggcaggaacagagcaacggaagacacataggagaacgcaagagagacgcaacaagaacgcaaacaagaccgagtagcaggaagacaacaagaaaagtggaaaaaggcgaaaaaaacgcgaaaagaaaaaaagagaaaaaacgccggaaaaaacacaaaaaacaacgcagaagacaaccaagaacaaacagtcaaagaacaaagaaacaagagcaacaaacagaaaacgaacaagaaacagaagaagcacaagaacacggagaaaaccagca

SEQ ID NO: 422386 - DNA, 3997 bp, Homo sapiens
catcaccaccaccgggttcaaacaaagcagcattctcctgtgtcttttcctcataagtaagaacaaggctccctgactggcagtcctcacctttccgagctgtctgtgaactcgcaggggggagtggcccctgccaacgtgaccttgtctcccaacctgagccccgacaccaagcaggcctctcccttgatcagcccgctgctgaatgaccaggcctgcccccggacggacgatgaggatgagggccggaggaagagattcccaactgataaagcgtacttcatagctaaggaagtgtctaccaccgagcgaacatatctgaaggatctcgaagttatcacttcgtggtttcagagcacagtgagcaaagaggacgccatgccggaagcactgaaaagtctcatattcccgaattttgaacctttgcacaaatttcatactaattttctcaaggaaattgagcaacgacttgccctgtgggaaggccgctcaaatgcccaaatcagagattaccaaagaatcggcgatgtcatgctgaagaacattcagggcatgaagcacctggcggctcacctgtggaagcacagcgaggccttggaggccctggagaatggaatcaagagctcccggcggctggagaacttctgcagagactttgagctgcagaaggtgtgttacctaccgctcaacaccttcctcctgcggccactgcaccggctcatgcactacaagcaggtcctggagcggctgtgcaaacaccacccgccgagccacgccgacttcagggactgccgagccgctttggcagagatcacggagatggtggcacagctccacggtacgatgatcaagatggagaatttccagaagctgcacgaactcaagaaagatttgattggcattgacaatcttgtggttccgggaagggagttcatccgtctgggcagcctcagcaagctctcggggaaggggctccagcagcgcatgttcttcctgttcaacgacgtcctgctatacacgagccgggggctgacggcctccaatcagtttaaagtccacgggcagctcccgctctatggcatgacgattgaggagagcgaagacgagtggggggtgccccactgcctgaccctccggggccagcggcagtccatcatcgtggccgccagttctcggtccgagatggagaagtgggttgaggacatccagatggccattgacctggcggagaagagcagcagccccgcccctgagttcctggccagcagcccccctgacaacaagtcccctgatgaagccaccgcggctgaccaggagtcagaggatgacctgagcgcctcgcgcacatcgctggagcgccaggccccgcaccgcggcaacacaatggtgcacgtgtgctggcaccgcaacaccagcgtctccatggtggacttcagcatcgcagtggagaatcagttgtctggaaacctgctgaggaaattcaaaaacagcaacgggtggcagaagctgtgggtggtgttcacaaacttctgcctgttcttctacaaatcacaccaggacaatcatccccttgccagcctgcctctgctcggctactcgctcaccatcccctctgagtccgagaacatccagaaagactacgtgttcaagctgcacttcaagtcccacgtctactacttcagggcggaaagcgagtacacgttcgaaaggtggatggaagtgatccgcagtgccaccagctctgcctcgcgaccccacgtgttgagccacaaagagtctcttgtgtattgatggccggacacactcgtttccgcagtggctgctttcctggaagacgtttcctttcttctgtattaatgaagcctggtaaaattaacacctgtctgaaaatcaaaaacatggcttcccagcagctctcctgtctccacagccgcgttttttaaccccgacctctcagcgtctgaatgaacagcgctcccacctccagtcctggcatccgctgggggcgctgttctttagctagtgccagtattaaaacattgtcattacgagagtgccaaatgacatcttccctccaccctgcccctgaaaaacagtacacacacatccgttcaacacaagacagggcaagtgtttttcttcctaaaaaaagttctttcttttattattttcacctattggctgctgcattttacgaagtggacttcccggtgtttgttgtttgtttgcaatacactcagtgcagccttaagcaaatgagatcattttcagatttcatttttttttttcagtctttctacttttgtaataataggaagttagtaggactcacttctctgattaataagcaatttgcagcacacagcgttccactgcggggtttcacgctcacctgaaaacacctgttcccaacctacttcttggtgcaagttgaccaaatcgttttaagtgggtaactctttccaaccgtagcagggttgttttctgttaagcaaagccgagatccagtgcaatacctggactgtcaccgtcctgtgagtggtgtacacaatgggaagataataagccgtggtgttttgctgtctgtctgtgtcacaagcatgaaaacccgtgtgtcattgatcagcaccatttgtggtatgttccgtgatgagcgtttagtgagcctgctggctgcagagcactatgaaatcatggtacgtagtccccggcacctgtcgttattcctatatcctcctgcaactgtggtttgaaactgcgcattctctagtagtatatatcgtgcctgtcttcaaaaacatttccctttttatactcattccccccaggcatggggtagtgtcagtcggactgcacagggaacacggtttccagtggctttggcccctactcgggaaacgtctgcctgttctcgatggtgatggggtggctgccattcccttggttttcctaagccctttctaacgagagtctcaaacaagcggaggcgagggccaattcaaccccattctttccagcgccccgcaccatagcacctgcccacctgagaaccaggaacgcaccctctctgtggagctctgactggtgtagctggaaacaaacagcaacttgcaaacggacgaagagcctgccgtgtgttaatcatttgccttacaagatgtaccagacggtttccagtactaacaaagggaataaaaatacctcacgccacaatccagcatattgatgttttaaggcaaaacaaaaaaaaaccaaaaaacaaaacaagaaaaacaaaaacgggtgggggtgggccgaaaaatttacccctcgttggggcgcgccaatgtatgcaccggccagggcaggacacgggccgaaagggggtcccaaaaacgggccggtgaacctgggtgggctggcacaggcggacacacccccgccgcacagaacaagaacacaacgtaagcaacgtacctgttcttacgctcttcgaacgacgacggcacaagataccaacagcaaatacaaagagagcaaaataacacaaccaacagacaaaacaagaaccacagacaacctacggaaccaacacgtaacagcgaagaagaaacgaaacaaccagagagacacaaacaacacagacacaagaacacaaactagaagaaccacaatgagcgaagcgagcagcgagggcacacgccaggggccgaacacaaggaacggccgagacagcgaaacaagaagggcaggaacagagcaacggaagacacataggagaacgcaagagagacgcaacaagaacgcaaacaagaccgagtagcaggaagacaacaagaaaagtggaaaaaggcgaaaaaaacgcgaaaagaaaaaaagagaaaaaacgccggaaaaaacacaaaaaacaacgcagaagacaaccaagaacaaacagtcaaagaacaaagaaacaagagcaacaaacagaaaacgaacaagaaacagaagaagcacaagaacacggagaaaaccagca

SEQ ID NO: 422387 - DNA, 3018 bp, Homo sapiens
acgcggccgctgcccgctttgcgccgctcctccctgcgcgagtagcgctggccccggcgtcgaggcggccatggcgacccggagcccgctccccacccaccccgcctgctccgccctcccctccgccccgcgccacctttgatggctcggacctcagccggccaccgccagccctgctcgcgcgcccgcgccgccgccgcccgcgggtattaatagccggcgccgccgcgccctcggccgccgggggcttgggagccgccgatcccggagcccgagccgggagagggagccgccgcagccgccggcgctgtggagatattctctaagccgctttcatcatgggagaaatagagcagaggccgaccccaggatcacgactgggggccccggaaaattcggggatcagtaccttggaacgtggacagaagccgcccccaacaccttcaggaaaactcgtgtccatcaaaatccagatgctggatgacacccaggaggcatttgaagttccacaaagagctcctgggaaggtgctgctggatgcagtttgcaaccacctcaacctcgtggaaggtgactattttggcctcgagtttcctgatcacaaaaagatcacggtgtggctggatctcctaaaacccattgtgaaacagattagaaggccaaagcacgttgttgttaagtttgtggtgaaattctttccgcctgaccacacacaactccaagaagaactcacaaggtacctgttcgcgctgcaggtgaagcaggacttggctcaaggcaggttgacgtgtaatgacaccagcgcagctctcttgatttcacacattgtgcaatctgagattggggattttgatgaagccttggacagagagcacttagcaaaaaataaatacatacctcagcaagacgcactagaggacaaaatcgtggaatttcaccataaccacattggacaaacaccagcagaatcagatttccagctcctagagattgcccgtcggctagagatgtatggaatccggttgcacccggccaaggacagggaaggcacgaagatcaatctggccgttgccaacacgggaattctagtgtttcagggtttcactaagatcaatgccttcaactgggccaaggtgcggaagctgagcttcaagaggaagcgctttctcatcaagctccggccagatgccaatagtgcgtaccaggataccttggaattcctgatggccagtcgggatttctgcaagtccttctggaaaatctgtgttgaacatcatgccttctttagactttttgaagagcccaaaccaaagcccaagcccgtcctctttagccgggggtcatcatttcggttcagtggtcggactcagaagcaggttctcgactatgttaaagaaggaggacataagaaggtgcagtttgaaaggaagcacagcaagattcattctatccggagccttgcttcacagcctacagaactgaattcggaagtgctggagcagtctcagcagagcaccagccttacatttggagaaggtgccgaatctccagggggccagagctgccggcgaggaaaggaaccgaaggtttccgccggggagccggggtcgcacccgagccctgcgccgaggagaagccccgcgggtaacaagcaggcggacggagccgcctcggcgcccacggaggaagaggaggaggtcgttaaggataggacccagcagagtaaacctcagcccccgcagccaagcacaggctccctgactggcagtcctcacctttccgagctgtctgtgaactcgcaggggggagtggcccctgccaacgtgaccttgtctcccaacctgagccccgacaccaagcaggcctctcccttgatcagcccgctgctgaatgaccaggcctgcccccggacggacgatgaggatgagggccggaggaagagattcccaactgataaagcgtacttcatagctaaggaagtgtctaccaccgagcgaacatatctgaaggatctcgaagttatcacttcgtggtttcagagcacagtgagcaaagaggacgccatgccggaagcactgaaaagtctcatattcccgaattttgaacctttgcacaaatttcatactaattttctcaaggaaattgagcaacgacttgccctgtgggaaggccgctcaaatgcccaaatcagagattaccaaagaatcggcgatgtcatgctgaagaacattcagggcatgaagcacctggcggctcacctgtggaagcacagcgaggccttggaggccctggagaatggaatcaagagctcccggcggctggagaacttctgcagagactttgagctgcagaaggtgtgttacctaccgctcaacaccttcctcctgcggccactgcaccggctcatgcactacaagcaggtcctggagcggctgtgcaaacaccacccgccgagccacgccgacttcagggactgccgagccgctttggcagagatcacggagatggtggcacagctccacggtacgatgatcaagatggagaatttccagaagctgcacgaactcaagaaagatttgattggcattgacaatcttgtggttccgggaagggtaagcagcagtggcctcactatgcactgcgcggggagcagaaaggaggcatcggagggacttacatttgaaccttttgaagagagacccttgcaaagcaaaatgtcctctttccatccacctgggagacaactggaaaaacacaacagtgtcgttagttcagaatcattgtgttcggaggagataaagcaatcctctgacctcatattctgctttttctccttacggggtgattcgcttctttaccttttcccctaccatatcccacagaagatttgagattgcttattttattttttttaaatgtacataaatgaaaatggaaaattaaaaaaaaaattaggtaaatagtaataaagccagaaaggtagtgcattaaattatgctagaaattcccatgcaggta

SEQ ID NO: 422388 - DNA, 409 bp, Homo sapiens
gcggcctgcccaaagtgtgtgtgtgtgtggcctttccttaatagttgagcttttagcatctgcttgttcacgtctgtgggctttggggtcagggtgccaggaggggcagactagacccctgtctgcgccgagtgcctgtgggccagcaactgaggcagggccgtccacctgtcaatcaccgttctttgggaggctccttgcagtgccctatacacacactagcttcacagaggaggggacagtccctggagagtagacattgccagaaattataacaccagtgagagtcaggttaactctcggttttagattgcaaacttttgtctttgtacctatgtcttaggaacattactcatacttttactagaagtgttttttaattagttgttcctggcttttcagccccttt

SEQ ID NO: 422389 - DNA, 1470 bp, Homo sapiens
ccggagcggggatcaccttaacttgactgtggtcccccagccctccaagaaatgcccataaaccaaggaggagagggtaaaaaatagaagaatacatggaattggggagaagaatgggaaaaaagatgggagtgactgcataatgtcagcattttgtgcttttggctcagcatttggattggatggaggattttcatcctgaaaccagccctccgtcgccaccgaccatggaataattgtcttccacgaaactcttccctggtgccaaaaagggttttatgtatatatttgagagctccacatccctggatctgaatcctccacttcccactggaaccatgcccctcccagtcccgtttctcccctctaggggatggaggctgagagaccccaggaagaagaggatggtgagcagggcccccctcaggatgaggaaggctggccccctccaaactccaccactcggccttggcgatctgctcctccatcccctcctcctccagggacccgccacacagccctgggaccccgctcggcctccctgctctccctgcagactgaactccttctggacctggtggctgaagcccagtcccgccgcctggaggagcagagggccaccttctacaccccccaaaacccctcaagcctagcccctgccccactccgtcctctcgaggacagagaacagctttacagcactatcctcagtcaccagtgccagcggatggaagcccagcggtcagagcctcccctccctccaggggggcaagagctcctggagttgctgctgagagttcagggtgggggtcgaatggaggagcaaaggtcccggccccccacacacacctgctgagacttgagccccaaccagcccttccttgccactggtctcaaagctgggcagcccattgcatgccctcaactcttgcttggcaggggtaccagagactgaaagacacggcacaaatctcaatattcatctcccacatcaccttccctgggaactggacagggtgaaagtcctcaaactctgggaacaggcgagatggaacagggatttaactccccgcccacaggtccatgggagcttgaggcagtaagggggatcccaggcacccatctcaaggagtggctgggagtcttttccctaacttgtggggacaccaccagttgtcaagctactaggcagtagggtctgagggctcaggcctccacctgagaggttataacctgagagacagctctacccttcctcccagtaagaagggaaggtgggtgggcacctgagagattaagactattctcccagtcccactaccagcacccccgatccctgagactgaggggtttacgggctgtgaatggaccttcagccctgcccaccctccctccccactgctgctgagtctgtctgatgttttggttgtgtgaataaatataattcccctctggaaaaaaaaaaaggta

SEQ ID NO: 422390 - DNA, 1509 bp, Homo sapiens
gctagttcctgtgttgacagaaagagcagaagaggaggtggggtggagggagcagagccagggattaggggactactgaggctctggagatgagaccgccaggagtccttccccaccatgagccccctccactcctgcagctggaggagtttttcccagtctcagtgctgccctggggcgagagagactgaacaagctgtttgggtgggaagagaatggaggaagttgacagggatgggcggggcccgtgggggggctgaccaggaacccagcttcctgctcagtacccaggcatccagcccccagctcacccccaccccttccagcccccactcccctcaggaacccaaggttccagccctcctcccaaatcccagccacccctcccccaccagtttctcccctctaggggatggaggctgagagaccccaggaagaagaggatggtgagcagggcccccctcaggatgaggaaggctggccccctccaaactccaccactcggccttggcgatctgctcctccatcccctcctcctccagggacccgccacacagccctgggaccccgctcggcctccctgctctccctgcagactgaactccttctggacctggtggctgaagcccagtcccgccgcctggaggagcagagggccaccttctacaccccccaaaacccctcaagcctagcccctgccccactccgtcctctcgaggacagagaacagctttacagcactatcctcagtcaccagtgccagcggatggaagcccagcggtcagagcctcccctccctccaggggggcaagagctcctggagttgctgctgagagttcagggtgggggtcgaatggaggagcaaaggtcccggccccccacacacacctgctgagacttgagccccaaccagcccttccttgccactggtctcaaagctgggcagcccattgcatgccctcaactcttgcttggcaggggtaccagagactgaaagacacggcacaaatctcaatattcatctcccacatcaccttccctgggaactggacagggtgaaagtcctcaaactctgggaacaggcgagatggaacagggatttaactccccgcccacaggtccatgggagcttgaggcagtaagggggatcccaggcacccatctcaaggagtggctgggagtcttttccctaacttgtggggacaccaccagttgtcaagctactaggcagtagggtctgagggctcaggcctccacctgagaggttataacctgagagacagctctacccttcctcccagtaagaagggaaggtgggtgggcacctgagagattaagactattctcccagtcccactaccagcacccccgatccctgagactgaggggtttacgggctgtgaatggaccttcagccctgcccaccctccctccccactgctgctgagtctgtctgatgttttggttgtgtgaataaatataattcccctctggaaaaaaaaaaaggta

SEQ ID NO: 422391 - DNA, 1406 bp, Homo sapiens
gctagttcctgtgttgacagaaagagcagaagaggaggtggggtggagggagcagagccagggattaggggactactgaggctctggagatgagaccgccaggagtccttccccaccatgagccccctccactcctgcagctggaggagtttttcccagtctcagtgctgccctggggcgagagagactgaacaagctgtttgggtgggaagagaatggaggaagttgacagggatgggcggggcccgtgggggggctgaccaggaacccagcttcctgctcagtacccaggcatccagcccccagctcacccccaccccttccagcccccactcccctcaggaacccaaggttccagccctcctcccaaatcccagccacccctcccccaccagtttctcccctctaggggatggaggctgagagaccccaggaagaagaggatggtgagcagccctgggaccccgctcggcctccctgctctccctgcagactgaactccttctggacctggtggctgaagcccagtcccgccgcctggaggagcagagggccaccttctacaccccccaaaacccctcaagcctagcccctgccccactccgtcctctcgaggacagagaacagctttacagcactatcctcagtcaccagtgccagcggatggaagcccagcggtcagagcctcccctccctccaggggggcaagagctcctggagttgctgctgagagttcagggtgggggtcgaatggaggagcaaaggtcccggccccccacacacacctgctgagacttgagccccaaccagcccttccttgccactggtctcaaagctgggcagcccattgcatgccctcaactcttgcttggcaggggtaccagagactgaaagacacggcacaaatctcaatattcatctcccacatcaccttccctgggaactggacagggtgaaagtcctcaaactctgggaacaggcgagatggaacagggatttaactccccgcccacaggtccatgggagcttgaggcagtaagggggatcccaggcacccatctcaaggagtggctgggagtcttttccctaacttgtggggacaccaccagttgtcaagctactaggcagtagggtctgagggctcaggcctccacctgagaggttataacctgagagacagctctacccttcctcccagtaagaagggaaggtgggtgggcacctgagagattaagactattctcccagtcccactaccagcacccccgatccctgagactgaggggtttacgggctgtgaatggaccttcagccctgcccaccctccctccccactgctgctgagtctgtctgatgttttggttgtgtgaataaatataattcccctctggaaaaaaaaaaaggta

SEQ ID NO: 422392 - DNA, 1312 bp, Homo sapiens
gctagttcctgtgttgacagaaagagcagaagaggaggtggggtggagggagcagagccagggattaggggactactgaggctctggagatgagaccgccaggagtccttccccaccatgagccccctccactcctgcagctggaggagtttttcccagtctcagtgctgccctggggcgagagagactgaacaagctgtttgggtgggaagagaatggaggctgagagaccccaggaagaagaggatggtgagcagggcccccctcaggatgaggaaggctggccccctccaaactccaccactcggccttggcgatctgctcctccatcccctcctcctccagggacccgccacacagccctgggaccccgctcggcctccctgctctccctgcagactgaactccttctggacctggtggctgaagcccagtcccgccgcctggaggagcagagggccaccttctacaccccccaaaacccctcaagcctagcccctgccccactccgtcctctcgaggacagagaacagctttacagcactatcctcagtcaccagtgccagcggatggaagcccagcggtcagagcctcccctccctccaggggggcaagagctcctggagttgctgctgagagttcagggtgggggtcgaatggaggagcaaaggtcccggccccccacacacacctgctgagacttgagccccaaccagcccttccttgccactggtctcaaagctgggcagcccattgcatgccctcaactcttgcttggcaggggtaccagagactgaaagacacggcacaaatctcaatattcatctcccacatcaccttccctgggaactggacagggtgaaagtcctcaaactctgggaacaggcgagatggaacagggatttaactccccgcccacaggtccatgggagcttgaggcagtaagggggatcccaggcacccatctcaaggagtggctgggagtcttttccctaacttgtggggacaccaccagttgtcaagctactaggcagtagggtctgagggctcaggcctccacctgagaggttataacctgagagacagctctacccttcctcccagtaagaagggaaggtgggtgggcacctgagagattaagactattctcccagtcccactaccagcacccccgatccctgagactgaggggtttacgggctgtgaatggaccttcagccctgcccaccctccctccccactgctgctgagtctgtctgatgttttggttgtgtgaataaatataattcccctctggaaaaaaaaaaaggta

SEQ ID NO: 422393 - DNA, 1178 bp, Homo sapiens
gctagttcctgtgttgacagaaagagcagaagaggaggtggggtggagggagcagagccagggattaggggactactgaggctctggagatgagaccgccaggagtccttccccaccatgagccccctccactcctgcagctggaggagtttttcccagtctcagtgctgccctggggcgagagagactgaacaagctgtttgggtgggaagagaatggaggaagttgacagggatgggcggggcccgtgggggggctgaccaggaacccagcttcctgctcagtacccaggcatccagcccccagctcacccccaccccttccagcccccactcccctcaggaacccaaggttccagccctcctcccaaatcccagccacccctcccccaccagtttctcccctctaggggatggaggctgagagaccccaggaagaagaggatggtgagcagggcccccctcaggatgaggaaggctggccccctccaaactccaccactcggccttggcgatctgctcctccatcccctcctcctccagggacccgccacacagctgctgagacttgagccccaaccagcccttccttgccactggtctcaaagctgggcagcccattgcatgccctcaactcttgcttggcaggggtaccagagactgaaagacacggcacaaatctcaatattcatctcccacatcaccttccctgggaactggacagggtgaaagtcctcaaactctgggaacaggcgagatggaacagggatttaactccccgcccacaggtccatgggagcttgaggcagtaagggggatcccaggcacccatctcaaggagtggctgggagtcttttccctaacttgtggggacaccaccagttgtcaagctactaggcagtagggtctgagggctcaggcctccacctgagaggttataacctgagagacagctctacccttcctcccagtaagaagggaaggtgggtgggcacctgagagattaagactattctcccagtcccactaccagcacccccgatccctgagactgaggggtttacgggctgtgaatggaccttcagccctgcccaccctccctccccactgctgctgagtctgtctgatgttttggttgtgtgaataaatataattcccctctggaaaaaaaaaaaggta

SEQ ID NO: 422394 - DNA, 1378 bp, Homo sapiens
gctagttcctgtgttgacagaaagagcagaagaggaggtggggtggagggagcagagccagggattaggggactactgaggctctggagatgagaccgccaggagtccttccccaccatgagccccctccactcctgcagctggaggagtttttcccagtctcagtgctgccctggggcgagagagactgaacaagctgtttgggtgggaagagaatggaggaagttgacagggatgggcggggcccgtgggggggctgaccaggaacccagcttcctgctcagtacccaggcatccagcccccagctcacccccaccccttccagcccccactcccctcaggaacccaaggttccagccctcctcccaaatcccagccacccctcccccaccagtttctcccctctaggggatggaggctgagagaccccaggaagaagaggatggtgagcagggcccccctcaggatgaggaaggctggccccctccaaactccaccactcggccttggcgatctgctcctccatcccctcctcctccagggacccgccacacagccctgggaccccgctcggcctccctgctctccctgcagactgaactccttctggacctggtggctgaagcccagtcccgccgcctggaggagcagagggccaccttctacaccccccaaaacccctcaagcctagcccctgccccactccgtcctctcgaggacagagaacagctttacagcactatcctcagtcaccagtgccagcggatggaagcccagcggtcagagcctcccctccctccaggggggcaagagctcctggagttgctgctgagagttcagggtgggggtcgaatggaggagcaaaggtcccggccccccacacacacctgctgagacttgagccccaaccagcccttccttgccactggtctcaaagctgggcagcccattgcatgccctcaactcttgcttggcaggggtaccagagactgaaagacacggcacaaatctcaatattcatctcccacatcaccttccctgggaactggacagggtgaaagtcctcaaactctgggaacaggcgagatggaacagggatttaactccccgcccacaggtccatgggagcttgaggcagtaagggggatcccaggcacccatctcaaggagtggctgggagtcttttccctaacttgtggggacaccaccagttgtcaagctactaggcagtagggtctgagggctcaggcctccacctgagaggttataacctgagagacagctctacccttccctccctccccactgctgctgagtctgtctgatgttttggttgtgtgaataaatataattcccctctggaaaaaaaaaaaggta

SEQ ID NO: 422395 - DNA, 511 bp, Homo sapiens
gtggctagcgagcgagggctctgtgcgtctgcgtagttcgctcacctccctttctaactccgctgccgccatggctcctgtgaaaaagcttgtggtgaaggggggcaaaaaaaagaagcaagttctgaagttcactcttgattgcacccaccctgtagaagatggaatcatggatgctgccaattttgagcagtttttgcaagaaaggatcaaagtgaacggaaaagctgggaaccttggtggaggggtggtgaccatcgaaaggagcaagagcaagatcaccgtgacatccgaggtgcctttctccaaaaggtatttgaaatatctcaccaaaaaatatttgaagaagaataatctacgtgactggttgcgcgtagttgctaacagcaaagagagttacgaattacgttacttccagattaaccaggacgaagaagaggaggaagacgaggattaaatttcatttatctggaaaattttgtatgagttcttgaataaaacttgggaacca

SEQ ID NO: 422396 - DNA, 868 bp, Homo sapiens
acacctaggctaggtacgaggccgcgggttaatcggccgagaaaaagcttgtggtgaaggggggcaaaaaaaagaagcaagttctgaagttcactcttgattgcacccaccctgtagaagatggaatcatggatgctgccaattttgagcagtttttgcaagaaaggatcaaagtgaacggaaaagctgggaaccttggtggaggggtggtgaccatcgaaaggagcaagagcaagatcaccgtgacatccgaggtgcctttctccaaaaggtatttgaaatatctcaccaaaaaatatttgaagaagaataatctacgtgactggttgcgcgtagttgctaacagcaaagagagttacgaattacgttacttccagattaaccaggacgaagaagaggaggaagacgaggattaaatttcatttatctggaaaattttgtatgagttcttgaataaaacttgggaaccaaaatggtggtttatccttgtatctctgcagtgtggattgaacagaaaattggaaatcatagtcaaagggcttcccttggttcgccactcatttatttgtaacttgacttctttttttttctgcttaaaaatttcaattctcgtggtaataccagagtagaaggagagggtgactttaccgaactgacagccattggggaggcagatgcgggtgtggaggtgtgggctgaaggtagtgactgtttgattttaaaaagtgtgactgtcagttgtatctgttgcttttctcaatgattcagggatacaaatgggcttctctcattcattaaaagaaaacgcgacatctttctaagattctctgtgggaaaatgactgtcaataaaatgcgggtttctgggc

SEQ ID NO: 422397 - DNA, 922 bp, Homo sapiens
  misc_feature (802)..(802): n is a, c, g, or t
  misc_feature (849)..(849): n is a, c, g, or t
  misc_feature (873)..(874): n is a, c, g, or t
  misc_feature (912)..(912): n is a, c, g, or t
  misc_feature (921)..(921): n is a, c, g, or t
gtggctagcgagcgagggctctgtgcgtctgcgtagttcgctcacctccctttctaactccgctgccgccatggctcctgtgaaaaagcttgtggtgaaggggggcaaaaaaaagaagcaagttctgaagttcactcttgattgcacccaccctgtagaagatggaatcatggatgctgccaattttgagcagtttttgcaagaaaggatcaaagtgaacggaaaagctgggaaccttggtggaggggtggtgaccatcgaaaggagcaagagcaagatcaccgtgacatccgaggtgcctttctccaaaaggtatttgaaatatctcaccaaaaaatatttgaagaagaataatctacgtgactggttgcgcgtagttgctaacagcaaagagagttacgaattacgttacttccagattaaccaggacgaagaagaggaggaagacgaggattaaatttcatttatctggaaaattttgtatgagttcttgaataaaacttgggaaccaaaatggtggtttatccttgtatctctgcagtgtggattgaacagaaaattggaaatcatagtcaaagggcttcccttggttcgccactcatttatttgtaacttgacttctttttttttctgcttaaaaatttcaattctcgtggtaataccagagtagaaggagagggtgactttaccgaactgacagccattggggaggcagatgcgggtgtggaggtgtgggctgaaggtagtgactgtttgattttaaaaagtgtgactgtcagttgtatctgttgcttttctgtanccggtttgccttttccccaagggattcaagggattccaaaatggggnttcccccccaaatccatttaaagnnaaaaacccgacaaccctttcctaaagaattccccgggngggaaaaant

SEQ ID NO: 422398 - DNA, 972 bp, Homo sapiens
tattttcaccccctcacttcccgcaccccaccaaacacccccccccccttagaaaaagcttgtggtgaaggggggcaaaaaaaagaagcaagttctgaagttcactcttgattgcacccaccctgtagaagatggaatcatggatgctgccaattttgagcagtttttgcaagaaaggatcaaagtgaacggaaaagctgggaaccttggtggaggggtggtgaccatcgaaaggagcaagagcaagatcaccgtgacatccgaggtgcctttctccaaaaggtatttgaaatatctcaccaaaaaatatttgaagaagaataatctacgtgactggttgcgcgtagttgctaacagcaaagagagttacgaattacgttacttccagattaaccaggacgaagaagaggaggaagacgaggattaaatttcatttatctggaaaattttgtatgagttcttgaataaaacttgggaaccaaaatggtggtttatccttgtatctctgcagtgtggattgaacagaaaattggaaatcatagtcaaagggcttcccttggttcgccactcatttatttgtaacttgacttctttttttttctgcttaaaaatttcaattctcgtggtaataccagagtagaaggagagggtgactttaccgaactgacagccattggggaggcagatgcgggtgtggaggtgtgggctgaaggtagtgactgtttgattttaaaaagtgtgactgtcagttgtatctgttgcttttctcaatgattcagggatacaaatgggcttctctcattcattaaaagaaaacgcgacatctttctaagattctctgtgggaaaatgactgtcaataaaatgcgggtttctgggcaaaaaaaaaatggctcttggctacggggactttgggcctcccttaggagggaataagacttctcatactctctcttggccttgtcggaaacgg

SEQ ID NO: 422399 - DNA, 1129 bp, Homo sapiens
actggaaccttgtaggatgtgctttgccgggtggtttggaagtactaatgcatagatgaagcgaatcaaaatgtcagaagttcttgacggtagtgttgtaataagattctaggttttagccttaaccttgtccaagctggagtggacaggcacctagaatactttgcaactcccttcatgagaaggtggatgagacaggattaagggagatgagctaagacggatcaggaccctactctgaacatgtaggacaaggattgatttcatatgaaaattgtgggtatgcaaggcattttgtatgcctgcactctaattttggaaaaatagtatttttttgaaattgggaatgttagggcaaacaaaaggaagtgttcattttattgtggttcataaactaagagaccttcatgcctgtagagattggggagactggaaagtttgagtgagtcaagagtgctagaatgatttccccatcaaaagggcatgaccccaggccccaagcttgtacagcagcatctgccccattatacctctggcactcaggcagtgatgcctcttggccctctggcaaagggagcacacttccgttagttttgtatttgtatggacttttatacctatgacgtttctggttctgttaatcttgtttttccgactgactgaaacttcatctctgttatcatttgtgtattttcttgtgaaaaagcttgtggtgaaggggggcaaaaaaaagaagcaagttctgaagttcactcttgattgcacccaccctgtagaagatggaatcatggatgctgccaattttgagcagtttttgcaagaaaggatcaaagtgaacggaaaagctgggaaccttggtggaggggtggtgaccatcgaaaggagcaagagcaagatcaccgtgacatccgaggtgcctttctccaaaaggtatttgaaatatctcaccaaaaaatatttgaagaagaataatctacgtgactggttgcgcgtagttgctaacagcaaagagagttacgaattacgttacttccagattaaccaggacgaagaagaggaggaagacgaggattaaatttcatttatctggaaaattttgtatgagttcttgaataaaacttgggaacca

SEQ ID NO: 422400 - DNA, 460 bp, Homo sapiens
ggggtacgatatcgtcgacccacgcgtccggaaaaagcttgtggtgaaggggggcaaaaaaaagaagcaagttctgaagttcactcttgattgcacccaccctgtagaagatggaatcatggatgctgccaattttgagcagtttttgcaagaaaggatcaaagtgaacggaaaagctgggaaccttggtggaggggtggtgaccatcgaaaggagcaagagcaagatcaccgtgacatccgaggtgcctttctccaaaaggtatttgaaatatctcaccaaaaaatatttgaagaagaataatctacgtgactggttgcgcgtagttgctaacagcaaagagagttacgaattacgttacttccagattaaccaggacgaagaagaggaggaagacgaggattaaatttcatttatctggaaaattttgtatgagttcttgaataaaacttgggaacca

SEQ ID NO: 422401 - DNA, 728 bp, Homo sapiens
gtggctagcgagcgagggctctgtgcgtctgcgtagttcgctcacctccctttctaactccgctgccgccatggctcctgtgaaaaagcttgtggtgaaggggggcaaaaaaaagaagcaagttctgaagttcactcttgattgcacccaccctgtagaagatggaatcatggatgctgccaattttgagcagtttttgcaagaaaggatcaaagtgaacggaaaagctgggaaccttggtggaggggtggtgaccatcgaaaggagcaagagcaagatcaccgtgacatccgaggtgcctttctccaaaaggtatttgaaatatctcaccaaaaaatatttgaagaagaataatctacgtgactggttgcgcgtagttgctaacagcaaagagagttacgaattacgttacttccagattaaccaggacgaagaagaggaggaagacgaggattaaatttcatttatctggaaaattttgtatgagttcttgaataaaacttgggaaccaaaaaaaaaaaaacaaaaaaaaaaaaaaaaaaaaaaaaaaaaaagggggggggggctttggcccaagtcaattttagatctcagcaagcttatgcatggcggccgaatttcgagctactttgcccaatttccccctatggggggccgattaccaataactggccgcggtttacaacgttgggactgacccttgggttacccacttatccctttgggcc

SEQ ID NO: 422402 - DNA, 785 bp, Homo sapiens
  misc_feature (33)..(33): n is a, c, g, or t
ccaaccatcccttacccaaaaaaaaaaaccccnacctcgagatcacgggatgctgccaattttgagcagtttttgcaagaaaggatcaaagtgaacggaaaagctgggaaccttggtggaggggtggtgaccatcgaaaggagcaagagcaagatcaccgtgacatccgaggtgcctttctccaaaaggtatttgaaatatctcaccaaaaaatatttgaagaagaataatctacgtgactggttgcgcgtagttgctaacagcaaagagagttacgaattacgttacttccagattaaccaggacgaagaagaggaggaagacgaggattaaatttcatttatctggaaaattttgtatgagttcttgaataaaacttgggaaccaaaatggtggtttatccttgtatctctgcagtgtggattgaacagaaaattggaaatcatagtcaaagggcttcccttggttcgccactcatttatttgtaacttgacttctttttttttctgcttaaaaatttcaattctcgtggtaataccagagtagaaggagagggtgactttaccgaactgacagccattggggaggcagatgcgggtgtggaggtgtgggctgaaggtagtgactgtttgattttaaaaagtgtgactgtcagttgtatctgttgcttttctcaatgattcagggatacaaatgggcttctctcattcattaaaagaaaacgcgacatctttctaagattctctgtgggaaaatgactgtcaataaaatgcgggtttctgggc

SEQ ID NO: 422403 - DNA, 818 bp, Homo sapiens
ggggtacgatatcgtcgacccacgcgtccggaaaaagcttgtggtgaaggggggcaaaaaaaagaagcaagttctgaagttcactcttgattgcacccaccctgtagaagatggaatcatggatgctgccaattttgagcagtttttgcaagaaaggatcaaagtgaacggaaaagctgggaaccttggtggaggggtggtgaccatcgaaaggagcaagagcaagatcaccgtgacatccgaggtgcctttctccaaaaggtatttgaaatatctcaccaaaaaatatttgaagaagaataatctacgtgactggttgcgcgtagttgctaacagcaaagagagttacgaattacgttacttccagattaaccaggacgaagaagaggaggaagacgaggattaaatttcatttatctggaaaattttgtatgagttcttgaataaaacttgggaaccaaaaaaaaaaaaacaaaaaaaaaaaaaaaaaaaaaaaaaaaaaagggggggggggaaaaaaatttccccgaggggggcccaaatttaggggtaccaggttttttggtacaagggggccccaaaaaggggggggaataaaaaggataggaaggggcagggttaaaaaacggtcgtgcgggaaaaagggtacttgggaacgttggtagagagacctatatttctggggggggacaaatattgggaccacaacctaagaaattaaaagcctaggggaaatttaacatttcagttgttgtgggtaccagttaattgtttgcggtggaaattggtaggattattgaatagagaatatatataga

SEQ ID NO: 422404 - DNA, 638 bp, Homo sapiens
acacctaggctaggtacgaggccgcgggttaatcggccgaggtatttgaaatatctcaccaaaaaatatttgaagaagaataatctacgtgactggttgcgcgtagttgctaacagcaaagagagttacgaattacgttacttccagattaaccaggacgaagaagaggaggaagacgaggattaaatttcatttatctggaaaattttgtatgagttcttgaataaaacttgggaaccaaaatggtggtttatccttgtatctctgcagtgtggattgaacagaaaattggaaatcatagtcaaagggcttcccttggttcgccactcatttatttgtaacttgacttctttttttttctgcttaaaaatttcaattctcgtggtaataccagagtagaaggagagggtgactttaccgaactgacagccattggggaggcagatgcgggtgtggaggtgtgggctgaaggtagtgactgtttgattttaaaaagtgtgactgtcagttgtatctgttgcttttctcaatgattcagggatacaaatgggcttctctcattcattaaaagaaaacgcgacatctttctaagattctctgtgggaaaatgactgtcaataaaatgcgggtttctgggc

SEQ ID NO: 422405 - DNA, 892 bp, Homo sapiens
gtggctagcgagcgagggctctgtgcgtctgcgtagttcgctcacctccctttctaactccgctgccgccatggctcctgtgaaaaagcttgtggtgaaggggggcaaaaaaaagaagcaagttctgaagttcactcttgattgcacccaccctgtagaagatggaatcatggatgctgccaattttgagcagtttttgcaagaaaggatcaaagtgaacggaaaagctgggaaccttggtggaggggtggtgaccatcgaaaggagcaagagcaagatcaccgtgacatccgaggtgcctttctccaaaaggtatttgaaatatctcaccaaaaaatatttgaagaagaataatctacgtgactggttgcgcgtagttgctaacagcaaagagagttacgaattacgttacttccagattaaccaggacgaagaagatccctttgtgtctcattgctgtacattgctgggataagcactatggctttcagctctatcagagtgaccctagtggaaattacgggggatggaaggcacatgcatgaaacataatagcgctgagctgtgtcactgttgaaacacgactataagaaggcacaaatgaccttgaagtccgcactggcttagctatcaacgtactacataagaccatggatgttagtaaactctctgctgaacaacggggaatttgcacccttacaacgagagatgcacgaccggaatcagagttctcacacaaacgaagggggcagtggtcaaacacgaggagagaagcaagctgggcaaacaaacacaacaacacaaactttgcgccccccccagaaatttaaaacgtgggccgcccggtaaacatggcactgtccaacacgtgcgctgggtccaaaaccgggcc

SEQ ID NO: 422406 - DNA, 332 bp, Homo sapiens
ctactactactaaattccggccgcgtcgaccatggctcctgtgtggcaatgtcccttaaccatgattattaactaagtttgtggcttgagtttacaaattctacttgttgcattgatgttcccatgtagtaagtcatttttagtttggttgtgaaaaaaccctgggctgaagttggcatttcagttaaaagaaaaaaagaaactagtcccagatttgaaaacttgtaataaaattgaaactcactggttttctatgtctttttgaactcttgtaatcgagttttgatcatattttctattaaagtggctaacacctggctactcttactgta

SEQ ID NO: 422407 - DNA, 876 bp, Homo sapiens
gtggctagcgagcgagggctctgtgcgtctgcgtagttcgctcacctccctttctaactccgctgccgccatggctcctgtgaaaaagcttgtggtgaaggggggcaaaaaaaagaagcaagttctgaagttcactcttgattgcacccaccctgtagaagatggaatcatggatgctgccaattttgagcagtttttgcaagaaaggatcaaagtgaacggaaaagctgggaaccttggtggaggggtggtgaccatcgaaaggagcaagagcaagatcaccgtgacatccgaggtgcctttctccaaaaggtatttgaaatatctcacaaaaaaaaaaaaagaaaaaaaaaaattgggggcattttatatttgcgggggggggaaaaaagggggtatgggaagtgggcagtgggctcattagggggttcccgtggaccccaagttttttgggtccaagggggggagacttggcggggctcccaataaaaggggagggcggaattaaattgggaaaaggccgggtaaccttgatatgtttggaaaaagggagacgaagaacagcgcagacagcaccgcgccacaggaaacgcggacataacccaggtaccacagaacagagaggggcctcgaaagccaccataacacaggagcacaaaagaacaacattcgagagcataaacaacatggacgatacattaaatcgaaaaacagacgtacaccgaaaggaacgatatagtaagaagcgaccagagacaagcaagccagactaggagcagaagaaaggaagcaggcagctgaacgaacagacgaccaaacgagagctacggagagcaatcaacgcgagaggcgcttcgcacaagcaaaggaggacaa

SEQ ID NO: 422408 - DNA, 2109 bp, Homo sapiens
gtggctagcgagcgagggctctgtgcgtctgcgtagttcgctcacctccctttctaactccgctgccgccatggctcctgtgaaaaagcttgtggtgaaggggggcaaaaaaaagaagcaagttctgaagttcactcttgattgcacccaccctgtagaagatggaatcatggatgctgccaattttgagcagtttttgcaagaaaggatcaaagtgaacggaaaagctgggaaccttggtggaggggtggtgaccatcgaaaggagcaagagcaagatcaccgtgacatccgaggtgcctttctccaaaaggtatttgaaatatctcaccaaaaaatatttgaagaagaataatctacgtgactggttgcgcgtagttgctaacagcaaagagagttacgaattacgttacttccagattaaccaggacgaagaagaggaggaagacgaggattaaatttcatttatctggaaaattttgtatgagttcttgaataaaacttgggaaccaaaatggtggtttatccttgtatctctgcagtgtggattgaacagaaaattggaaatcatagtcaaagggcttcccttggttcgccactcatttatttgtaacttgacttctttttttttctgcttaaaaatttcaattctcgtggtaataccagagtagaaggagagggtgactttaccgaactgacagccattggggaggcagatgcgggtgtggaggtgtgggctgaaggtagtgactgtttgattttaaaaagtgtgactgtcagttgtatctgttgcttttctcaatgattcagggatacaaatgggcttctctcattcattaaaagaaaacgcgacatctttctaagattctctgtgggaaaatgactgtcaataaaatgcgggtttctgggccattcgtcttactttcattttttgattacaaatttctcttgacgcacacaattatgtctgctaatcctcttcttcctagagagagaaactgtgctccttcagtgttgctgccataaaggggtttggggaatcgattgtaaaagtcccaggttctaaattaactaaatgtgtacagaaatgaacgtgtaagtaatgtttctacaggtctttgcaacaaactgtcactttcgtctccagcagagggagctgtaggaatagtgcttccagatgtggtctcccgtgtggggcccagcaatgggggcccctgatgccaagagctctggaggttcttgaaagaggggacacgaaggaggagtgactgggaagcctcccatgccaaggaggtgggaggtgccctggaaatagctgcctcatgccacttaggccatgactggatttaatgtcagtggtgtgccacagtgcagaggctagacaactgaaaggggctaccaaggctgggaaaaaaatgcaattgttgctgtgagtgactttgaaagactctggtgccttgtggtgcccttctgaaattcaaacagtaatgcaaaagtgtctgcattagaatttacggtgtctaaaattcatgtttttaaaagagcttgcctacagatggtttccacacttgaaattgtgccctgcgagttgcatagctggaagttcaatgctcagtcctaccttggctcccattaaacatttggtgctctgtggattgagttgaacgtgttgaggctttgcaatttcacttgtgttaaaggctctggcatttttccatttctatgcaaatttctttgaagcagaattgcttgcatatttcttctctgccgtcacagaaagcagagtttctttcaaacttcactgaggcatcagttgctctttggcaatgtcccttaaccatgattattaactaagtttgtggcttgagtttacaaattctacttgttgcattgatgttcccatgtagtaagtcatttttagtttggttgtgaaaaaaccctgggctgaagttggcatttcagttaaaagaaaaaaagaaactagtcccagatttgaaaacttgtaataaaattgaaactcactggttttctatgtctttttgaactcttgtaatcgagttttgatcatattttctattaaagtggctaacacctggctactcttactgta

SEQ ID NO: 422409 - DNA, 2727 bp, Homo sapiens
actggaaccttgtaggatgtgctttgccgggtggtttggaagtactaatgcatagatgaagcgaatcaaaatgtcagaagttcttgacggtagtgttgtaataagattctaggttttagccttaaccttgtccaagctggagtggacaggcacctagaatactttgcaactcccttcatgagaaggtggatgagacaggattaagggagatgagctaagacggatcaggaccctactctgaacatgtaggacaaggattgatttcatatgaaaattgtgggtatgcaaggcattttgtatgcctgcactctaattttggaaaaatagtatttttttgaaattgggaatgttagggcaaacaaaaggaagtgttcattttattgtggttcataaactaagagaccttcatgcctgtagagattggggagactggaaagtttgagtgagtcaagagtgctagaatgatttccccatcaaaagggcatgaccccaggccccaagcttgtacagcagcatctgccccattatacctctggcactcaggcagtgatgcctcttggccctctggcaaagggagcacacttccgttagttttgtatttgtatggacttttatacctatgacgtttctggttctgttaatcttgtttttccgactgactgaaacttcatctctgttatcatttgtgtattttcttgtgaaaaagcttgtggtgaaggggggcaaaaaaaagaagcaagttctgaagttcactcttgattgcacccaccctgtagaagatggaatcatggatgctgccaattttgagcagtttttgcaagaaaggatcaaagtgaacggaaaagctgggaaccttggtggaggggtggtgaccatcgaaaggagcaagagcaagatcaccgtgacatccgaggtgcctttctccaaaaggtatttgaaatatctcaccaaaaaatatttgaagaagaataatctacgtgactggttgcgcgtagttgctaacagcaaagagagttacgaattacgttacttccagattaaccaggacgaagaagaggaggaagacgaggattaaatttcatttatctggaaaattttgtatgagttcttgaataaaacttgggaaccaaaatggtggtttatccttgtatctctgcagtgtggattgaacagaaaattggaaatcatagtcaaagggcttcccttggttcgccactcatttatttgtaacttgacttctttttttttctgcttaaaaatttcaattctcgtggtaataccagagtagaaggagagggtgactttaccgaactgacagccattggggaggcagatgcgggtgtggaggtgtgggctgaaggtagtgactgtttgattttaaaaagtgtgactgtcagttgtatctgttgcttttctcaatgattcagggatacaaatgggcttctctcattcattaaaagaaaacgcgacatctttctaagattctctgtgggaaaatgactgtcaataaaatgcgggtttctgggccattcgtcttactttcattttttgattacaaatttctcttgacgcacacaattatgtctgctaatcctcttcttcctagagagagaaactgtgctccttcagtgttgctgccataaaggggtttggggaatcgattgtaaaagtcccaggttctaaattaactaaatgtgtacagaaatgaacgtgtaagtaatgtttctacaggtctttgcaacaaactgtcactttcgtctccagcagagggagctgtaggaatagtgcttccagatgtggtctcccgtgtggggcccagcaatgggggcccctgatgccaagagctctggaggttcttgaaagaggggacacgaaggaggagtgactgggaagcctcccatgccaaggaggtgggaggtgccctggaaatagctgcctcatgccacttaggccatgactggatttaatgtcagtggtgtgccacagtgcagaggctagacaactgaaaggggctaccaaggctgggaaaaaaatgcaattgttgctgtgagtgactttgaaagactctggtgccttgtggtgcccttctgaaattcaaacagtaatgcaaaagtgtctgcattagaatttacggtgtctaaaattcatgtttttaaaagagcttgcctacagatggtttccacacttgaaattgtgccctgcgagttgcatagctggaagttcaatgctcagtcctaccttggctcccattaaacatttggtgctctgtggattgagttgaacgtgttgaggctttgcaatttcacttgtgttaaaggctctggcatttttccatttctatgcaaatttctttgaagcagaattgcttgcatatttcttctctgccgtcacagaaagcagagtttctttcaaacttcactgaggcatcagttgctctttggcaatgtcccttaaccatgattattaactaagtttgtggcttgagtttacaaattctacttgttgcattgatgttcccatgtagtaagtcatttttagtttggttgtgaaaaaaccctgggctgaagttggcatttcagttaaaagaaaaaaagaaactagtcccagatttgaaaacttgtaataaaattgaaactcactggttttctatgtctttttgaactcttgtaatcgagttttgatcatattttctattaaagtggctaacacctggctactcttactgta

SEQ ID NO: 422410 - DNA, 2085 bp, Homo sapiens
  misc_feature (12)..(12): n is a, c, g, or t
  misc_feature (18)..(18): n is a, c, g, or t
  misc_feature (21)..(21): n is a, c, g, or t
  misc_feature (23)..(23): n is a, c, g, or t
  misc_feature (30)..(30): n is a, c, g, or t
ccaatgctagtngagccnggntnaatcggncgaggccgctgccgccatggctcctgtgaaaaagcttgtggtgaaggggggcaaaaaaaagaagcaagttctgaagttcactcttgattgcacccaccctgtagaagatggaatcatggatgctgccaattttgagcagtttttgcaagaaaggatcaaagtgaacggaaaagctgggaaccttggtggaggggtggtgaccatcgaaaggagcaagagcaagatcaccgtgacatccgaggtgcctttctccaaaaggtatttgaaatatctcaccaaaaaatatttgaagaagaataatctacgtgactggttgcgcgtagttgctaacagcaaagagagttacgaattacgttacttccagattaaccaggacgaagaagaggaggaagacgaggattaaatttcatttatctggaaaattttgtatgagttcttgaataaaacttgggaaccaaaatggtggtttatccttgtatctctgcagtgtggattgaacagaaaattggaaatcatagtcaaagggcttcccttggttcgccactcatttatttgtaacttgacttctttttttttctgcttaaaaatttcaattctcgtggtaataccagagtagaaggagagggtgactttaccgaactgacagccattggggaggcagatgcgggtgtggaggtgtgggctgaaggtagtgactgtttgattttaaaaagtgtgactgtcagttgtatctgttgcttttctcaatgattcagggatacaaatgggcttctctcattcattaaaagaaaacgcgacatctttctaagattctctgtgggaaaatgactgtcaataaaatgcgggtttctgggccattcgtcttactttcattttttgattacaaatttctcttgacgcacacaattatgtctgctaatcctcttcttcctagagagagaaactgtgctccttcagtgttgctgccataaaggggtttggggaatcgattgtaaaagtcccaggttctaaattaactaaatgtgtacagaaatgaacgtgtaagtaatgtttctacaggtctttgcaacaaactgtcactttcgtctccagcagagggagctgtaggaatagtgcttccagatgtggtctcccgtgtggggcccagcaatgggggcccctgatgccaagagctctggaggttcttgaaagaggggacacgaaggaggagtgactgggaagcctcccatgccaaggaggtgggaggtgccctggaaatagctgcctcatgccacttaggccatgactggatttaatgtcagtggtgtgccacagtgcagaggctagacaactgaaaggggctaccaaggctgggaaaaaaatgcaattgttgctgtgagtgactttgaaagactctggtgccttgtggtgcccttctgaaattcaaacagtaatgcaaaagtgtctgcattagaatttacggtgtctaaaattcatgtttttaaaagagcttgcctacagatggtttccacacttgaaattgtgccctgcgagttgcatagctggaagttcaatgctcagtcctaccttggctcccattaaacatttggtgctctgtggattgagttgaacgtgttgaggctttgcaatttcacttgtgttaaaggctctggcatttttccatttctatgcaaatttctttgaagcagaattgcttgcatatttcttctctgccgtcacagaaagcagagtttctttcaaacttcactgaggcatcagttgctctttggcaatgtcccttaaccatgattattaactaagtttgtggcttgagtttacaaattctacttgttgcattgatgttcccatgtagtaagtcatttttagtttggttgtgaaaaaaccctgggctgaagttggcatttcagttaaaagaaaaaaagaaactagtcccagatttgaaaacttgtaataaaattgaaactcactggttttctatgtctttttgaactcttgtaatcgagttttgatcatattttctattaaagtggctaacacctggctactcttactgta

SEQ ID NO: 422411 - DNA, 2070 bp, Homo sapiens
ctactactactaaattccggccgcgtcgaccatggctcctgtgaaaaagcttgtggtgaaggggggcaaaaaaaagaagcaagttctgaagttcactcttgattgcacccaccctgtagaagatggaatcatggatgctgccaattttgagcagtttttgcaagaaaggatcaaagtgaacggaaaagctgggaaccttggtggaggggtggtgaccatcgaaaggagcaagagcaagatcaccgtgacatccgaggtgcctttctccaaaaggtatttgaaatatctcaccaaaaaatatttgaagaagaataatctacgtgactggttgcgcgtagttgctaacagcaaagagagttacgaattacgttacttccagattaaccaggacgaagaagaggaggaagacgaggattaaatttcatttatctggaaaattttgtatgagttcttgaataaaacttgggaaccaaaatggtggtttatccttgtatctctgcagtgtggattgaacagaaaattggaaatcatagtcaaagggcttcccttggttcgccactcatttatttgtaacttgacttctttttttttctgcttaaaaatttcaattctcgtggtaataccagagtagaaggagagggtgactttaccgaactgacagccattggggaggcagatgcgggtgtggaggtgtgggctgaaggtagtgactgtttgattttaaaaagtgtgactgtcagttgtatctgttgcttttctcaatgattcagggatacaaatgggcttctctcattcattaaaagaaaacgcgacatctttctaagattctctgtgggaaaatgactgtcaataaaatgcgggtttctgggccattcgtcttactttcattttttgattacaaatttctcttgacgcacacaattatgtctgctaatcctcttcttcctagagagagaaactgtgctccttcagtgttgctgccataaaggggtttggggaatcgattgtaaaagtcccaggttctaaattaactaaatgtgtacagaaatgaacgtgtaagtaatgtttctacaggtctttgcaacaaactgtcactttcgtctccagcagagggagctgtaggaatagtgcttccagatgtggtctcccgtgtggggcccagcaatgggggcccctgatgccaagagctctggaggttcttgaaagaggggacacgaaggaggagtgactgggaagcctcccatgccaaggaggtgggaggtgccctggaaatagctgcctcatgccacttaggccatgactggatttaatgtcagtggtgtgccacagtgcagaggctagacaactgaaaggggctaccaaggctgggaaaaaaatgcaattgttgctgtgagtgactttgaaagactctggtgccttgtggtgcccttctgaaattcaaacagtaatgcaaaagtgtctgcattagaatttacggtgtctaaaattcatgtttttaaaagagcttgcctacagatggtttccacacttgaaattgtgccctgcgagttgcatagctggaagttcaatgctcagtcctaccttggctcccattaaacatttggtgctctgtggattgagttgaacgtgttgaggctttgcaatttcacttgtgttaaaggctctggcatttttccatttctatgcaaatttctttgaagcagaattgcttgcatatttcttctctgccgtcacagaaagcagagtttctttcaaacttcactgaggcatcagttgctctttggcaatgtcccttaaccatgattattaactaagtttgtggcttgagtttacaaattctacttgttgcattgatgttcccatgtagtaagtcatttttagtttggttgtgaaaaaaccctgggctgaagttggcatttcagttaaaagaaaaaaagaaactagtcccagatttgaaaacttgtaataaaattgaaactcactggttttctatgtctttttgaactcttgtaatcgagttttgatcatattttctattaaagtggctaacacctggctactcttactgta

SEQ ID NO: 422412 - DNA, 2381 bp, Homo sapiens
gctctgctagggctggtgtctctgaggagaaaacgaggctggttctgcaaatgttggaataagtgcagactggattccactgctgcttccagaatgttccaactgccacctccaggataaagaagcaagagtggatgacaccagacaggacaggagcaagcaggaagcaaagccccctattgatagagccaaaccgggatcagctggaaagcagaagtgtttgcagaggcccagcctgatcattatagagccaagaacagcagctggctttggagcttggtcaaccggcttgaggcctgagttgaaagctagacccatcagcacagtctcttctggtgattggacttttgctagaaaaagcttgtggtgaaggggggcaaaaaaaagaagcaagttctgaagttcactcttgattgcacccaccctgtagaagatggaatcatggatgctgccaattttgagcagtttttgcaagaaaggatcaaagtgaacggaaaagctgggaaccttggtggaggggtggtgaccatcgaaaggagcaagagcaagatcaccgtgacatccgaggtgcctttctccaaaaggtatttgaaatatctcaccaaaaaatatttgaagaagaataatctacgtgactggttgcgcgtagttgctaacagcaaagagagttacgaattacgttacttccagattaaccaggacgaagaagaggaggaagacgaggattaaatttcatttatctggaaaattttgtatgagttcttgaataaaacttgggaaccaaaatggtggtttatccttgtatctctgcagtgtggattgaacagaaaattggaaatcatagtcaaagggcttcccttggttcgccactcatttatttgtaacttgacttctttttttttctgcttaaaaatttcaattctcgtggtaataccagagtagaaggagagggtgactttaccgaactgacagccattggggaggcagatgcgggtgtggaggtgtgggctgaaggtagtgactgtttgattttaaaaagtgtgactgtcagttgtatctgttgcttttctcaatgattcagggatacaaatgggcttctctcattcattaaaagaaaacgcgacatctttctaagattctctgtgggaaaatgactgtcaataaaatgcgggtttctgggccattcgtcttactttcattttttgattacaaatttctcttgacgcacacaattatgtctgctaatcctcttcttcctagagagagaaactgtgctccttcagtgttgctgccataaaggggtttggggaatcgattgtaaaagtcccaggttctaaattaactaaatgtgtacagaaatgaacgtgtaagtaatgtttctacaggtctttgcaacaaactgtcactttcgtctccagcagagggagctgtaggaatagtgcttccagatgtggtctcccgtgtggggcccagcaatgggggcccctgatgccaagagctctggaggttcttgaaagaggggacacgaaggaggagtgactgggaagcctcccatgccaaggaggtgggaggtgccctggaaatagctgcctcatgccacttaggccatgactggatttaatgtcagtggtgtgccacagtgcagaggctagacaactgaaaggggctaccaaggctgggaaaaaaatgcaattgttgctgtgagtgactttgaaagactctggtgccttgtggtgcccttctgaaattcaaacagtaatgcaaaagtgtctgcattagaatttacggtgtctaaaattcatgtttttaaaagagcttgcctacagatggtttccacacttgaaattgtgccctgcgagttgcatagctggaagttcaatgctcagtcctaccttggctcccattaaacatttggtgctctgtggattgagttgaacgtgttgaggctttgcaatttcacttgtgttaaaggctctggcatttttccatttctatgcaaatttctttgaagcagaattgcttgcatatttcttctctgccgtcacagaaagcagagtttctttcaaacttcactgaggcatcagttgctctttggcaatgtcccttaaccatgattattaactaagtttgtggcttgagtttacaaattctacttgttgcattgatgttcccatgtagtaagtcatttttagtttggttgtgaaaaaaccctgggctgaagttggcatttcagttaaaagaaaaaaagaaactagtcccagatttgaaaacttgtaataaaattgaaactcactggttttctatgtctttttgaactcttgtaatcgagttttgatcatattttctattaaagtggctaacacctggctactcttactgta

SEQ ID NO: 422413 - DNA, 2403 bp, Homo sapiens
ttaacttatattaactcatttaatctggagaacactcttaaaaagtagaaaatattaccccagaaagtggtggagctggtatacaaaaccgcgtaggtgctttgttaaggaatgatgcattagtttcccggtaggaggataaagaagcaagagtggatgacaccagacaggacaggagcaagcaggaagcaaagccccctattgatagagccaaaccgggatcagctggaaagcagaagtgtttgcagaggcccagcctgatcattatagagccaagaacagcagctggctttggagcttggtcaaccggcttgaggcctgagttgaaagctagacccatcagcacagtctcttctggtgattggacttttgctagaaaaagcttgtggtgaaggggggcaaaaaaaagaagcaagttctgaagttcactcttgattgcacccaccctgtagaagatggaatcatggatgctgccaattttgagcagtttttgcaagaaaggatcaaagtgaacggaaaagctgggaaccttggtggaggggtggtgaccatcgaaaggagcaagagcaagatcaccgtgacatccgaggtgcctttctccaaaaggtatttgaaatatctcaccaaaaaatatttgaagaagaataatctacgtgactggttgcgcgtagttgctaacagcaaagagagttacgaattacgttacttccagattaaccaggacgaagaagaggaggaagacgaggattaaatttcatttatctggaaaattttgtatgagttcttgaataaaacttgggaaccaaaatggtggtttatccttgtatctctgcagtgtggattgaacagaaaattggaaatcatagtcaaagggcttcccttggttcgccactcatttatttgtaacttgacttctttttttttctgcttaaaaatttcaattctcgtggtaataccagagtagaaggagagggtgactttaccgaactgacagccattggggaggcagatgcgggtgtggaggtgtgggctgaaggtagtgactgtttgattttaaaaagtgtgactgtcagttgtatctgttgcttttctcaatgattcagggatacaaatgggcttctctcattcattaaaagaaaacgcgacatctttctaagattctctgtgggaaaatgactgtcaataaaatgcgggtttctgggccattcgtcttactttcattttttgattacaaatttctcttgacgcacacaattatgtctgctaatcctcttcttcctagagagagaaactgtgctccttcagtgttgctgccataaaggggtttggggaatcgattgtaaaagtcccaggttctaaattaactaaatgtgtacagaaatgaacgtgtaagtaatgtttctacaggtctttgcaacaaactgtcactttcgtctccagcagagggagctgtaggaatagtgcttccagatgtggtctcccgtgtggggcccagcaatgggggcccctgatgccaagagctctggaggttcttgaaagaggggacacgaaggaggagtgactgggaagcctcccatgccaaggaggtgggaggtgccctggaaatagctgcctcatgccacttaggccatgactggatttaatgtcagtggtgtgccacagtgcagaggctagacaactgaaaggggctaccaaggctgggaaaaaaatgcaattgttgctgtgagtgactttgaaagactctggtgccttgtggtgcccttctgaaattcaaacagtaatgcaaaagtgtctgcattagaatttacggtgtctaaaattcatgtttttaaaagagcttgcctacagatggtttccacacttgaaattgtgccctgcgagttgcatagctggaagttcaatgctcagtcctaccttggctcccattaaacatttggtgctctgtggattgagttgaacgtgttgaggctttgcaatttcacttgtgttaaaggctctggcatttttccatttctatgcaaatttctttgaagcagaattgcttgcatatttcttctctgccgtcacagaaagcagagtttctttcaaacttcactgaggcatcagttgctctttggcaatgtcccttaaccatgattattaactaagtttgtggcttgagtttacaaattctacttgttgcattgatgttcccatgtagtaagtcatttttagtttggttgtgaaaaaaccctgggctgaagttggcatttcagttaaaagaaaaaaagaaactagtcccagatttgaaaacttgtaataaaattgaaactcactggttttctatgtctttttgaactcttgtaatcgagttttgatcatattttctattaaagtggctaacacctggctactcttactgta

SEQ ID NO: 422414 - DNA, 2068 bp, Homo sapiens
acacctaggctaggtacgaggccgcgggttaatcggccgagaaaaagcttgtggtgaaggggggcaaaaaaaagaagcaagttctgaagttcactcttgattgcacccaccctgtagaagatggaatcatggatgctgccaattttgagcagtttttgcaagaaaggatcaaagtgaacggaaaagctgggaaccttggtggaggggtggtgaccatcgaaaggagcaagagcaagatcaccgtgacatccgaggtgcctttctccaaaaggtatttgaaatatctcaccaaaaaatatttgaagaagaataatctacgtgactggttgcgcgtagttgctaacagcaaagagagttacgaattacgttacttccagattaaccaggacgaagaagaggaggaagacgaggattaaatttcatttatctggaaaattttgtatgagttcttgaataaaacttgggaaccaaaatggtggtttatccttgtatctctgcagtgtggattgaacagaaaattggaaatcatagtcaaagggcttcccttggttcgccactcatttatttgtaacttgacttctttttttttctgcttaaaaatttcaattctcgtggtaataccagagtagaaggagagggtgactttaccgaactgacagccattggggaggcagatgcgggtgtggaggtgtgggctgaaggtagtgactgtttgattttaaaaagtgtgactgtcagttgtatctgttgcttttctcaatgattcagggatacaaatgggcttctctcattcattaaaagaaaacgcgacatctttctaagattctctgtgggaaaatgactgtcaataaaatgcgggtttctgggccattcgtcttactttcattttttgattacaaatttctcttgacgcacacaattatgtctgctaatcctcttcttcctagagagagaaactgtgctccttcagtgttgctgccataaaggggtttggggaatcgattgtaaaagtcccaggttctaaattaactaaatgtgtacagaaatgaacgtgtaagtaatgtttctacaggtctttgcaacaaactgtcactttcgtctccagcagagggagctgtaggaatagtgcttccagatgtggtctcccgtgtggggcccagcaatgggggcccctgatgccaagagctctggaggttcttgaaagaggggacacgaaggaggagtgactgggaagcctcccatgccaaggaggtgggaggtgccctggaaatagctgcctcatgccacttaggccatgactggatttaatgtcagtggtgtgccacagtgcagaggctagacaactgaaaggggctaccaaggctgggaaaaaaatgcaattgttgctgtgagtgactttgaaagactctggtgccttgtggtgcccttctgaaattcaaacagtaatgcaaaagtgtctgcattagaatttacggtgtctaaaattcatgtttttaaaagagcttgcctacagatggtttccacacttgaaattgtgccctgcgagttgcatagctggaagttcaatgctcagtcctaccttggctcccattaaacatttggtgctctgtggattgagttgaacgtgttgaggctttgcaatttcacttgtgttaaaggctctggcatttttccatttctatgcaaatttctttgaagcagaattgcttgcatatttcttctctgccgtcacagaaagcagagtttctttcaaacttcactgaggcatcagttgctctttggcaatgtcccttaaccatgattattaactaagtttgtggcttgagtttacaaattctacttgttgcattgatgttcccatgtagtaagtcatttttagtttggttgtgaaaaaaccctgggctgaagttggcatttcagttaaaagaaaaaaagaaactagtcccagatttgaaaacttgtaataaaattgaaactcactggttttctatgtctttttgaactcttgtaatcgagttttgatcatattttctattaaagtggctaacacctggctactcttactgta

SEQ ID NO: 422415 - DNA, 2301 bp, Homo sapiens
gtggctagcgagcgagggctctgtgcgtctgcgtagttcgctcacctccctttctaactccgctgccgccatggctcctgtggttagtatggctccgcgtgaggcctcggctccaggggaggcacgtgggcctcgccgagcccggcatctacccaggctcgctggggacggcgccctgcagcgtcctgctggggtgggctggcaggtcggccggagcgggccagagcccctgccgatcccagcacgttgtaggcggaggaggccgcggcccgagaaaaagcttgtggtgaaggggggcaaaaaaaagaagcaagttctgaagttcactcttgattgcacccaccctgtagaagatggaatcatggatgctgccaattttgagcagtttttgcaagaaaggatcaaagtgaacggaaaagctgggaaccttggtggaggggtggtgaccatcgaaaggagcaagagcaagatcaccgtgacatccgaggtgcctttctccaaaaggtatttgaaatatctcaccaaaaaatatttgaagaagaataatctacgtgactggttgcgcgtagttgctaacagcaaagagagttacgaattacgttacttccagattaaccaggacgaagaagaggaggaagacgaggattaaatttcatttatctggaaaattttgtatgagttcttgaataaaacttgggaaccaaaatggtggtttatccttgtatctctgcagtgtggattgaacagaaaattggaaatcatagtcaaagggcttcccttggttcgccactcatttatttgtaacttgacttctttttttttctgcttaaaaatttcaattctcgtggtaataccagagtagaaggagagggtgactttaccgaactgacagccattggggaggcagatgcgggtgtggaggtgtgggctgaaggtagtgactgtttgattttaaaaagtgtgactgtcagttgtatctgttgcttttctcaatgattcagggatacaaatgggcttctctcattcattaaaagaaaacgcgacatctttctaagattctctgtgggaaaatgactgtcaataaaatgcgggtttctgggccattcgtcttactttcattttttgattacaaatttctcttgacgcacacaattatgtctgctaatcctcttcttcctagagagagaaactgtgctccttcagtgttgctgccataaaggggtttggggaatcgattgtaaaagtcccaggttctaaattaactaaatgtgtacagaaatgaacgtgtaagtaatgtttctacaggtctttgcaacaaactgtcactttcgtctccagcagagggagctgtaggaatagtgcttccagatgtggtctcccgtgtggggcccagcaatgggggcccctgatgccaagagctctggaggttcttgaaagaggggacacgaaggaggagtgactgggaagcctcccatgccaaggaggtgggaggtgccctggaaatagctgcctcatgccacttaggccatgactggatttaatgtcagtggtgtgccacagtgcagaggctagacaactgaaaggggctaccaaggctgggaaaaaaatgcaattgttgctgtgagtgactttgaaagactctggtgccttgtggtgcccttctgaaattcaaacagtaatgcaaaagtgtctgcattagaatttacggtgtctaaaattcatgtttttaaaagagcttgcctacagatggtttccacacttgaaattgtgccctgcgagttgcatagctggaagttcaatgctcagtcctaccttggctcccattaaacatttggtgctctgtggattgagttgaacgtgttgaggctttgcaatttcacttgtgttaaaggctctggcatttttccatttctatgcaaatttctttgaagcagaattgcttgcatatttcttctctgccgtcacagaaagcagagtttctttcaaacttcactgaggcatcagttgctctttggcaatgtcccttaaccatgattattaactaagtttgtggcttgagtttacaaattctacttgttgcattgatgttcccatgtagtaagtcatttttagtttggttgtgaaaaaaccctgggctgaagttggcatttcagttaaaagaaaaaaagaaactagtcccagatttgaaaacttgtaataaaattgaaactcactggttttctatgtctttttgaactcttgtaatcgagttttgatcatattttctattaaagtggctaacacctggctactcttactgta

SEQ ID NO: 422416 - DNA, 2079 bp, Homo sapiens
tattttcaccccctcacttcccgcaccccaccaaacacccccccccccttagaaaaagcttgtggtgaaggggggcaaaaaaaagaagcaagttctgaagttcactcttgattgcacccaccctgtagaagatggaatcatggatgctgccaattttgagcagtttttgcaagaaaggatcaaagtgaacggaaaagctgggaaccttggtggaggggtggtgaccatcgaaaggagcaagagcaagatcaccgtgacatccgaggtgcctttctccaaaaggtatttgaaatatctcaccaaaaaatatttgaagaagaataatctacgtgactggttgcgcgtagttgctaacagcaaagagagttacgaattacgttacttccagattaaccaggacgaagaagaggaggaagacgaggattaaatttcatttatctggaaaattttgtatgagttcttgaataaaacttgggaaccaaaatggtggtttatccttgtatctctgcagtgtggattgaacagaaaattggaaatcatagtcaaagggcttcccttggttcgccactcatttatttgtaacttgacttctttttttttctgcttaaaaatttcaattctcgtggtaataccagagtagaaggagagggtgactttaccgaactgacagccattggggaggcagatgcgggtgtggaggtgtgggctgaaggtagtgactgtttgattttaaaaagtgtgactgtcagttgtatctgttgcttttctcaatgattcagggatacaaatgggcttctctcattcattaaaagaaaacgcgacatctttctaagattctctgtgggaaaatgactgtcaataaaatgcgggtttctgggccattcgtcttactttcattttttgattacaaatttctcttgacgcacacaattatgtctgctaatcctcttcttcctagagagagaaactgtgctccttcagtgttgctgccataaaggggtttggggaatcgattgtaaaagtcccaggttctaaattaactaaatgtgtacagaaatgaacgtgtaagtaatgtttctacaggtctttgcaacaaactgtcactttcgtctccagcagagggagctgtaggaatagtgcttccagatgtggtctcccgtgtggggcccagcaatgggggcccctgatgccaagagctctggaggttcttgaaagaggggacacgaaggaggagtgactgggaagcctcccatgccaaggaggtgggaggtgccctggaaatagctgcctcatgccacttaggccatgactggatttaatgtcagtggtgtgccacagtgcagaggctagacaactgaaaggggctaccaaggctgggaaaaaaatgcaattgttgctgtgagtgactttgaaagactctggtgccttgtggtgcccttctgaaattcaaacagtaatgcaaaagtgtctgcattagaatttacggtgtctaaaattcatgtttttaaaagagcttgcctacagatggtttccacacttgaaattgtgccctgcgagttgcatagctggaagttcaatgctcagtcctaccttggctcccattaaacatttggtgctctgtggattgagttgaacgtgttgaggctttgcaatttcacttgtgttaaaggctctggcatttttccatttctatgcaaatttctttgaagcagaattgcttgcatatttcttctctgccgtcacagaaagcagagtttctttcaaacttcactgaggcatcagttgctctttggcaatgtcccttaaccatgattattaactaagtttgtggcttgagtttacaaattctacttgttgcattgatgttcccatgtagtaagtcatttttagtttggttgtgaaaaaaccctgggctgaagttggcatttcagttaaaagaaaaaaagaaactagtcccagatttgaaaacttgtaataaaattgaaactcactggttttctatgtctttttgaactcttgtaatcgagttttgatcatattttctattaaagtggctaacacctggctactcttactgta

SEQ ID NO: 422417 - DNA, 2551 bp, Homo sapiens
gtggctagcgagcgagggctctgtgcgtctgcgtagttcgctcacctccctttctaactccgctgccgccatggctcctgtgaaaaagcttgtggtgaaggggggcaaaaaaaagaagcaagttctgaagttcactcttgattgcacccaccctgtagaagatggaatcatggatgctgccaattttgagcagtttttgcaagaaaggatcaaagtgaacggaaaagctgggaaccttggtggaggggtggtgaccatcgaaaggagcaagagcaagatcaccgtgacatccgaggtgcctttctccaaaaggtatttgaaatatctcaccaaaaaatatttgaagaagaataatctacgtgactggttgcgcgtagttgctaacagcaaagagagttacgaattacgttacttccagattaaccaggacgaagaagaggaggaagacgaggattaaatttcatttatctggaaaattttgtatgagttcttgaataaaacttgggaaccaaaatggtggtttatccttgtatctctgcagtgtggattgaacagaaaattggaaatcatagtcaaagggcttcccttggttcgccactcatttatttgtaacttgacttctttttttttctgcttaaaaatttcaattctcgtggtaataccagagtagaaggagagggtgactttaccgaactgacagccattggggaggcagatgcgggtgtggaggtgtgggctgaaggtagtgactgtttgattttaaaaagtgtgactgtcagttgtatctgttgcttttctcaatgattcagggatacaaatgggcttctctcattcattaaaagaaaacgcgacatctttctaagattctctgtgggaaaatgactgtcaataaaatgcgggtttctgggccattcgtcttactttcattttttgattacaaatttctcttgacgcacacaattatgtctgctaatcctcttcttcctagagagagaaactgtgctccttcagtgttgctgccataaaggggtttggggaatcgattgtaaaagtcccaggttctaaattaactaaatgtgtacagaaatgaacgtgtaagtaatgtttctacaggtctttgcaacaaactgtcactttcgtctccagcagagggagctgtaggaatagtgcttccagatgtggtctcccgtgtggggcccagcaatgggggcccctgatgccaagagctctggaggttcttgaaagaggggacacgaaggaggagtgactgggaagcctcccatgccaaggaggtgggaggtgccctggaaatagctgcctcatgccacttaggccatgactggatttaatgtcagtggtgtgccacagtgcagaggctagacaactgaaaggggctaccaaggctgggaaaaaaatgcaattgttgctgtgagtgactttgaaagactctggtgccttgtggtgcccttctgaaattcaaacagtaatgcaaaagtgtctgcattagaatttacggtgtctaaaattcatgtttttaaaagagcttgcctacagatggtttccacacttgaaattgtgccctgcgagttgcatagctggaagttcaatgctcagtcctaccttggctcccattaaacatttggtgctctgtggattgagttgaacgtgttgaggctttgcaatttcacttgtgttaaaggctctggcatttttccatttctatgcaaatttctttgaagcagaattgcttgcatatttcttctctgccgtcacagaaagcagagtttctttcaaacttcactgaggcatcagttgctctttggcaatgtcccttaaccatgattattaactaagtttgtggcttgagtttacaaattctacttgttgcattgatgttcccatgtagtaagtcatttttagtttggttgtgaaaaaaccctgggctgaagttggcatttcagttaaaagaaaaaaagaaactagtcccagatttgaaaacttgtaataaaattgaaactcactggttttctatgtctttttgaactcttgtaatcgagttttgatcatattttctattaaagtggctaacacctggctactcttactgtaaaaaaaaaaaaaaaaaacaaaaaaaaaaaaaaaaaaaaaaaaaaaaaaaaaaaaaaaaaaaaaaaaaaacaaaaaaaaaacaaaaaaaaaaaaaaaaaaaaaaaaaaaaaagggggggggggggggaaaatatctggggggagggcgaagatataaatgagtgaggacgagagtgttttaattggagagaagggggcacaaaagatggggggtaattaaaaaacagcagagggggggggggtggttaataaaccagagcaggtggaaggaaacagtagtgtggtggtagttttgtagagaagcgaccccacttggtgtgggggaggagaagtggggagcacacacactgagagagagttgctgggaggagaaaaaaaaagggtggtaggtggtaaccaacacgtgtcttttcgggagaagagtggtagagggatgtaaaaat

SEQ ID NO: 422418 - DNA, 2206 bp, Homo sapiens
gtggctagcgagcgagggctctgtgcgtctgcgtagttcgctcacctccctttctaactccgctgccgccatggctcctgtgaaaaagcttgtggtgaaggggggcaaaaaaaagaagcaagttctgaagttcactcttgattgcacccaccctgtagaagatggaatcatggatgctgccaattttgagcagtttttgcaagaaaggatcaaagtgaacggaaaagctgggaaccttggtggaggggtggtgaccatcgaaaggagcaagagcaagatcaccgtgacatccgaggtgcctttctccaaaaggtatttgaaatatctcaccaaaaaatatttgaagaagaataatctacgtgactggttgcgcgtagttgctaacagcaaagagagttacgaattacgttacttccagattaaccaggacgaagaagaggaggaagacgaggattaaatttcatttatctggaaaattttgtatgagttcttgaataaaacttgggaaccaaaatggtggtttatccttgtatctctgcagtgtggattgaacagaaaattggaaatcatagtcaaagggcttcccttggttcgccactcatttatttgtaacttgacttctttttttttctgcttaaaaatttcaattctcgtggtaataccagagtagaaggagagggtgactttaccgaactgacagccattggggaggcagatgcgggtgtggaggtgtgggctgaaggtagtgactgtttgattttaaaaagtgtgactgtcagttgtatctgttgcttttctcaatgattcagggatacaaatgggcttctctcattcattaaaagaaaacgcgacatctttctaagattctctgtgggaaaatgactgtcaataaaatgcgggtttctgggccattcgtcttactttcattttttgattacaaatttctcttgacgcacacaattatgtctgctaatcctcttcttcctagagagagaaactgtgctccttcagtgttgctgccataaaggggtttggggaatcgattgtaaaagtcccaggttctaaattaactaaatgtgtacagaaatgaacgtgtaagtaatgtttctacaggtctttgcaacaaactgtcactttcgtctccagcagagggagctgtaggaatagtgcttccagatgtggtctcccgtgtggggcccagcaatgggggcccctgatgccaagagctctggaggttcttgaaagaggggacacgaaggaggagtgactgggaagcctcccatgccaaggaggtgggaggtgccctggaaatagctgcctcatgccacttaggccatgactggatttaatgtcagtggtgtgccacagtgcagaggctagacaactgaaaggggctaccaaggctgggaaaaaaatgcaattgttgctgtgagtgactttgaaagactctggtgccttgtggtgcccttctgaaattcaaacagtaatgcaaaagtgtctgcattagaatttacggtgtctaaaattcatgtttttaaaagagcttgcctacagatggtttccacacttgaaattgtgccctgcgagttgcatagctggaagttcaatgctcagtcctaccttggctcccattaaacatttggtgctctgtggattgagttgaacgtgttgaggctttgcaatttcacttgtgttaaaggctctggcatttttccatttctatgcaaatttctttgaagcagaattgcttgcatatttcttctctgccgtcacagaaagcagagtttctttcaaacttcactgaggcatcagttgctctttggcaatgtcccttaaccatgattattaactaagtttgtggcttgagtttacaaattctacttgttgcattgatgttcccatgtagtaagtcatttttagtttggttgtgaaaaaaccctgggctgaagttggcatttcagttaaaagaaaaaaagaaactagtcccagatttgaaaacttgtaataaaattgaaactcactggttttctatgtctttttgaactcttgtaatcgagttttgatcatattttctattaaagtggctaacacctggctactcttactgtaaaagacacacacagacgacacacacacttttgggcgctccgcccgcaaaggttcaaaacattgtggggccgggcccgggtaagaccgggcaaaggtc

SEQ ID NO: 422419 - DNA, 2187 bp, Homo sapiens
tgaactcgcgcactcgggtgatcctcccgcctcagcctcccagagtgctgaaattacaggcctgagcccacctgtgcctgcaccctgattggtccttgacaggtgtttttaatgtcccaagtctccgtaaatgtgggatggagcttctctcagaggctcttccccccaactcccaaccaagagtgtcgcgcgacaccaagttctgaagttcactcttgattgcacccaccctgtagaagatggaatcatggatgctgccaattttgagcagtttttgcaagaaaggatcaaagtgaacggaaaagctgggaaccttggtggaggggtggtgaccatcgaaaggagcaagagcaagatcaccgtgacatccgaggtgcctttctccaaaaggtatttgaaatatctcaccaaaaaatatttgaagaagaataatctacgtgactggttgcgcgtagttgctaacagcaaagagagttacgaattacgttacttccagattaaccaggacgaagaagaggaggaagacgaggattaaatttcatttatctggaaaattttgtatgagttcttgaataaaacttgggaaccaaaatggtggtttatccttgtatctctgcagtgtggattgaacagaaaattggaaatcatagtcaaagggcttcccttggttcgccactcatttatttgtaacttgacttctttttttttctgcttaaaaatttcaattctcgtggtaataccagagtagaaggagagggtgactttaccgaactgacagccattggggaggcagatgcgggtgtggaggtgtgggctgaaggtagtgactgtttgattttaaaaagtgtgactgtcagttgtatctgttgcttttctcaatgattcagggatacaaatgggcttctctcattcattaaaagaaaacgcgacatctttctaagattctctgtgggaaaatgactgtcaataaaatgcgggtttctgggccattcgtcttactttcattttttgattacaaatttctcttgacgcacacaattatgtctgctaatcctcttcttcctagagagagaaactgtgctccttcagtgttgctgccataaaggggtttggggaatcgattgtaaaagtcccaggttctaaattaactaaatgtgtacagaaatgaacgtgtaagtaatgtttctacaggtctttgcaacaaactgtcactttcgtctccagcagagggagctgtaggaatagtgcttccagatgtggtctcccgtgtggggcccagcaatgggggcccctgatgccaagagctctggaggttcttgaaagaggggacacgaaggaggagtgactgggaagcctcccatgccaaggaggtgggaggtgccctggaaatagctgcctcatgccacttaggccatgactggatttaatgtcagtggtgtgccacagtgcagaggctagacaactgaaaggggctaccaaggctgggaaaaaaatgcaattgttgctgtgagtgactttgaaagactctggtgccttgtggtgcccttctgaaattcaaacagtaatgcaaaagtgtctgcattagaatttacggtgtctaaaattcatgtttttaaaagagcttgcctacagatggtttccacacttgaaattgtgccctgcgagttgcatagctggaagttcaatgctcagtcctaccttggctcccattaaacatttggtgctctgtggattgagttgaacgtgttgaggctttgcaatttcacttgtgttaaaggctctggcatttttccatttctatgcaaatttctttgaagcagaattgcttgcatatttcttctctgccgtcacagaaagcagagtttctttcaaacttcactgaggcatcagttgctctttggcaatgtcccttaaccatgattattaactaagtttgtggcttgagtttacaaattctacttgttgcattgatgttcccatgtagtaagtcatttttagtttggttgtgaaaaaaccctgggctgaagttggcatttcagttaaaagaaaaaaagaaactagtcccagatttgaaaacttgtaataaaattgaaactcactggttttctatgtctttttgaactcttgtaatcgagttttgatcatattttctattaaagtggctaacacctggctactcttactgta

SEQ ID NO: 422420 - DNA, 2055 bp, Homo sapiens
gtggctagcgagcgagggctctgtgcgtctgcgtagttcgctcacctccctttctaactccgctgccgccatggctcctgtgaaaaagcttgtggtgaaggggggcaaaaaaaagaagcaagttctgaagttcactcttgattgcacccaccctgtagaagatggaatcatggatgctgccaattttgagcagtttttgcaagaaaggatcaaagtgaacggaaaagctgggaaccttggtggaggggtggtgaccatcgaaaggagcaagagcaagatcaccgtgacatccgaggtgcctttctccaaaaggtatttgaaatatctcaccaaaaaatatttgaagaagaataatctacgtgactggttgcgcgtagttgctaacagcaaagagagttacgaattacgttacttccagattaaccaggacgaagaagaggaggaagacgaggattaaatttcatttatctggaaaattttgtatgagttcttgaataaaacttgggaaccaaaatggtggtttatccttgtatctctgcagtgtggattgaacagaaaattggaaatcatagtcaaagggcttcccttggttcgccactcatttatttgtaacttgacttctttttttttctgcttaaaaatttcaattctcgtggtaataccagagtagaaggagagggtgactttaccgaactgacagccattggggaggcagatgcgggtgtggaggtgtgggctgaaggtagtgactgtttgattttaaaaagtgtgactgtcagttgtatctgttgcttttctcaatgattcagggatacaaatgggcttctctcattcattaaaagaaaacgcgacatctttctaagattctctgtgggaaaatgactgtcaataaaatgcgggtttctgggccattcgtcttactttcattttttgattacaaatttctcttgacgcacacaattatgtctgctaatcctcttcttcctagagagagaaactgtgctccttcagtgttgctgccataaaggggtttggggaatcgattgtaaaagtcccaggttctaaattaactaaatgtgtacagaaatgaacgtgtaagtaatgtttctacaggtctttgcaacaaactgtcactttcgtctccagcagagggagctgtaggaatagtgcttccagatgtggtctcccgtgtggggcccagcaatgggggcccctgatgccaagagctctggaggttcttgaaagaggggacacgaaggaggagtgactgggaagcctcccatgccaaggaggtgggaggtgccctggaaatagctgcctcatgccacttaggccatgactggatttaatgtcagtggtgtgccacagtgcagaggctagacaactgaaaggggctaccaaggctgggaaaaaaatgcaattgttgctgtgagtgactttgaaagactctggtgccttgtggtgcccttctgaaattcaaacagtaatgcaaaagtgtctgcattagaatttacggtgtctaaaattcatgtttttaaaagctggaagttcaatgctcagtcctaccttggctcccattaaacatttggtgctctgtggattgagttgaacgtgttgaggctttgcaatttcacttgtgttaaaggctctggcatttttccatttctatgcaaatttctttgaagcagaattgcttgcatatttcttctctgccgtcacagaaagcagagtttctttcaaacttcactgaggcatcagttgctctttggcaatgtcccttaaccatgattattaactaagtttgtggcttgagtttacaaattctacttgttgcattgatgttcccatgtagtaagtcatttttagtttggttgtgaaaaaaccctgggctgaagttggcatttcagttaaaagaaaaaaagaaactagtcccagatttgaaaacttgtaataaaattgaaactcactggttttctatgtctttttgaactcttgtaatcgagttttgatcatattttctattaaagtggctaacacctggctactcttactgta

SEQ ID NO: 422421 - DNA, 1999 bp, Homo sapiens
gcggccgcctactactactactactgctcgaattcaagcttctaacgatgtacggggacatggatgctgccaattttgagcagtttttgcaagaaaggatcaaagtgaacggaaaagctgggaaccttggtggaggggtggtgaccatcgaaaggagcaagagcaagatcaccgtgacatccgaggtgcctttctccaaaaggtatttgaaatatctcaccaaaaaatatttgaagaagaataatctacgtgactggttgcgcgtagttgctaacagcaaagagagttacgaattacgttacttccagattaaccaggacgaagaagaggaggaagacgaggattaaatttcatttatctggaaaattttgtatgagttcttgaataaaacttgggaaccaaaatggtggtttatccttgtatctctgcagtgtggattgaacagaaaattggaaatcatagtcaaagggcttcccttggttcgccactcatttatttgtaacttgacttctttttttttctgcttaaaaatttcaattctcgtggtaataccagagtagaaggagagggtgactttaccgaactgacagccattggggaggcagatgcgggtgtggaggtgtgggctgaaggtagtgactgtttgattttaaaaagtgtgactgtcagttgtatctgttgcttttctcaatgattcagggatacaaatgggcttctctcattcattaaaagaaaacgcgacatctttctaagattctctgtgggaaaatgactgtcaataaaatgcgggtttctgggccattcgtcttactttcattttttgattacaaatttctcttgacgcacacaattatgtctgctaatcctcttcttcctagagagagaaactgtgctccttcagtgttgctgccataaaggggtttggggaatcgattgtaaaagtcccaggttctaaattaactaaatgtgtacagaaatgaacgtgtaagtaatgtttctacaggtctttgcaacaaactgtcactttcgtctccagcagagggagctgtaggaatagtgcttccagatgtggtctcccgtgtggggcccagcaatgggggcccctgatgccaagagctctggaggttcttgaaagaggggacacgaaggaggagtgactgggaagcctcccatgccaaggaggtgggaggtgccctggaaatagctgcctcatgccacttaggccatgactggatttaatgtcagtggtgtgccacagtgcagaggctagacaactgaaaggggctaccaaggctgggaaaaaaatgcaattgttgctgtgagtgactttgaaagactctggtgccttgtggtgcccttctgaaattcaaacagtaatgcaaaagtgtctgcattagaatttacggtgtctaaaattcatgtttttaaaagagcttgcctacagatggtttccacacttgaaattgtgccctgcgagttgcatagctggaagttcaatgctcagtcctaccttggctcccattaaacatttggtgctctgtggattgagttgaacgtgttgaggctttgcaatttcacttgtgttaaaggctctggcatttttccatttctatgcaaatttctttgaagcagaattgcttgcatatttcttctctgccgtcacagaaagcagagtttctttcaaacttcactgaggcatcagttgctctttggcaatgtcccttaaccatgattattaactaagtttgtggcttgagtttacaaattctacttgttgcattgatgttcccatgtagtaagtcatttttagtttggttgtgaaaaaaccctgggctgaagttggcatttcagttaaaagaaaaaaagaaactagtcccagatttgaaaacttgtaataaaattgaaactcactggttttctatgtctttttgaactcttgtaatcgagttttgatcatattttctattaaagtggctaacacctggctactcttactgta

SEQ ID NO: 422422 - DNA, 2052 bp, Homo sapiens
gtggctagcgagcgagggctctgtgcgtctgcgtagttcgctcacctccctttctaactccgctgccgccatggctcctgtgaaaaagcttgtggtgaaggggggcagaatcatggatgctgccaattttgagcagtttttgcaagaaaggatcaaagtgaacggaaaagctgggaaccttggtggaggggtggtgaccatcgaaaggagcaagagcaagatcaccgtgacatccgaggtgcctttctccaaaaggtatttgaaatatctcaccaaaaaatatttgaagaagaataatctacgtgactggttgcgcgtagttgctaacagcaaagagagttacgaattacgttacttccagattaaccaggacgaagaagaggaggaagacgaggattaaatttcatttatctggaaaattttgtatgagttcttgaataaaacttgggaaccaaaatggtggtttatccttgtatctctgcagtgtggattgaacagaaaattggaaatcatagtcaaagggcttcccttggttcgccactcatttatttgtaacttgacttctttttttttctgcttaaaaatttcaattctcgtggtaataccagagtagaaggagagggtgactttaccgaactgacagccattggggaggcagatgcgggtgtggaggtgtgggctgaaggtagtgactgtttgattttaaaaagtgtgactgtcagttgtatctgttgcttttctcaatgattcagggatacaaatgggcttctctcattcattaaaagaaaacgcgacatctttctaagattctctgtgggaaaatgactgtcaataaaatgcgggtttctgggccattcgtcttactttcattttttgattacaaatttctcttgacgcacacaattatgtctgctaatcctcttcttcctagagagagaaactgtgctccttcagtgttgctgccataaaggggtttggggaatcgattgtaaaagtcccaggttctaaattaactaaatgtgtacagaaatgaacgtgtaagtaatgtttctacaggtctttgcaacaaactgtcactttcgtctccagcagagggagctgtaggaatagtgcttccagatgtggtctcccgtgtggggcccagcaatgggggcccctgatgccaagagctctggaggttcttgaaagaggggacacgaaggaggagtgactgggaagcctcccatgccaaggaggtgggaggtgccctggaaatagctgcctcatgccacttaggccatgactggatttaatgtcagtggtgtgccacagtgcagaggctagacaactgaaaggggctaccaaggctgggaaaaaaatgcaattgttgctgtgagtgactttgaaagactctggtgccttgtggtgcccttctgaaattcaaacagtaatgcaaaagtgtctgcattagaatttacggtgtctaaaattcatgtttttaaaagagcttgcctacagatggtttccacacttgaaattgtgccctgcgagttgcatagctggaagttcaatgctcagtcctaccttggctcccattaaacatttggtgctctgtggattgagttgaacgtgttgaggctttgcaatttcacttgtgttaaaggctctggcatttttccatttctatgcaaatttctttgaagcagaattgcttgcatatttcttctctgccgtcacagaaagcagagtttctttcaaacttcactgaggcatcagttgctctttggcaatgtcccttaaccatgattattaactaagtttgtggcttgagtttacaaattctacttgttgcattgatgttcccatgtagtaagtcatttttagtttggttgtgaaaaaaccctgggctgaagttggcatttcagttaaaagaaaaaaagaaactagtcccagatttgaaaacttgtaataaaattgaaactcactggttttctatgtctttttgaactcttgtaatcgagttttgatcatattttctattaaagtggctaacacctggctactcttactgta

SEQ ID NO: 422423 - DNA, 2034 bp, Homo sapiens
ggttcacgttatgcattttggttattaagagactgagaaactccatcatgttatcctaagtaatgtgtttttattataaatagaagatggaatcatggatgctgccaaaaatgagcagtttttgcaagaaaggatcaaagtgaacggaaaagctgggaaccttggtggaggggtggtgaccatcgaaaggagcaagagcaagatcaccgtgacatccgaggtgcctttctccaaaaggtatttgaaatatctcaccaaaaaatatttgaagaagaataatctacgtgactggttgcgcgtagttgctaacagcaaagagagttacgaattacgttacttccagattaaccaggacgaagaagaggaggaagacgaggattaaatttcatttatctggaaaattttgtatgagttcttgaataaaacttgggaaccaaaatggtggtttatccttgtatctctgcagtgtggattgaacagaaaattggaaatcatagtcaaagggcttcccttggttcgccactcatttatttgtaacttgacttctttttttttctgcttaaaaatttcaattctcgtggtaataccagagtagaaggagagggtgactttaccgaactgacagccattggggaggcagatgcgggtgtggaggtgtgggctgaaggtagtgactgtttgattttaaaaagtgtgactgtcagttgtatctgttgcttttctcaatgattcagggatacaaatgggcttctctcattcattaaaagaaaacgcgacatctttctaagattctctgtgggaaaatgactgtcaataaaatgcgggtttctgggccattcgtcttactttcattttttgattacaaatttctcttgacgcacacaattatgtctgctaatcctcttcttcctagagagagaaactgtgctccttcagtgttgctgccataaaggggtttggggaatcgattgtaaaagtcccaggttctaaattaactaaatgtgtacagaaatgaacgtgtaagtaatgtttctacaggtctttgcaacaaactgtcactttcgtctccagcagagggagctgtaggaatagtgcttccagatgtggtctcccgtgtggggcccagcaatgggggcccctgatgccaagagctctggaggttcttgaaagaggggacacgaaggaggagtgactgggaagcctcccatgccaaggaggtgggaggtgccctggaaatagctgcctcatgccacttaggccatgactggatttaatgtcagtggtgtgccacagtgcagaggctagacaactgaaaggggctaccaaggctgggaaaaaaatgcaattgttgctgtgagtgactttgaaagactctggtgccttgtggtgcccttctgaaattcaaacagtaatgcaaaagtgtctgcattagaatttacggtgtctaaaattcatgtttttaaaagagcttgcctacagatggtttccacacttgaaattgtgccctgcgagttgcatagctggaagttcaatgctcagtcctaccttggctcccattaaacatttggtgctctgtggattgagttgaacgtgttgaggctttgcaatttcacttgtgttaaaggctctggcatttttccatttctatgcaaatttctttgaagcagaattgcttgcatatttcttctctgccgtcacagaaagcagagtttctttcaaacttcactgaggcatcagttgctctttggcaatgtcccttaaccatgattattaactaagtttgtggcttgagtttacaaattctacttgttgcattgatgttcccatgtagtaagtcatttttagtttggttgtgaaaaaaccctgggctgaagttggcatttcagttaaaagaaaaaaagaaactagtcccagatttgaaaacttgtaataaaattgaaactcactggttttctatgtctttttgaactcttgtaatcgagttttgatcatattttctattaaagtggctaacacctggctactcttactgta

SEQ ID NO: 422424 - DNA, 1985 bp, Homo sapiens
  misc_feature (33)..(33): n is a, c, g, or t
ccaaccatcccttacccaaaaaaaaaaaccccnacctcgagatcacgggatgctgccaattttgagcagtttttgcaagaaaggatcaaagtgaacggaaaagctgggaaccttggtggaggggtggtgaccatcgaaaggagcaagagcaagatcaccgtgacatccgaggtgcctttctccaaaaggtatttgaaatatctcaccaaaaaatatttgaagaagaataatctacgtgactggttgcgcgtagttgctaacagcaaagagagttacgaattacgttacttccagattaaccaggacgaagaagaggaggaagacgaggattaaatttcatttatctggaaaattttgtatgagttcttgaataaaacttgggaaccaaaatggtggtttatccttgtatctctgcagtgtggattgaacagaaaattggaaatcatagtcaaagggcttcccttggttcgccactcatttatttgtaacttgacttctttttttttctgcttaaaaatttcaattctcgtggtaataccagagtagaaggagagggtgactttaccgaactgacagccattggggaggcagatgcgggtgtggaggtgtgggctgaaggtagtgactgtttgattttaaaaagtgtgactgtcagttgtatctgttgcttttctcaatgattcagggatacaaatgggcttctctcattcattaaaagaaaacgcgacatctttctaagattctctgtgggaaaatgactgtcaataaaatgcgggtttctgggccattcgtcttactttcattttttgattacaaatttctcttgacgcacacaattatgtctgctaatcctcttcttcctagagagagaaactgtgctccttcagtgttgctgccataaaggggtttggggaatcgattgtaaaagtcccaggttctaaattaactaaatgtgtacagaaatgaacgtgtaagtaatgtttctacaggtctttgcaacaaactgtcactttcgtctccagcagagggagctgtaggaatagtgcttccagatgtggtctcccgtgtggggcccagcaatgggggcccctgatgccaagagctctggaggttcttgaaagaggggacacgaaggaggagtgactgggaagcctcccatgccaaggaggtgggaggtgccctggaaatagctgcctcatgccacttaggccatgactggatttaatgtcagtggtgtgccacagtgcagaggctagacaactgaaaggggctaccaaggctgggaaaaaaatgcaattgttgctgtgagtgactttgaaagactctggtgccttgtggtgcccttctgaaattcaaacagtaatgcaaaagtgtctgcattagaatttacggtgtctaaaattcatgtttttaaaagagcttgcctacagatggtttccacacttgaaattgtgccctgcgagttgcatagctggaagttcaatgctcagtcctaccttggctcccattaaacatttggtgctctgtggattgagttgaacgtgttgaggctttgcaatttcacttgtgttaaaggctctggcatttttccatttctatgcaaatttctttgaagcagaattgcttgcatatttcttctctgccgtcacagaaagcagagtttctttcaaacttcactgaggcatcagttgctctttggcaatgtcccttaaccatgattattaactaagtttgtggcttgagtttacaaattctacttgttgcattgatgttcccatgtagtaagtcatttttagtttggttgtgaaaaaaccctgggctgaagttggcatttcagttaaaagaaaaaaagaaactagtcccagatttgaaaacttgtaataaaattgaaactcactggttttctatgtctttttgaactcttgtaatcgagttttgatcatattttctattaaagtggctaacacctggctactcttactgta

SEQ ID NO: 422425 - DNA, 1297 bp, Homo sapiens
gtggctagcgagcgagggctctgtgcgtctgcgtagttcgctcacctccctttctaactccgctgccgccatggctcctgtgaaaaagcttgtggtgaaggggggcaaaaaaaagaagcaagttctgaagttcactcttgattgcacccaccctgtagaagatggaatcatggatgctgccaattttgagcagtttttgcaagaaaggatcaaagtgaacggaaaagctgggaaccttggtggaggggtggtgaccatcgaaaggagcaagagcaagatcaccgtgacatccgaggtgcctttctccaaaaggtatttgaaatatctcaccaaaaaatatttgaagaagaataatctacgtgactggttgcgcgtagttgctaacagcaaagagagttacgaattacgttacttccagattaaccaggacgaagaagaggaggaagacgaggattaaatttcatttatctggaaaattttgtatgagttcttgaataaaacttgggaaccaaaatggtggtttatccttgtatctctgcagtgtggattgaacagaaaattggaaatcatagtcaaagggcttcccttggttcgccactcatttatttgtaacttgacttctttttttttctgcttaaaaatttcaattctcgtggtaataccagagtagaaggagagggtgactttaccgaactgacagccattggggaggcagatgcgggtgtggaggtgtgggctgaaggtagtgactgtttgattttaaaaagtgtgactgtcagttgtatctgttgcttttctcaatgattcagggatacaaatgggcttctctcattcattaaaagaaaacgcgacatctttctaagattctctgtgggaaaatgactgtcaataaaatgcgggtttctgggccattcgtcttactttcattttttgattacaaatttctcttgacgcacacaattatgtctgctaatcctcttcttcctagagagagaaactgtgctccttcagtgttgctgccataaaggggtttggggaatcgattgtaaaagtcccaggttctaaattaactaaatgtgtacagaaatgaacgttaagtcatttttagtttggttgtgaaaaaaccctgggctgaagttggcatttcagttaaaagaaaaaaagaaactagtcccagatttgaaaacttgtaataaaattgaaactcactggttttctatgtctttttgaactcttgtaatcgagttttgatcatattttctattaaagtggctaacacctggctactcttactgta

SEQ ID NO: 422426 - DNA, 1406 bp, Homo sapiens
acacctaggctaggtacgaggccgcgggttaatcggccgagagtgactgtttgattttaaaaagtgtgactgtcagttgtatctgttgcttttctcaatgattcagggatacaaatgggcttctctcattcattaaaagaaaacgcgacatctttctaagattctctgtgggaaaatgactgtcaataaaatgcgggtttctgggccattcgtcttactttcattttttgattacaaatttctcttgacgcacacaattatgtctgctaatcctcttcttcctagagagagaaactgtgctccttcagtgttgctgccataaaggggtttggggaatcgattgtaaaagtcccaggttctaaattaactaaatgtgtacagaaatgaacgtgtaagtaatgtttctacaggtctttgcaacaaactgtcactttcgtctccagcagagggagctgtaggaatagtgcttccagatgtggtctcccgtgtggggcccagcaatgggggcccctgatgccaagagctctggaggttcttgaaagaggggacacgaaggaggagtgactgggaagcctcccatgccaaggaggtgggaggtgccctggaaatagctgcctcatgccacttaggccatgactggatttaatgtcagtggtgtgccacagtgcagaggctagacaactgaaaggggctaccaaggctgggaaaaaaatgcaattgttgctgtgagtgactttgaaagactctggtgccttgtggtgcccttctgaaattcaaacagtaatgcaaaagtgtctgcattagaatttacggtgtctaaaattcatgtttttaaaagagcttgcctacagatggtttccacacttgaaattgtgccctgcgagttgcatagctggaagttcaatgctcagtcctaccttggctcccattaaacatttggtgctctgtggattgagttgaacgtgttgaggctttgcaatttcacttgtgttaaaggctctggcatttttccatttctatgcaaatttctttgaagcagaattgcttgcatatttcttctctgccgtcacagaaagcagagtttctttcaaacttcactgaggcatcagttgctctttggcaatgtcccttaaccatgattattaactaagtttgtggcttgagtttacaaattctacttgttgcattgatgttcccatgtagtaagtcatttttagtttggttgtgaaaaaaccctgggctgaagttggcatttcagttaaaagaaaaaaagaaactagtcccagatttgaaaacttgtaataaaattgaaactcactggttttctatgtctttttgaactcttgtaatcgagttttgatcatattttctattaaagtggctaacacctggctactcttactgta

SEQ ID NO: 422427 - DNA, 1342 bp, Homo sapiens
  misc_feature (1)..(1): n is a, c, g, or t
  misc_feature (25)..(27): n is a, c, g, or t
naaacattcggctaggtacgaggcnnngtggcaatgattcagggatacaaatgggcttctctcattcattaaaagaaaacgcgacatctttctaagattctctgtgggaaaatgactgtcaataaaatgcgggtttctgggccattcgtcttactttcattttttgattacaaatttctcttgacgcacacaattatgtctgctaatcctcttcttcctagagagagaaactgtgctccttcagtgttgctgccataaaggggtttggggaatcgattgtaaaagtcccaggttctaaattaactaaatgtgtacagaaatgaacgtgtaagtaatgtttctacaggtctttgcaacaaactgtcactttcgtctccagcagagggagctgtaggaatagtgcttccagatgtggtctcccgtgtggggcccagcaatgggggcccctgatgccaagagctctggaggttcttgaaagaggggacacgaaggaggagtgactgggaagcctcccatgccaaggaggtgggaggtgccctggaaatagctgcctcatgccacttaggccatgactggatttaatgtcagtggtgtgccacagtgcagaggctagacaactgaaaggggctaccaaggctgggaaaaaaatgcaattgttgctgtgagtgactttgaaagactctggtgccttgtggtgcccttctgaaattcaaacagtaatgcaaaagtgtctgcattagaatttacggtgtctaaaattcatgtttttaaaagagcttgcctacagatggtttccacacttgaaattgtgccctgcgagttgcatagctggaagttcaatgctcagtcctaccttggctcccattaaacatttggtgctctgtggattgagttgaacgtgttgaggctttgcaatttcacttgtgttaaaggctctggcatttttccatttctatgcaaatttctttgaagcagaattgcttgcatatttcttctctgccgtcacagaaagcagagtttctttcaaacttcactgaggcatcagttgctctttggcaatgtcccttaaccatgattattaactaagtttgtggcttgagtttacaaattctacttgttgcattgatgttcccatgtagtaagtcatttttagtttggttgtgaaaaaaccctgggctgaagttggcatttcagttaaaagaaaaaaagaaactagtcccagatttgaaaacttgtaataaaattgaaactcactggttttctatgtctttttgaactcttgtaatcgagttttgatcatattttctattaaagtggctaacacctggctactcttactgta

SEQ ID NO: 422428 - DNA, 1074 bp, Homo sapiens
gtggctagcgagcgagggctctgtgcgtctgcgtagttcgctcacctccctttctaactccgctgccgccatggctcctgtgaaaaagcttgtggtgaaggggggcaaaaaaaagaagcaagttctgaagttcactcttgattgcacccaccctgtagaagatggaatcatggatgctgccaattttgagcagtttttgcaagaaaggatcaaagtgaacggaaaagctgggaaccttggtggaggggtggtgaccatcgaaaggagcaagagcaagatcaccgtgacatccgaggtgcctttctccaaaaggtatttgaaatatctcaccaaaaaatatttgaagaagaataatctacgtgactggttgcgcgtagttgctaacagcaaagagagttacgaattacgttacttccagattaaccaggacgaagaagaggaggaagacgaggattaaatttcatttatctggaaaattttgtatgagttcttgaataaaacttgggaaccaaaatggtggtttatccttgtatctctgcagtgtggattgaacagaaaattggaaatcatagtcaaagggcttcccttggttcgccactcatttatttgtaacttgacttctttttttttctgcttaaaaatttcaattctcgtggtaataccagagtagaaggagagggtgactttaccgaactgacagccattggggaggcagatgcgggtgtggaggtgtgggctgaaggtagtgactgtttgattttaaaaagtgtgactgtcagttgtatctgttgcttttctcaatgattcagggatacaaatgggcttctctcattcattaaaagaaaacgcgacatctttctaagattctctgtgggaaaatgactgtcaataaaatgcgggtttctgggcaaaaaaaaaaaaaaggggggcttaaattcctgggggcaagttaggtccggttttgtaaagggccaaaggagggattaaaaggagggggttaagttgatggaaagggggtttggggacctctgggttggaccccgaaaacggaatagttgggagtgtggaggtaaa

SEQ ID NO: 422429 - DNA, 1307 bp, Homo sapiens
gtggctagcgagcgagggctctgtgcgtctgcgtagttcgctcacctccctttctaactccgctgccgccatggctcctgtgaaaaagcttgtggtgaaggggggcaaaaaaaagaagcaagttctgaagttcactcttgattgcacccaccctgtagaagatggaatcatggatgctgccaattttgagcagtttttgcaagaaaggatcaaagtgaacggaaaagctgggaaccttggtggaggggtggtgaccatcgaaaggagcaagagcaagatcaccgtgacatccgaggtgcctttctccaaaaggtatttgaaatatctcaccaaaaaatatttgaagaagaataatctacgtgactggttgcgcgtagttgctaacagcaaagagagttacgaattacgttacttccagattaaccaggacgaagaagaggaggaagacgaggattaaatttcatttatctggaaaattttgtatgagttcttgaataaaacttgggaaccaaaatggtggtttatccttgtatctctgcagtgtggattgaacagaaaattggaaatcatagtcaaagggcttcccttggttcgccactcatttatttgtaacttgacttctttttttttctgcttaaaaatttcaattctcgtggtaataccagagtagaaggagagggtgactttaccgaactgacagccattggggaggcagatgcgggtgtggaggtgtgggctgaaggtagtgactgtttgattttaaaaagtgtgactgtcagttgtatctgttgcttttctcaatgattcagggatacaaatgggcttctctcattcattaaaagaaaacgcgacatctttctaagattctctgtgggaaaatgactgtcaataaaatgcgggtttctgggcaaaaaaaaaaaaaaaaaaaaaaaaacaaaaaaaaaacaaaaaaaaaaaaaaaaaaaaaaaaaaaaaagggggggggggggggaaaatatctggggggagggcgaagatataaatgagtgaggacgagagtgttttaattggagagaagggggcacaaaagatggggggtaattaaaaaacagcagagggggggggggtggttaataaaccagagcaggtggaaggaaacagtagtgtggtggtagttttgtagagaagcgaccccacttggtgtgggggaggagaagtggggagcacacacactgagagagagttgctgggaggagaaaaaaaaagggtggtaggtggtaaccaacacgtgtcttttcgggagaagagtggtagagggatgtaaaaat

SEQ ID NO: 422430 - DNA, 1442 bp, Homo sapiens
  misc_feature (123)..(123): n is a, c, g, or t
  misc_feature (153)..(153): n is a, c, g, or t
  misc_feature (240)..(240): n is a, c, g, or t
  misc_feature (267)..(267): n is a, c, g, or t
  misc_feature (291)..(291): n is a, c, g, or t
  misc_feature (297)..(297): n is a, c, g, or t
  misc_feature (311)..(311): n is a, c, g, or t
  misc_feature (320)..(320): n is a, c, g, or t
  misc_feature (325)..(326): n is a, c, g, or t
gctaggacagcgggtgatcccagggacgttgttaaaaggacgtcagtgtatctgtgcttctcaatgatcaggatacatgctcctctcattaaagaaaacgcgacatcttctaagattctctgntgggaaaaatgactgtcaataaaatgcggngttttctgggcccattccgtcctttaaactttttcaatttttttttgggaattttaacaaaaaatttccttctttggaaccgcaccnagccaagttaatagtgctaggcttaantaccttacttcctattcccttagnagaagnaagaaaacttgtgnctccccttnccagnntgtttaggcctggcccaattaaacaggggggttttggggggaaatttcgattgtaaaagtcccaggttctaaattaactaaatgtgtacagaaatgaacgtgtaagtaatgtttctacaggtctttgcaacaaactgtcactttcgtctccagcagagggagctgtaggaatagtgcttccagatgtggtctcccgtgtggggcccagcaatgggggcccctgatgccaagagctctggaggttcttgaaagaggggacacgaaggaggagtgactgggaagcctcccatgccaaggaggtgggaggtgccctggaaatagctgcctcatgccacttaggccatgactggatttaatgtcagtggtgtgccacagtgcagaggctagacaactgaaaggggctaccaaggctgggaaaaaaatgcaattgttgctgtgagtgactttgaaagactctggtgccttgtggtgcccttctgaaattcaaacagtaatgcaaaagtgtctgcattagaatttacggtgtctaaaattcatgtttttaaaagagcttgcctacagatggtttccacacttgaaattgtgccctgcgagttgcatagctggaagttcaatgctcagtcctaccttggctcccattaaacatttggtgctctgtggattgagttgaacgtgttgaggctttgcaatttcacttgtgttaaaggctctggcatttttccatttctatgcaaatttctttgaagcagaattgcttgcatatttcttctctgccgtcacagaaagcagagtttctttcaaacttcactgaggcatcagttgctctttggcaatgtcccttaaccatgattattaactaagtttgtggcttgagtttacaaattctacttgttgcattgatgttcccatgtagtaagtcatttttagtttggttgtgaaaaaaccctgggctgaagttggcatttcagttaaaagaaaaaaagaaactagtcccagatttgaaaacttgtaataaaattgaaactcactggttttctatgtctttttgaactcttgtaatcgagttttgatcatattttctattaaagtggctaacacctggctactcttactgta

SEQ ID NO: 422431 - DNA, 1102 bp, Homo sapiens
gtaaatggccatgtcaggctgtggatcggacgaggggatgatgtaaagtcagttctaaattaactaaatgtgtacagaaatgaacgtgtaagtaatgtttctacaggtctttgcaacaaactgtcactttcgtctccagcagagggagctgtaggaatagtgcttccagatgtggtctcccgtgtggggcccagcaatgggggcccctgatgccaagagctctggaggttcttgaaagaggggacacgaaggaggagtgactgggaagcctcccatgccaaggaggtgggaggtgccctggaaatagctgcctcatgccacttaggccatgactggatttaatgtcagtggtgtgccacagtgcagaggctagacaactgaaaggggctaccaaggctgggaaaaaaatgcaattgttgctgtgagtgactttgaaagactctggtgccttgtggtgcccttctgaaattcaaacagtaatgcaaaagtgtctgcattagaatttacggtgtctaaaattcatgtttttaaaagagcttgcctacagatggtttccacacttgaaattgtgccctgcgagttgcatagctggaagttcaatgctcagtcctaccttggctcccattaaacatttggtgctctgtggattgagttgaacgtgttgaggctttgcaatttcacttgtgttaaaggctctggcatttttccatttctatgcaaatttctttgaagcagaattgcttgcatatttcttctctgccgtcacagaaagcagagtttctttcaaacttcactgaggcatcagttgctctttggcaatgtcccttaaccatgattattaactaagtttgtggcttgagtttacaaattctacttgttgcattgatgttcccatgtagtaagtcatttttagtttggttgtgaaaaaaccctgggctgaagttggcatttcagttaaaagaaaaaaagaaactagtcccagatttgaaaacttgtaataaaattgaaactcactggttttctatgtctttttgaactcttgtaatcgagttttgatcatattttctattaaagtggctaacacctggctactcttactgta

SEQ ID NO: 422432 - DNA, 783 bp, Homo sapiens
gctctgctagggctggtgtctctgaggagaaaacgaggctggttctgcaaatgttggaataagtgcagactggattccactgctgcttccagaatgttccaactgccacctccaggataaagaagcaagagtggatgacaccagacaggacaggagcaagcaggaagcaaagccccctattgatagagccaaaccgggatcagctggaaagcagaagtgtttgcagaggcccagcctgatcattatagagccaagaacagcagctggctttggagcttggtcaaccggcttgaggcctgagttgaaagctagacccatcagcacagtctcttctggtgattggacttttgctagaaaaagcttgtggtgaaggggggcaaaaaaaagaagcaagttctgaagttcactcttgattgcacccaccctgtagaagatggaatcatggatgctgccaattttgagcagtttttgcaagaaaggatcaaagtgaacggaaaagctgggaaccttggtggaggggtggtgaccatcgaaaggagcaagagcaagatcaccgtgacatccgaggtgcctttctccaaaaggtatttgaaatatctcaccaaaaaatatttgaagaagaataatctacgtgactggttgcgcgtagttgctaacagcaaagagagttacgaattacgttacttccagattaaccaggacgaagaagaggaggaagacgaggattaaatttcatttatctggaaaattttgtatgagttcttgaataaaacttgggaacca

SEQ ID NO: 422433 - DNA, 995 bp, Homo sapiens
  misc_feature (523)..(523): n is a, c, g, or t
gtggctagcgagcgagggctctgtgcgtctgcgtagttcgctcacctccctttctaactccgctgccgccatggctcctgtgaaaaagcttgtggtgaaggggggcaaaaaaaagaagcaagttctgaagttcactcttgattgcacccaccctgtagaagatggaatcatggatgctgccaattttgagcagtttttgcaagaaaggatcaaagtgaacggaaaagctgggaaccttggtggaggggtggtgaccatcgaaaggagcaagagcaagatcaccgtgacatccgaggtgcctttctccaaaaggtatttgaaatatctcaccaaaaaatatttgaagaagaataatctacgtgactggttgcgcgtagttgctaacagcaaagagagttacgaattacgttacttccagattaaccaggacgaagaagaggaggaagacgaggattaaatttcatttatctggaaaattttgtatgagttcttgaataaaacttgggaaccaaaaaaaaaaggnaagaaaacacaacaaaaaaaaaagaaaacaaaaactgtttggggccgcggcaccgggggcccccgagaaaaacgcttttataagaacacttgcggtgagtgggccggcgcgggccccaagatggtaggtatacgggcaaccagtggtgccaaaagcggcgtggtacccggggggggaaaccatcccgtgggggctaggaagcaaacatggggctgttcgggagtgtcctctatcacccactaatttaaaaaagacgcccgcccgggggggggagagccaaccccggagcagtgacgttttttctgcgagcccaactcttcccaccgaagatgagaggagcgatctaggagggcgtgcaaccaataagcgaggggggctatcatcttaacacacaggggtgggtcttaccaagaggagaagggctcgtatagtatgcataaattatacggcccccggcatcgggtgggagagc

SEQ ID NO: 422434 - DNA, 852 bp, Homo sapiens
gtggctagcgagcgagggctctgtgcgtctgcgtagttcgctcacctccctttctaactccgctgccgccatggctcctgtgaaaaagcttgtggtgaaggggggcagaatcatggatgctgccaattttgagcagtttttgcaagaaaggatcaaagtgaacggaaaagctgggaaccttggtggaggggtggtgaccatcgaaaggagcaagagcaagatcaccgtgacatccgaggtgcctttctccaaaaggtatttgaaatatctcaccaaaaaatatttgaagaagaataatctacgtgactggttgcgcgtagttgctaacagcaaagagagttacgaattacgttacttccagattaaccaggacgaagaagaggaggaagacgaggattaaatttcatttatctggaaaattttgtatgagttcttgaataaaacttgggaaccaaaatggtggtttatccttgtatctctgcagtgtggattgaacagaaaattggaaatcatagtcaaagggcttcccttggttcgccactcatttatttgtaacttgacttctttttttttctgcttaaaaatttcaattctcgtggtaataccagagtagaaggagagggtgactttaccgaactgacagccattggggaggcagatgcgggtgtggaggtgtgggctgaaggtagtgactgtttgattttaaaaagtgtgactgtcagttgtatctgttgcttttctcaatgattcagggatacaaatgggcttctctcattcattaaaagaaaacgcgacatctttctaagattctctgtgggaaaatgactgtcaataaaatgcgggtttctgggc

SEQ ID NO: 422435 - DNA, 1574 bp, Homo sapiens
actggaaccttgtaggatgtgctttgccgggtggtttggaagtactaatgcatagatgaagcgaatcaaaatgtcagaagttcttgacggtagtgttgtaataagattctaggttttagccttaaccttgtccaagctggagtggacaggcacctagaatactttgcaactcccttcatgagaaggtggatgagacaggattaagggagatgagctaagacggatcaggaccctactctgaacatgtaggacaaggattgatttcatatgaaaattgtgggtatgcaaggcattttgtatgcctgcactctaattttggaaaaatagtatttttttgaaattgggaatgttagggcaaacaaaaggaagtgttcattttattgtggttcataaactaagagaccttcatgcctgtagagattggggagactggaaagtttgagtgagtcaagagtgctagaatgatttccccatcaaaagggcatgaccccaggccccaagcttgtacagcagcatctgccccattatacctctggcactcaggcagtgatgcctcttggccctctggcaaagggagcacacttccgttagttttgtatttgtatggacttttatacctatgacgtttctggttctgttaatcttgtttttccgactgactgaaacttcatctctgttatcatttgtgtattttcttgtgaaaaagcttgtggtgaaggggggcaaaaaaaagaagcaagttctgaagttcactcttgattgcacccaccctgtagaagatggaatcatggatgctgccaattttgagcagtttttgcaagaaaggatcaaagtgaacggaaaagctgggaaccttggtggaggggtggtgaccatcgaaaggagcaagagcaagatcaccgtgacatccgaggtgcctttctccaaaaggtatttgaaatatctcaccaaaaaatatttgaagaagaataatctacgtgactggttgcgcgtagttgctaacagcaaagagagttacgaattacgttacttccagattaaccaggacgaagaagaggaggaagacgaggattaaatttcatttatctggaaaattttgtatgagttcttgaataaaacttgggaaccaaaaaaaaaaaaaaaaaaaaacaaaaaaaaaaaaaaaaaaaaaaaaaaaaaaaaaaaaaaaaaaaaaaaaaaacaaaaaaaaaacaaaaaaaaaaaaaaaaaaaaaaaaaaaaaagggggggggggggggaaaatatctggggggagggcgaagatataaatgagtgaggacgagagtgttttaattggagagaagggggcacaaaagatggggggtaattaaaaaacagcagagggggggggggtggttaataaaccagagcaggtggaaggaaacagtagtgtggtggtagttttgtagagaagcgaccccacttggtgtgggggaggagaagtggggagcacacacactgagagagagttgctgggaggagaaaaaaaaagggtggtaggtggtaaccaacacgtgtcttttcgggagaagagtggtagagggatgtaaaaat

SEQ ID NO: 422436 - DNA, 510 bp, Homo sapiens
gtggctagcgagcgagggctctgtgcgtctgcgtagttcgctcacctccctttctaactccgctgccgccatggctcctgtgaaaaagcttgtggtgaaggggggcaaaaaaaagaagcaagttctgaagttcactcttgattgcacccaccctgtagaagatggaatcatggatgctgccaattttgagcagtttttgcaagaaaggatcaaagtgaacggaaaagctgggaaccttggtggaggggtggtgaccatcgaaaggagcaagagcaagatcaccgtgacatccgaggtgcctttctccaaaaggtatttgaaatatctcaccaaaaaatatttgaagaagaataatctacgtgactggttgcgcgtagttgctaacagcaaagagagttacgaattacgttacttccagattaaccaggacgaagaagaaaatgaaatttaatcctcgtcttcctcctcttcttcgtccgtcgacgcggccgcgaatttagtagtagtagt

SEQ ID NO: 422437 - DNA, 369 bp, Homo sapiens
  misc_feature (60)..(60): n is a, c, g, or t
  misc_feature (62)..(62): n is a, c, g, or t
ccaggtccgagatcaggcagaagcaggaagcagaagcagggcagaagcaggaagcaggangnggcagaagcaggaagcagtggcaatgtcccttaaccatgattattaactaagtttgtggcttgagtttacaaattctacttgttgcattgatgttcccatgtagtaagtcatttttagtttggttgtgaaaaaaccctgggctgaagttggcatttcagttaaaagaaaaaaagaaactagtcccagatttgaaaacttgtaataaaattgaaactcactggttttctatgtctttttgaactcttgtaatcgagttttgatcatattttctattaaagtggctaacacctggctactcttactgta

SEQ ID NO: 422438 - DNA, 988 bp, Homo sapiens
gtggctagcgagcgagggctctgtgcgtctgcgtagttcgctcacctccctttctaactccgctgccgccatggctcctgtggttagtatggctccgcgtgaggcctcggctccaggggaggcacgtgggcctcgccgagcccggcatctacccaggctcgctggggacggcgccctgcagcgtcctgctggggtgggctggcaggtcggccggagcgggccagagcccctgccgatcccagcacgttgtaggcggaggaggccgcggcccgaggctcgtgagggagatccgggaggtctcggaggcccggggccccagctaggggctagcggggagctggagcctggagactgcggtctgggccggccactggtcctcggaccccggccgggggcctgattacctgggtggagggcggggaagaagaacgggacctgctaccctggggagccgcgcattcggaagtccacggccaagactcggggacgaatccgcggaagggcggcttggtcggcgtgctttcggagaggaggcctgggtttgaggagctttttagcgtccccagaggaaatcagtttatcagggcgcactgtacagacccaaacgggtgttgcagtggtgtagggagaaggctctcattgcattctcctttagctatgctgggactgggctgtgcggcgccctcctcctaggttatttgagaaagttgtttttccgtgttcttcgtcccaagatcctacttttcctcttttgttgggactccctggttaacatttccggttcttctgctctttctgtctggttgggcttttgaatgccttttggtttaaaaccttgatggagaagtatcaagcccgttgtgggtaggtctcttgattgattgtgtgtgttcggaatagatcttaaagtacccctcttagattattactgcgaagagacgttgtaaaaaataaatcagtgatttttgtagtggccaaatgtttgaaa

SEQ ID NO: 422439 - DNA, 797 bp, Homo sapiens
ctatcccatctcctctccctcatacttatttttatcccacacgaaaataaccctagatctgcctgctgccaatttgagcagtttttgcaagaaaggatcaaagtgaacggaaaagctgggaaccttggtggaggggtggtgaccatcgaaaggagcaagagcaagatcaccgtgacatccgaggtgcctttctccaaaaggtatttgaaatatctcaccaaaaaatatttgaagaagaataatctacgtgactggttgcgcgtagttgctaacagcaaagagagttacgaattacgttacttccagattaaccaggacgaagaagaggaggaagacgaggattaaatttcatttatctggaaaattttgtatgagttcttgaataaaacttgggaaccaaaatggtggtttatccttgtatctctgcagtgtggattgaacagaaaattggaaatcatagtcaaagggcttcccttggttcgccactcatttatttgtaacttgacttctttttttttctgcttaaaaatttcaattctcgtggtaataccagagtagaaggagagggtgactttaccgaactgacagccattggggaggcagatgcgggtgtggaggtgtgggctgaaggtagtgactgtttgattttaaaaagtgtgactgtcagttgtatctgttgcttttctcaatgattcagggatacaaatgggcttctctcattcattaaaagaaaacgcgacatctttctaagattctctgtgggaaaatgactgtcaataaaatgcgggtttctgggc

SEQ ID NO: 422440 - DNA, 394 bp, Homo sapiens
  misc_feature (38)..(40): n is a, c, g, or t
  misc_feature (57)..(57): n is a, c, g, or t
ggaaataataaattccataacatatttatagcgcaatnnnaaccttaagaggaccgnagctgccaattttgagcagtttttgcaagaaaggatcaaagtgaacggaaaagctgggaaccttggtggaggggtggtgaccatcgaaaggagcaagagcaagatcaccgtgacatccgaggtgcctttctccaaaaggtatttgaaatatctcaccaaaaaatatttgaagaagaataatctacgtgactggttgcgcgtagttgctaacagcaaagagagttacgaattacgttacttccagattaaccaggacgaagaagaggaggaagacgaggattaaatttcatttatctggaaaattttgtatgagttcttgaataaaacttgggaacca

SEQ ID NO: 422441 - DNA, 2891 bp, Homo sapiens
gtggctagcgagcgagggctctgtgcgtctgcgtagttcgctcacctccctttctaactccgctgccgccatggctcctgtggttagtatggctccgcgtgaggcctcggctccaggggaggcacgtgggcctcgccgagcccggcatctacccaggctcgctggggacggcgccctgcagcgtcctgctggggtgggctggcaggtcggccggagcgggccagagcccctgccgatcccagcacgttgtaggcggaggaggccgcggcccgaggctcgtgagggagatccgggaggtctcggaggcccggggccccagctaggggctagcggggagctggagcctggagactgcggtctgggccggccactggtcctcggaccccggccgggggcctgattacctgggtggagggcggggaagaagaacgggacctgctaccctggggagccgcgcattcggaagtccacggccaagactcggggacgaatccgcggaagggcggcttggtcggcgtgctttcggagaggaggcctgggtttgaggagctttttagcgtccccagaggaaatcagtttatcagggcgcactgtacagacccaaacgggtgttgcagtggtgtagggagaaggctctcattgcattctcctttagctatgctgggactgggctgtgcggcgccctcctcctaggttatttgagaaagttgtttttccgtgttcttcgtcccaagatcctacttttcctcttttgttgggactccctggttaacatttccggttcttctgctctttctgtctggttgggcttttgaatgccttttggtttaaaaccttgatggagaagtatcaagcccgttgtggaaaaagcttgtggtgaaggggggcaaaaaaaagaagcaagttctgaagttcactcttgattgcacccaccctgtagaagatggaatcatggatgctgccaattttgagcagtttttgcaagaaaggatcaaagtgaacggaaaagctgggaaccttggtggaggggtggtgaccatcgaaaggagcaagagcaagatcaccgtgacatccgaggtgcctttctccaaaaggtatttgaaatatctcaccaaaaaatatttgaagaagaataatctacgtgactggttgcgcgtagttgctaacagcaaagagagttacgaattacgttacttccagattaaccaggacgaagaagaggaggaagacgaggattaaatttcatttatctggaaaattttgtatgagttcttgaataaaacttgggaaccaaaatggtggtttatccttgtatctctgcagtgtggattgaacagaaaattggaaatcatagtcaaagggcttcccttggttcgccactcatttatttgtaacttgacttctttttttttctgcttaaaaatttcaattctcgtggtaataccagagtagaaggagagggtgactttaccgaactgacagccattggggaggcagatgcgggtgtggaggtgtgggctgaaggtagtgactgtttgattttaaaaagtgtgactgtcagttgtatctgttgcttttctcaatgattcagggatacaaatgggcttctctcattcattaaaagaaaacgcgacatctttctaagattctctgtgggaaaatgactgtcaataaaatgcgggtttctgggccattcgtcttactttcattttttgattacaaatttctcttgacgcacacaattatgtctgctaatcctcttcttcctagagagagaaactgtgctccttcagtgttgctgccataaaggggtttggggaatcgattgtaaaagtcccaggttctaaattaactaaatgtgtacagaaatgaacgtgtaagtaatgtttctacaggtctttgcaacaaactgtcactttcgtctccagcagagggagctgtaggaatagtgcttccagatgtggtctcccgtgtggggcccagcaatgggggcccctgatgccaagagctctggaggttcttgaaagaggggacacgaaggaggagtgactgggaagcctcccatgccaaggaggtgggaggtgccctggaaatagctgcctcatgccacttaggccatgactggatttaatgtcagtggtgtgccacagtgcagaggctagacaactgaaaggggctaccaaggctgggaaaaaaatgcaattgttgctgtgagtgactttgaaagactctggtgccttgtggtgcccttctgaaattcaaacagtaatgcaaaagtgtctgcattagaatttacggtgtctaaaattcatgtttttaaaagagcttgcctacagatggtttccacacttgaaattgtgccctgcgagttgcatagctggaagttcaatgctcagtcctaccttggctcccattaaacatttggtgctctgtggattgagttgaacgtgttgaggctttgcaatttcacttgtgttaaaggctctggcatttttccatttctatgcaaatttctttgaagcagaattgcttgcatatttcttctctgccgtcacagaaagcagagtttctttcaaacttcactgaggcatcagttgctctttggcaatgtcccttaaccatgattattaactaagtttgtggcttgagtttacaaattctacttgttgcattgatgttcccatgtagtaagtcatttttagtttggttgtgaaaaaaccctgggctgaagttggcatttcagttaaaagaaaaaaagaaactagtcccagatttgaaaacttgtaataaaattgaaactcactggttttctatgtctttttgaactcttgtaatcgagttttgatcatattttctattaaagtggctaacacctggctactcttactgta

SEQ ID NO: 422442 - DNA, 2062 bp, Homo sapiens
tgtgttatggtcttgagtgatcccggagatagtgaaggtgatggggggattaacaggatgcagtgtggaagcaagttctgaagttcactcttgattgcacccaccctgtagaagatggaatcatggatgctgccaattttgagcagtttttgcaagaaaggatcaaagtgaacggaaaagctgggaaccttggtggaggggtggtgaccatcgaaaggagcaagagcaagatcaccgtgacatccgaggtgcctttctccaaaaggtatttgaaatatctcaccaaaaaatatttgaagaagaataatctacgtgactggttgcgcgtagttgctaacagcaaagagagttacgaattacgttacttccagattaaccaggacgaagaagaggaggaagacgaggattaaatttcatttatctggaaaattttgtatgagttcttgaataaaacttgggaaccaaaatggtggtttatccttgtatctctgcagtgtggattgaacagaaaattggaaatcatagtcaaagggcttcccttggttcgccactcatttatttgtaacttgacttctttttttttctgcttaaaaatttcaattctcgtggtaataccagagtagaaggagagggtgactttaccgaactgacagccattggggaggcagatgcgggtgtggaggtgtgggctgaaggtagtgactgtttgattttaaaaagtgtgactgtcagttgtatctgttgcttttctcaatgattcagggatacaaatgggcttctctcattcattaaaagaaaacgcgacatctttctaagattctctgtgggaaaatgactgtcaataaaatgcgggtttctgggccattcgtcttactttcattttttgattacaaatttctcttgacgcacacaattatgtctgctaatcctcttcttcctagagagagaaactgtgctccttcagtgttgctgccataaaggggtttggggaatcgattgtaaaagtcccaggttctaaattaactaaatgtgtacagaaatgaacgtgtaagtaatgtttctacaggtctttgcaacaaactgtcactttcgtctccagcagagggagctgtaggaatagtgcttccagatgtggtctcccgtgtggggcccagcaatgggggcccctgatgccaagagctctggaggttcttgaaagaggggacacgaaggaggagtgactgggaagcctcccatgccaaggaggtgggaggtgccctggaaatagctgcctcatgccacttaggccatgactggatttaatgtcagtggtgtgccacagtgcagaggctagacaactgaaaggggctaccaaggctgggaaaaaaatgcaattgttgctgtgagtgactttgaaagactctggtgccttgtggtgcccttctgaaattcaaacagtaatgcaaaagtgtctgcattagaatttacggtgtctaaaattcatgtttttaaaagagcttgcctacagatggtttccacacttgaaattgtgccctgcgagttgcatagctggaagttcaatgctcagtcctaccttggctcccattaaacatttggtgctctgtggattgagttgaacgtgttgaggctttgcaatttcacttgtgttaaaggctctggcatttttccatttctatgcaaatttctttgaagcagaattgcttgcatatttcttctctgccgtcacagaaagcagagtttctttcaaacttcactgaggcatcagttgctctttggcaatgtcccttaaccatgattattaactaagtttgtggcttgagtttacaaattctacttgttgcattgatgttcccatgtagtaagtcatttttagtttggttgtgaaaaaaccctgggctgaagttggcatttcagttaaaagaaaaaaagaaactagtcccagatttgaaaacttgtaataaaattgaaactcactggttttctatgtctttttgaactcttgtaatcgagttttgatcatattttctattaaagtggctaacacctggctactcttactgta

SEQ ID NO: 422443 - DNA, 2040 bp, Homo sapiens
acactctggttggaacacctggtcgtatcaaagaccatctgcagagtggccgattgatctttctaaactgcgacatgttgtgcttgtagaagatggaatcatggatgctgccaattttgagcagtttttgcaagaaaggatcaaagtgaacggaaaagctgggaaccttggtggaggggtggtgaccatcgaaaggagcaagagcaagatcaccgtgacatccgaggtgcctttctccaaaaggtatttgaaatatctcaccaaaaaatatttgaagaagaataatctacgtgactggttgcgcgtagttgctaacagcaaagagagttacgaattacgttacttccagattaaccaggacgaagaagaggaggaagacgaggattaaatttcatttatctggaaaattttgtatgagttcttgaataaaacttgggaaccaaaatggtggtttatccttgtatctctgcagtgtggattgaacagaaaattggaaatcatagtcaaagggcttcccttggttcgccactcatttatttgtaacttgacttctttttttttctgcttaaaaatttcaattctcgtggtaataccagagtagaaggagagggtgactttaccgaactgacagccattggggaggcagatgcgggtgtggaggtgtgggctgaaggtagtgactgtttgattttaaaaagtgtgactgtcagttgtatctgttgcttttctcaatgattcagggatacaaatgggcttctctcattcattaaaagaaaacgcgacatctttctaagattctctgtgggaaaatgactgtcaataaaatgcgggtttctgggccattcgtcttactttcattttttgattacaaatttctcttgacgcacacaattatgtctgctaatcctcttcttcctagagagagaaactgtgctccttcagtgttgctgccataaaggggtttggggaatcgattgtaaaagtcccaggttctaaattaactaaatgtgtacagaaatgaacgtgtaagtaatgtttctacaggtctttgcaacaaactgtcactttcgtctccagcagagggagctgtaggaatagtgcttccagatgtggtctcccgtgtggggcccagcaatgggggcccctgatgccaagagctctggaggttcttgaaagaggggacacgaaggaggagtgactgggaagcctcccatgccaaggaggtgggaggtgccctggaaatagctgcctcatgccacttaggccatgactggatttaatgtcagtggtgtgccacagtgcagaggctagacaactgaaaggggctaccaaggctgggaaaaaaatgcaattgttgctgtgagtgactttgaaagactctggtgccttgtggtgcccttctgaaattcaaacagtaatgcaaaagtgtctgcattagaatttacggtgtctaaaattcatgtttttaaaagagcttgcctacagatggtttccacacttgaaattgtgccctgcgagttgcatagctggaagttcaatgctcagtcctaccttggctcccattaaacatttggtgctctgtggattgagttgaacgtgttgaggctttgcaatttcacttgtgttaaaggctctggcatttttccatttctatgcaaatttctttgaagcagaattgcttgcatatttcttctctgccgtcacagaaagcagagtttctttcaaacttcactgaggcatcagttgctctttggcaatgtcccttaaccatgattattaactaagtttgtggcttgagtttacaaattctacttgttgcattgatgttcccatgtagtaagtcatttttagtttggttgtgaaaaaaccctgggctgaagttggcatttcagttaaaagaaaaaaagaaactagtcccagatttgaaaacttgtaataaaattgaaactcactggttttctatgtctttttgaactcttgtaatcgagttttgatcatattttctattaaagtggctaacacctggctactcttactgta

SEQ ID NO: 422444 - DNA, 1976 bp, Homo sapiens
  misc_feature (20)..(20): n is a, c, g, or t
aatttattaatgcaggacgnaaaaaaaccttcagatcatgggtgctgccattttgagcagtttttgcaagaaaggatcaaagtgaacggaaaagctgggaaccttggtggaggggtggtgaccatcgaaaggagcaagagcaagatcaccgtgacatccgaggtgcctttctccaaaaggtatttgaaatatctcaccaaaaaatatttgaagaagaataatctacgtgactggttgcgcgtagttgctaacagcaaagagagttacgaattacgttacttccagattaaccaggacgaagaagaggaggaagacgaggattaaatttcatttatctggaaaattttgtatgagttcttgaataaaacttgggaaccaaaatggtggtttatccttgtatctctgcagtgtggattgaacagaaaattggaaatcatagtcaaagggcttcccttggttcgccactcatttatttgtaacttgacttctttttttttctgcttaaaaatttcaattctcgtggtaataccagagtagaaggagagggtgactttaccgaactgacagccattggggaggcagatgcgggtgtggaggtgtgggctgaaggtagtgactgtttgattttaaaaagtgtgactgtcagttgtatctgttgcttttctcaatgattcagggatacaaatgggcttctctcattcattaaaagaaaacgcgacatctttctaagattctctgtgggaaaatgactgtcaataaaatgcgggtttctgggccattcgtcttactttcattttttgattacaaatttctcttgacgcacacaattatgtctgctaatcctcttcttcctagagagagaaactgtgctccttcagtgttgctgccataaaggggtttggggaatcgattgtaaaagtcccaggttctaaattaactaaatgtgtacagaaatgaacgtgtaagtaatgtttctacaggtctttgcaacaaactgtcactttcgtctccagcagagggagctgtaggaatagtgcttccagatgtggtctcccgtgtggggcccagcaatgggggcccctgatgccaagagctctggaggttcttgaaagaggggacacgaaggaggagtgactgggaagcctcccatgccaaggaggtgggaggtgccctggaaatagctgcctcatgccacttaggccatgactggatttaatgtcagtggtgtgccacagtgcagaggctagacaactgaaaggggctaccaaggctgggaaaaaaatgcaattgttgctgtgagtgactttgaaagactctggtgccttgtggtgcccttctgaaattcaaacagtaatgcaaaagtgtctgcattagaatttacggtgtctaaaattcatgtttttaaaagagcttgcctacagatggtttccacacttgaaattgtgccctgcgagttgcatagctggaagttcaatgctcagtcctaccttggctcccattaaacatttggtgctctgtggattgagttgaacgtgttgaggctttgcaatttcacttgtgttaaaggctctggcatttttccatttctatgcaaatttctttgaagcagaattgcttgcatatttcttctctgccgtcacagaaagcagagtttctttcaaacttcactgaggcatcagttgctctttggcaatgtcccttaaccatgattattaactaagtttgtggcttgagtttacaaattctacttgttgcattgatgttcccatgtagtaagtcatttttagtttggttgtgaaaaaaccctgggctgaagttggcatttcagttaaaagaaaaaaagaaactagtcccagatttgaaaacttgtaataaaattgaaactcactggttttctatgtctttttgaactcttgtaatcgagttttgatcatattttctattaaagtggctaacacctggctactcttactgta

SEQ ID NO: 422445 - DNA, 1997 bp, Homo sapiens
ctatcccatctcctctccctcatacttatttttatcccacacgaaaataaccctagatctgcctgctgccaatttgagcagtttttgcaagaaaggatcaaagtgaacggaaaagctgggaaccttggtggaggggtggtgaccatcgaaaggagcaagagcaagatcaccgtgacatccgaggtgcctttctccaaaaggtatttgaaatatctcaccaaaaaatatttgaagaagaataatctacgtgactggttgcgcgtagttgctaacagcaaagagagttacgaattacgttacttccagattaaccaggacgaagaagaggaggaagacgaggattaaatttcatttatctggaaaattttgtatgagttcttgaataaaacttgggaaccaaaatggtggtttatccttgtatctctgcagtgtggattgaacagaaaattggaaatcatagtcaaagggcttcccttggttcgccactcatttatttgtaacttgacttctttttttttctgcttaaaaatttcaattctcgtggtaataccagagtagaaggagagggtgactttaccgaactgacagccattggggaggcagatgcgggtgtggaggtgtgggctgaaggtagtgactgtttgattttaaaaagtgtgactgtcagttgtatctgttgcttttctcaatgattcagggatacaaatgggcttctctcattcattaaaagaaaacgcgacatctttctaagattctctgtgggaaaatgactgtcaataaaatgcgggtttctgggccattcgtcttactttcattttttgattacaaatttctcttgacgcacacaattatgtctgctaatcctcttcttcctagagagagaaactgtgctccttcagtgttgctgccataaaggggtttggggaatcgattgtaaaagtcccaggttctaaattaactaaatgtgtacagaaatgaacgtgtaagtaatgtttctacaggtctttgcaacaaactgtcactttcgtctccagcagagggagctgtaggaatagtgcttccagatgtggtctcccgtgtggggcccagcaatgggggcccctgatgccaagagctctggaggttcttgaaagaggggacacgaaggaggagtgactgggaagcctcccatgccaaggaggtgggaggtgccctggaaatagctgcctcatgccacttaggccatgactggatttaatgtcagtggtgtgccacagtgcagaggctagacaactgaaaggggctaccaaggctgggaaaaaaatgcaattgttgctgtgagtgactttgaaagactctggtgccttgtggtgcccttctgaaattcaaacagtaatgcaaaagtgtctgcattagaatttacggtgtctaaaattcatgtttttaaaagagcttgcctacagatggtttccacacttgaaattgtgccctgcgagttgcatagctggaagttcaatgctcagtcctaccttggctcccattaaacatttggtgctctgtggattgagttgaacgtgttgaggctttgcaatttcacttgtgttaaaggctctggcatttttccatttctatgcaaatttctttgaagcagaattgcttgcatatttcttctctgccgtcacagaaagcagagtttctttcaaacttcactgaggcatcagttgctctttggcaatgtcccttaaccatgattattaactaagtttgtggcttgagtttacaaattctacttgttgcattgatgttcccatgtagtaagtcatttttagtttggttgtgaaaaaaccctgggctgaagttggcatttcagttaaaagaaaaaaagaaactagtcccagatttgaaaacttgtaataaaattgaaactcactggttttctatgtctttttgaactcttgtaatcgagttttgatcatattttctattaaagtggctaacacctggctactcttactgta

SEQ ID NO: 422446 - DNA, 1018 bp, Homo sapiens
  misc_feature (862)..(862): n is a, c, g, or t
  misc_feature (869)..(869): n is a, c, g, or t
  misc_feature (875)..(876): n is a, c, g, or t
gtggctagcgagcgagggctctgtgcgtctgcgtagttcgctcacctccctttctaactccgctgccgccatggctcctgtgaaaaagcttgtggtgaaggggggcagaatcatggatgctgccaattttgagcagtttttgcaagaaaggatcaaagtgaacggaaaagctgggaaccttggtggaggggtggtgaccatcgaaaggagcaagagcaagatcaccgtgacatccgaggtgcctttctccaaaaggtatttgaaatatctcaccaaaaaatatttgaagaagaataatctacgtgactggttgcgcgtagttgctaacagcaaagagagttacgaattacgttacttccagattaaccaggacgaagaagaggaggaagacgaggattaaatttcatttatctggaaaattttgtatgagttcttgaataaaacttgggaaccaaaatggtggtttatccttgtatctctgcagtgtggattgaacagaaaattggaaatcatagtcaaagggcttcccttggttcgccactcatttatttgtaacttgacttctttttttttctgcttaaaaatttcaattctcgtggtaataccagagtagaaggagagggtgactttaccgaactgacagccattggggaggcagatgcgggtgtggaggtgtgggctgaaggtagtgactgtttgattttaaaaagtgtgactgtcagttgtatctgttgcttttctcaatgattcagggatacaaatgggcttctctcattcattaaaagaaaacgcgacatctttctaagattctctgtgggaaaatgactgtcaataaaatgcgggtttctgggcaaaaaaaaanaatggcntcttgnnctagcgtggactttgagccctttccttaaggggggtaatgatgatctcctcattgatccctggctcggacttcgttggggaacgtgttaactacttaaagcgggatccgtgttccaaactggggtaccctgaaaactttggc

SEQ ID NO: 422447 - DNA, 807 bp, Homo sapiens
  misc_feature (38)..(40): n is a, c, g, or t
  misc_feature (57)..(57): n is a, c, g, or t
ggaaataataaattccataacatatttatagcgcaatnnnaaccttaagaggaccgnagctgccaattttgagcagtttttgcaagaaaggatcaaagtgaacggaaaagctgggaaccttggtggaggggtggtgaccatcgaaaggagcaagagcaagatcaccgtgacatccgaggtgcctttctccaaaaggtatttgaaatatctcaccaaaaaatatttgaagaagaataatctacgtgactggttgcgcgtagttgctaacagcaaagagagttacgaattacgttacttccagattaaccaggacgaagaagaggaggaagacgaggattaaatttcatttatctggaaaattttgtatgagttcttgaataaaacttgggaaccaaaaaaaaacaaaaagaagaaaaaaaaaaaacaaaaaaagaaaaaaaaaaaacaaaaaaaaaaaaaaaaaaaaaaaaaaaaaagggggggggggggggaaaatatctggggggagggcgaagatataaatgagtgaggacgagagtgttttaattggagagaagggggcacaaaagatggggggtaattaaaaaacagcagagggggggggggtggttaataaaccagagcaggtggaaggaaacagtagtgtggtggtagttttgtagagaagcgaccccacttggtgtgggggaggagaagtggggagcacacacactgagagagagttgctgggaggagaaaaaaaaagggtggtaggtggtaaccaacacgtgtcttttcgggagaagagtggtagagggatgtaaaaat

SEQ ID NO: 422448 - DNA, 1058 bp, Homo sapiens
gtggctagcgagcgagggctctgtgcgtctgcgtagttcgctcacctccctttctaactccgctgccgccatggctcctgtgaaaaagcttgtggtgaaggggggcaaaaaaaagaagcaagttctgaagttcactcttgattgcacccaccctgtagaagatggaatcatggatgctgccaattttgagcagtttttgcaagaaaggatcaaagtgaacggaaaagctgggaaccttggtggaggggtggtgaccatcgaaaggagcaagagcaagatcaccgtgacatccgaggtgcctttctccaaaaggtatttgaaatatctcaccaaaaaatatttgaagaagaataatctacgtgactggttgcgcgtagttgctaacagcaaagagagttacgaattacgttacttccagattaaccaggacgaagaagaggaggaagacgaggattaaatttcatttatctggaaaattttgtatgagttcttgaataaaacttgggaaccaaaaaaaaaaaaaaagaaaaaaaaaaattgggggcattttatatttgcgggggggggaaaaaagggggtatgggaagtgggcagtgggctcattagggggttcccgtggaccccaagttttttgggtccaagggggggagacttggcggggctcccaataaaaggggagggcggaattaaattgggaaaaggccgggtaaccttgatatgtttggaaaaagggagacgaagaacagcgcagacagcaccgcgccacaggaaacgcggacataacccaggtaccacagaacagagaggggcctcgaaagccaccataacacaggagcacaaaagaacaacattcgagagcataaacaacatggacgatacattaaatcgaaaaacagacgtacaccgaaaggaacgatatagtaagaagcgaccagagacaagcaagccagactaggagcagaagaaaggaagcaggcagctgaacgaacagacgaccaaacgagagctacggagagcaatcaacgcgagaggcgcttcgcacaagcaaaggaggacaa

SEQ ID NO: 422449 - DNA, 819 bp, Homo sapiens
gtggctagcgagcgagggctctgtgcgtctgcgtagttcgctcacctccctttctaactccgctgccgccatggctcctgtgaaaaagcttgtggtgaaggggggcaaaaaaaagaagcaagttctgaagttcactcttgattgcacccaccctgtagaagatggaatcatggatgctgccaattttgagcagtttttgcaagaaaggatcaaagtgaacggaaaagctgggaaccttggtggaggggtggtgaccatcgaaaggagcaagagcaagatcaccgtgacatccgaggtgcctttctccaaaaggtatttgaaatatctcaccaaaaaatatttgaagaagaataatctacgtgactggttgcgcgtagttgctaacagcaaagagagttacgaattacgttacttccagattaaccaggacgaagaagaggaggaagacgaggattaaatttcatttatctggaaaattttgtatgagttcttgaataaaacttgggaaccaaaaatttgtaacttgacttctttttttttctgcttaaaaatttcaattctcgtggtaataccagagtagaaggagagggtgactttaccgaactgacagccattggggaggcagatgcgggtgtggaggtgtgggctgaaggtagtgactgtttgattttaaaaagtgtgactgtcagttgtatctgttgcttttctcaatgattcagggatacaaatgggcttctctcattcattaaaagaaaacgcgacatctttctaagattctctgtgggaaaatgactgtcaataaaatgcgggtttctgggc

SEQ ID NO: 422450 - DNA, 1002 bp, Homo sapiens
gtggctagcgagcgagggctctgtgcgtctgcgtagttcgctcacctccctttctaactccgctgccgccatggctcctgtgaaaaagcttgtggtgaaggggggcaaaaaaaagaagcaagttctgaagttcactcttgattgcacccaccctgtagaagatggaatcatggatgctgccaattttgagcagtttttgcaagaaaggatcaaagtgaacggaaaagctgggaaccttggtggaggggtggtgaccatcgaaaggagcaagagcaagatcaccgtgacatccgaggtgcctttctccaaaaggtatttgaaatatctcaccaaaaaatatttgaagaagaataatctacgtgactggttgcgcgtagttgctaacagcaaagagagttacgaattacgttacttccagattaaccaggacgaagaagaggaggaagacgaggattaaatttcatttatctggaaaattttgtatgagttcttgaataaaacttgggaaccaaaatggtggtttatccttgtatctctgcagtgtggattgaacagaaaattggaaatcatagtcaaagggcttcccttggttcgccactcatttatttgtaacttgacttctttttttttctgcttaaaaatttcaattctcgtggtaataccagagtagaaggagagggtgactttaccgaactgacagccattggggaggcagatgcgggtgtggaggtgtgggctgaaggtagtgactgtttgattttaaaaagtgtgactgtcagttgtatctgttgcttttctcaatgattcagggatacaaatgggcttctctcattcattaaaagaaaacgcgacatctttctaagattctctgtgggaaaatgactgtcaataaaatgcgggtttctgggcaaaaaaaaaatggctcttggctacggggactttgggcctcccttaggagggaataagacttctcatactctctcttggccttgtcggaaacgg

SEQ ID NO: 422451 - DNA, 1969 bp, Homo sapiens
gtggctagcgagcgagggctctgtgcgtctgcgtagttcgctcacctccctttctaactccgctgccgccatggctcctgtgaaaaagcttgtggtgaaggggggcaaaaaaaagaagcaagttctgaagttcactcttgattgcacccaccctgtagaagatggaatcatggatgctgccaattttgagcagtttttgcaagaaaggatcaaagtgaacggaaaagctgggaaccttggtggaggggtggtgaccatcgaaaggagcaagagcaagatcaccgtgacatccgaggtgcctttctccaaaaggtatttgaaatatctcaccaaaaaatatttgaagaagaataatctacgtgactggttgcgcgtagttgctaacagcaaagagagttacgaattacgttacttccagattaaccaggacgaagaagaggaggaagacgaggattaaatttcatttatctggaaaattttgtatgagttcttgaataaaacttgggaaccaaaatggtggtttatccttgtatctctgcagtgtggattgaacagaaaattggaaatcatagtcaaagggcttcccttggttcgccactcatttatttgtaacttgacttctttttttttctgcttaaaaatttcaattctcgtggtaataccagagtagaaggagagggtgactttaccgaactgacagccattggggaggcagatgcgggtgtggaggtgtgggctgaaggtagtgactgtttgattttaaaaagtgtgactgtcagttgtatctgttgcttttctcaatgattcagggatacaaatgggcttctctcattcattaaaagaaaacgcgacatctttctaagattctcagtgttgctgccataaaggggtttggggaatcgattgtaaaagtcccaggttctaaattaactaaatgtgtacagaaatgaacgtgtaagtaatgtttctacaggtctttgcaacaaactgtcactttcgtctccagcagagggagctgtaggaatagtgcttccagatgtggtctcccgtgtggggcccagcaatgggggcccctgatgccaagagctctggaggttcttgaaagaggggacacgaaggaggagtgactgggaagcctcccatgccaaggaggtgggaggtgccctggaaatagctgcctcatgccacttaggccatgactggatttaatgtcagtggtgtgccacagtgcagaggctagacaactgaaaggggctaccaaggctgggaaaaaaatgcaattgttgctgtgagtgactttgaaagactctggtgccttgtggtgcccttctgaaattcaaacagtaatgcaaaagtgtctgcattagaatttacggtgtctaaaattcatgtttttaaaagagcttgcctacagatggtttccacacttgaaattgtgccctgcgagttgcatagctggaagttcaatgctcagtcctaccttggctcccattaaacatttggtgctctgtggattgagttgaacgtgttgaggctttgcaatttcacttgtgttaaaggctctggcatttttccatttctatgcaaatttctttgaagcagaattgcttgcatatttcttctctgccgtcacagaaagcagagtttctttcaaacttcactgaggcatcagttgctctttggcaatgtcccttaaccatgattattaactaagtttgtggcttgagtttacaaattctacttgttgcattgatgttcccatgtagtaagtcatttttagtttggttgtgaaaaaaccctgggctgaagttggcatttcagttaaaagaaaaaaagaaactagtcccagatttgaaaacttgtaataaaattgaaactcactggttttctatgtctttttgaactcttgtaatcgagttttgatcatattttctattaaagtggctaacacctggctactcttactgta

SEQ ID NO: 422452 - DNA, 2190 bp, Homo sapiens
gtggctagcgagcgagggctctgtgcgtctgcgtagttcgctcacctccctttctaactccgctgccgccatggctcctgtgaaaaagcttgtggtgaaggggggcaaaaaaaagaagcaagttctgaagttcactcttgattgcacccaccctgtagaagatggaatcatggatgctgccaattttgagcagtttttgcaagaaaggatcaaagtgaacggaaaagctgggaaccttggtggaggggtggtgaccatcgaaaggagcaagagcaagatcaccgtgacatccgaggtgcctttctccaaaaggtatttgaaatatctcaccaaaaaatatttgaagaagaataatctacgtgactggttgcgcgtagttgctaacagcaaagagagttacgaattacgttacttccagattaaccaggacgaagaagaggaggaagacgaggattaaatttcatttatctggaaaattttgtatgagttcttgaataaaacttgggaaccaaaatggtggtttatccttgtatctctgcagtgtggattgaacagaaaattggaaatcatagtcaaagggcttcccttggttcgccactcatttatttgtaacttgacttctttttttttctgcttaaaaatttcaattctcgtggtaataccagagtagaaggagagggtgactttaccgaactgacagccattggggaggcagatgcgggtgtggaggtgtgggctgaaggtagtgactgtttgattttaaaaagtgtgactgtcagttgtatctgttgcttttctcaatgattcagggatacaaatgggcttctctcattcattaaaagaaaacgcgacatctttctaagattctctgtgggaaaatgactgtcaataaaatgcgggtttctgggccattcgtcttactttcattttttgattacaaatttctcttgacgcacacaattatgtctgctaatcctcttcttcctagagagagaaactgtgctccttcagtgttgctgccataaaggggtttggggaatcgattgtaaaagtcccaggttctaaattaactaaatgtgtacagaaatgaacgtgtaagtaatgtttctacaggtctttgcaacaaactgtcactttcgtctccagcagagggagctgtaggaatagtgcttccagatgtggtctcccgtgtggggcccagcaatgggggcccctgatgccaagagctctggaggttcttgaaagaggggacacgaaggaggagtgactgggaagcctcccatgccaaggaggtgggaggtgccctggaaatagctgcctcatgccacttaggccatgactggatttaatgtcagtggtgtgccacagtgcagaggctagacaactgaaaggggctaccaaggctgggaaaaaaatgcaattgttgctgtgagtgactttgaaagactctggtgccttgtggtgcccttctgaaattcaaacagtaatgcaaaagtgtctgcattagaatttacggtgtctaaaattcatgtttttaaaagagcttgcctacagatggtttccacacttgaaattgtgccctgcgagttgcatagctggaagttcaatgctcagtcctaccttggctcccattaaacatttggtgctctgtggattgagttgaacgtgttgaggctttgcaatttcacttgtgttaaaggctctggcatttttccatttctatgcaaatttctttgaagcagaattgcttgcatatttcttctctgccgtcacagaaagcagagtttctttcaaacttcactgaggcatcagttgctctttggcaatgtcccttaaccatgattattaactaagtttgtggcttgagtttacaaattctacttgttgcattgatgttcccatgtagtaagtcatttttagtttggttgtgaaaaaaccctgggctgaagttggcatttcagttaaaagaaaaaaagaaaaaaaaaaaaaaaaaaaaaaaaaaaaaaaaaaaaaaaaaaaaaaaaacaccaaagctcgaattaagaaccaaacaaccagaaagataaaacatgaccctagaaatggaaaattacatggctaacaccttttgccgccgtatgccaattccattgttgtcattgcacactttgcccctgggaccattggcattacccagctttgcctttaggc

SEQ ID NO: 422453 - DNA, 2090 bp, Homo sapiens
gaattctgatgtcgtacctaaggcttgtccatctttgttgttggaggtgccatggctcctgtgaaaaagcttgtggtgaaggggggcaaaaaaaagaagcaagttctgaagttcactcttgattgcacccaccctgtagaagatggaatcatggatgctgccaattttgagcagtttttgcaagaaaggatcaaagtgaacggaaaagctgggaaccttggtggaggggtggtgaccatcgaaaggagcaagagcaagatcaccgtgacatccgaggtgcctttctccaaaaggtatttgaaatatctcaccaaaaaatatttgaagaagaataatctacgtgactggttgcgcgtagttgctaacagcaaagagagttacgaattacgttacttccagattaaccaggacgaagaagaggaggaagacgaggattaaatttcatttatctggaaaattttgtatgagttcttgaataaaacttgggaaccaaaatggtggtttatccttgtatctctgcagtgtggattgaacagaaaattggaaatcatagtcaaagggcttcccttggttcgccactcatttatttgtaacttgacttctttttttttctgcttaaaaatttcaattctcgtggtaataccagagtagaaggagagggtgactttaccgaactgacagccattggggaggcagatgcgggtgtggaggtgtgggctgaaggtagtgactgtttgattttaaaaagtgtgactgtcagttgtatctgttgcttttctcaatgattcagggatacaaatgggcttctctcattcattaaaagaaaacgcgacatctttctaagattctctgtgggaaaatgactgtcaataaaatgcgggtttctgggccattcgtcttactttcattttttgattacaaatttctcttgacgcacacaattatgtctgctaatcctcttcttcctagagagagaaactgtgctccttcagtgttgctgccataaaggggtttggggaatcgattgtaaaagtcccaggttctaaattaactaaatgtgtacagaaatgaacgtgtaagtaatgtttctacaggtctttgcaacaaactgtcactttcgtctccagcagagggagctgtaggaatagtgcttccagatgtggtctcccgtgtggggcccagcaatgggggcccctgatgccaagagctctggaggttcttgaaagaggggacacgaaggaggagtgactgggaagcctcccatgccaaggaggtgggaggtgccctggaaatagctgcctcatgccacttaggccatgactggatttaatgtcagtggtgtgccacagtgcagaggctagacaactgaaaggggctaccaaggctgggaaaaaaatgcaattgttgctgtgagtgactttgaaagactctggtgccttgtggtgcccttctgaaattcaaacagtaatgcaaaagtgtctgcattagaatttacggtgtctaaaattcatgtttttaaaagagcttgcctacagatggtttccacacttgaaattgtgccctgcgagttgcatagctggaagttcaatgctcagtcctaccttggctcccattaaacatttggtgctctgtggattgagttgaacgtgttgaggctttgcaatttcacttgtgttaaaggctctggcatttttccatttctatgcaaatttctttgaagcagaattgcttgcatatttcttctctgccgtcacagaaagcagagtttctttcaaacttcactgaggcatcagttgctctttggcaatgtcccttaaccatgattattaactaagtttgtggcttgagtttacaaattctacttgttgcattgatgttcccatgtagtaagtcatttttagtttggttgtgaaaaaaccctgggctgaagttggcatttcagttaaaagaaaaaaagaaactagtcccagatttgaaaacttgtaataaaattgaaactcactggttttctatgtctttttgaactcttgtaatcgagttttgatcatattttctattaaagtggctaacacctggctactcttactgta

SEQ ID NO: 422454 - DNA, 733 bp, Homo sapiens
gtggctagcgagcgagggctctgtgcgtctgcgtagttcgctcacctccctttctaactccgctgccgccatggctcctgtgaaaaagcttgtggtgaaggggggcaaaaaaaagaagcaagttctgaagttcactcttgattgcacccaccctgtagaagatggaatcatggatgctgccaattttgagcagtttttgcaagaaaggatcaaagtgaacggaaaagctgggaaccttggtggaggggtggtgaccatcgaaaggagcaagagcaagatcaccgtgacatccgaggtgcctttctccaaaaggtatttgaaatatctcaccaaaaaatatttgaagaagaataatctacgtgactggttgcgcgtagttgctaacagcaaagagagttacgaattacgttacttccagattaaccaggacgaagaagaggaggaagacgaggattaaatttcatttatctggaaaattttgtatgagttcttgaataaaacttgggaaccaaaaggttatgcttgccggccgaatttgggcttacttggccaattcgccctaaagggaggcgtttaaaataaatgggcgcggttttacaaagtggggatggggaaaaccttggggttcccaaattaaagggtttggagaataccccctttccaggtggggtaaaaaagggccgacccgacgcccttccaacaatgggcaccctaatggaatggtttgcgtttt

SEQ ID NO: 422455 - DNA, 956 bp, Homo sapiens
gtggctagcgagcgagggctctgtgcgtctgcgtagttcgctcacctccctttctaactccgctgccgccatggctcctgtgaaaaagcttgtggtgaaggggggcaaaaaaaagaagcaagttctgaagttcactcttgattgcacccaccctgtagaagatggaatcatggatgctgccaattttgagcagtttttgcaagaaaggatcaaagtgaacggaaaagctgggaaccttggtggaggggtggtgaccatcgaaaggagcaagagcaagatcaccgtgacatccgaggtgcctttctccaaaaggtatttgaaatatctcaccaaaaaatatttgaagaagaataatctacgtgactggttgcgcgtagttgctaacagcaaagagagttacgaattacgttacttccagattaaccaggacgaagaagaggaggaagacgaggattaaatttcatttatctggaaaattttgtatgagttcttgaataaaacttgggaaccaaaaaaaaaaaaaaaaaaaaacaaaaaaaaaaaaaaaaaaaaaaaaaaaaaaaaaaaaaaaaaaaaaaaaaaacaaaaaaaaaacaaaaaaaaaaaaaaaaaaaaaaaaaaaaaagggggggggggggggaaaatatctggggggagggcgaagatataaatgagtgaggacgagagtgttttaattggagagaagggggcacaaaagatggggggtaattaaaaaacagcagagggggggggggtggttaataaaccagagcaggtggaaggaaacagtagtgtggtggtagttttgtagagaagcgaccccacttggtgtgggggaggagaagtggggagcacacacactgagagagagttgctgggaggagaaaaaaaaagggtggtaggtggtaaccaacacgtgtcttttcgggagaagagtggtagagggatgtaaaaat

SEQ ID NO: 422456 - DNA, 909 bp, Homo sapiens
gtggctagcgagcgagggctctgtgcgtctgcgtagttcgctcacctccctttctaactccgctgccgccatggctcctgtgaaaaagcttgtggtgaaggggggcaaaaaaaagaagcaagttctgaagttcactcttgattgcacccaccctgtagaagatggaatcatggatgctgccaattttgagcagtttttgcaagaaaggatcaaagtgaacggaaaagctgggaaccttggtggaggggtggtgaccatcgaaaggagcaagagcaagatcaccgtgacatccgaggtgcctttctccaaaaggtatttgaaatatctcaccaaaaaatatttgaagaagaataatctacgtgactggttgcgcgtagttgctaacagcaaagagagttacgaattacgttacttccagattaaccaggacgaagaagaggaggaagacgaggattaaatttcatttatctggaaaattttgtatgagttcttgaataaaacttgggaaccaaaatggtggtttatccttgtatctctgcagtgtggattgaacagaaaattggaaatcatagtcaaagggcttcccttggttcgccactcatttatttgtaacttgacttctttttttttctgcttaaaaatttcaattctcgtggtaataccagagtagaaggagagggtgactttaccgaactgacagccattggggaggcagatgcgggtgtggaggtgtgggctgaaggtagtgactgtttgattttaaaaagtgtgactgtcagttgtatctgttgcttttctcaatgattcagggatacaaatgggcttctctcattcattaaaagaaaacgcgacatctttctaagattctctgtgggaaaatgactgtcaataaaatgcgggtttctgggc

SEQ ID NO: 422457 - DNA, 967 bp, Homo sapiens
gagccggggtgaatctggaggggccgggccgagcccgggggcgctttcgcacgcgaagcaaccgctagagcaggacctggtctcccaagagcgggactacttgttgatatttgaggagggaagtgtcttacctgagagcctggctggagaagactgaggtccaaggcttgaagcctaagtgattgccccaggactgtggatgatggctgcagacatcccgagagtgaccactccgctgagctccttggtccaggtgcctcaagaggaagatagacaggaggaggaggtcaccaccatgatcctggaggatgactcctgggtgcaagaagctgtgctgcaggaggatggccctgagtctgagccctttccccagagtgctggcaagggcggcccccaggaggaggtgaccaggggaccacagggtgcactcggccgcctccgagagctctgccggcgctggctgagaccagaggtacacaccaaggagcagatgttaaccatgctgccaaaggaaattcaggcttggctgcaagagcatcggcctgaaagcagtgaggaggcagcggccctggtggaagacttgacccagacccttcaggacagtgctgtagctgtctttgcttcccttccggtggaggtgaccagtttgtaatgaacttctggatctccagtcagatactatggaggagagagtgatggagggctgaggagaggcctcaggttgttatttggttggggaggcacagagcagaggttcaggtctcagcaggtgtcagaggtgattacagcccttcccatccaccttgcagcaggggctttgtgcctttcatctttaactgggcacctgagatgggaaccaatggggaccatcccagacacatgggtttgtctgtccctgacttctgcctctgagattgtctttgttggtctttgtttaataaacgccccgaccttcctcatgattgca

SEQ ID NO: 422458 - DNA, 427 bp, Homo sapiens
ccgcgttagccaggatggtttcgatctcctgtcctcgtgatctgcccgccttggcctcccgaagtgctgggattacaggcgtgagccagcgcacccggccaagaacattatttttaaagaagtgttaactttgaggacatatctgttccctggagatatttgggcttgaatcaggagtttgtcctacaggtgtcgcccttgatctcaggatgctaccagggctttgttctcgggatcctcgcacctggagagtgaagacgggcatgacggcaggtgaaggggtttgctgtgaaggaagaggagataaggcatttccaggaaatgggaaactgcctcctcctacacatggggcctgtgctcagaatgggcttagttcttataggatggatgctcagtattccttaataaagtagagttccattctttt

SEQ ID NO: 422459 - DNA, 739 bp, Homo sapiens
tctgtttggacaagcggtgaaccctcagagactttatcttactcttatcctttaatacagtgaatctatataactatatccagagacagttccctttgttttaaattgttattgggccgggcatggcggctcacacctgtaaacccagcactttaggaggccaaggtgggcagatcatttgaggtcgggagttcgagagcagcctggccaacacagtgaaaccccatctctactaaaaatacaaaaattagctgggcatggtggcgggcacctgtagtcccagatacttgggaggctgaggcaagagaatcacttgaatccgggaggtcgaggttgcagtgagccaagatcgcaccactgcactccagcctgggtgacagagcaagacttggtctcaaaaataaatacataaattgttattaatatatagcagacaagtgtacacaaatgtacagctcattgagtttttacaaactgcacacacttgtgtaaccagcacccagatcaagaaactacttaccagggccaggcgctcctgcctataatcctaactctttgggaggccgaggtgggtggatcacttgaggtcagaagttcaagaccagcctggccaacatggtgaaaccccacctctactaaaaataaaaaaattagccaggtgtggtggcgcctacctgttgtctcagctactcaagaggctgaggcaagacaatcacttgaacccaggaggtggagcttg

SEQ ID NO: 422460 - DNA, 285 bp, Homo sapiens
tcctcccgcctcagcctcacaactagctgggactacaggcacataccaccatgcctggctaatttttgtatttttagtagagactgggtttcaccatgttgcctaggctggggtttaagttaaatttttttaaaaactaaagtgactggcactaagtgaacttgagattatcctcagcttcaagttcctaagataagggctttcttaagctttcagatacatgtatcctctagatgtagacaataatgtcccatttctaagtcttttcctttgcttctccttaag

SEQ ID NO: 422461 - DNA, 3640 bp, Homo sapiens
gattggcttcgagggccagaatcggcaaagggccgaatagccgtgtttgggacctgggctcgggcttcttgcgtccccgctaagaacatgtcacggggccgaatcgtccgtattctctcagcttcaagctcctctacttttcaaccaggtcactagcccttgactcctcttatcaaacttccggaactgccaccccaccagtgactccacaggcaccagggcatgcaacagggctgggacaggaaggctctcttcttcacctcaagcctgctgggctaacacttgcgatttttactagagttaactttgtaatgtatgtctctgactctagaatttcaagagaagttccacttagtgactcctaagtggaagttctaagatggcttcccagtgaggtgatgaagaggtttgagctttagagtgcagttgcaaagctcttctctgacctgaacaatggctgtagctgtggaccaacaaatccagactccttcagtacaagatctccaaatagttaaactggaagaagattcccactgggagcaggaaatttcccttcaagggaattaccctggaccagagacatcctgccagagcttttggcatttccgttaccaagaagcatcacgaccccgagaggccctcctccagctccagaagctctgttgtcagtggctaaggccagagaagtgtacaaaagagcagatcctggagttgctggtcctagaacagttcccgactgtccttctccaggagatccagatctgggtcagacagcagcatccggagagtggagaggaggcagtggccctggtggaagacttgcagaaagaacctggaagacagaggctggagcctcgggcgaggccgtccggccgcacccctcctgctcagctgcggtcgccatggccaatgacagctgcgggcccggcgagccgagctcgagcgagcgagaccggcagtactgcgagctgtgcgggaagatggagaacctgctgcgctgcagccgcagctccttctgctgcaaggagcgccagcgccaggactggaagaagcacaagctcgtgtgccagggcagcgagggcgccctcggccacggagggggccctcaccaggactccggccccgcgccgcccgctgcagcgccgccgtccagggaccgggccctggaggccaggaaggcagcgaggcgccgggacagcgcctccggggacgcagccaaggcaaaggccaagtccgcggccgaccccgcggcggccgcgtccccgcctcgcgcgtccccgggccggacaaaagccatggctgcttgttatccggtcaatggaacgggttatgtacgtcatgttgataatccaaatggagacggaagacgtgtgaaatgtattacattacgttaaagaacgggatgccaaggtaagtggaggtatacttcgaatttttctagaaggtaaagcctagtttgctgacattgaacccaaatttgatagactgctgtttttctggtctgaccatcgcaaccctcatgaagtacaaccagcatatgctacaaagtacgcaataactgtttggtatttgatgcagatgagagagcacgagctaaagtaaaatatctaacaggtgaaaaaggtgtgaggattgaactcaataaaccttcagattcagtcagtaaagacgtcttatagagcctttgatccagcaataccccacttcacctacaataattgttgacgctatttgttaatttgtgaatacgaataaatgggataaagaaaaatagacaaccagttcgcattttagtaaggaaacaaacaactttgtgtgttgcatcaaacagaagattctgactgctgtgactttgtaccgcatgatcaacttagaatctgtgattgcttacaggaagaagataagctactaatagaaaatgtttttacctctggatatgaaataagtgccctgtgtagaatttttttcattcttatattttgccagatctgttacgtagctgagttaatttcatctctacttttttaatatatgtcaagtttgaattggaataatttttctatgattaggtacaatttatcaaaactgaattgagaaaaaattacagtatttctcaaaataacgtcaatctatttttgtaaacctcttcatactattaaattttgccctaaaagacctcttaataatgattgttgccagtgactgattaattttattttacttaaaataagaaaaggagcactttaattacaactgaaaaatcagattgttttgcagtccttcctatcttacactaatttgaactcttaaagattgctgcttttttttgatattgtcaataatgaaacccaattgtaaaacagtcaccatttactaccagtaacttttagttaatgtcttacaaggaaaaagacacaataagaagagtttaattttttttttttttttgagcctgggcgacagagtgagactccgtctcaaaaaaaaaaaaaaaaagaaatgtttcattttggtttttcaccaaccttcctttgataggacaaagcagatactaagagggggaggaaaggctgttctgtgtctgaacccagttgggctagtccccaagaggagctgagagccatgtactctaatgcctcccttttcttcccccagccctgcctgatgtggctctgggaattcctgcagagaagagcaggggtggccaggagatagtgagcagctcccaggaggcatggagggatccagaacctggactgaagaaccacctagaaataactcagcagaattctgaaaatgaggtcacgctgggtaagaatgcctttttttttttttcatagtcaaagttagctatggagtttctgtagtattcactactccagacctttttcaagttgaattttttttctttttccctatgtctgttcttacgtattttttttaaacttttatttcagtagtgtttggggaacaagtagtgtttggttgcatggaaaagttcttcagtggtgatttctgagattttggtgcacccatcacccaagggtagtcttttttatccatcaagtctgtacccaatgtgtagtctttgtttttttctttttttttttttttgagactgagtctcattctatcacccaggctggagtggagtggtatgatcttgactcactgcaacatctgcctcccgggttcaagtgattctcctgcctcagcctcctgagtcgctgggattactgagattgtgccactgcattccagcctgggcgacagagtgagacccagactcagctgaaaaataataatattattaaaagaatttaaaataaagtgttccatagatgtgaaccctgcgtagattatacacaccagtctgccatttaaaaggtttgttgttcttgggcaacctctttaaatacccttagcctccattttctcatctggacagtggacattgtgatggtttctacctccctgggctgttatgaggatcctgacacagtattagcacttggcaaacgttagttttcattatcatcatcattataattattatgaaaatagataagggcattatcctgtaccctcaaaggagtaaaagggggaaaatgagtcattaaactttctcttctgggaacta

SEQ ID NO: 422462 - DNA, 2253 bp, Homo sapiens
gattggcttcgagggccagaatcggcaaagggccgaatagccgtgtttgggacctgggctcgggcttcttgcgtccccgctaagaacatgtcacggggccgaatcgtccgtattctctcagcttcaagctcctctacttttcaaccaggtcactagcccttgactcctcttatcaaacttccggaactgccaccccaccagtgactccacaggcaccagggcatgcaacagggctgggacaggaaggctctcttcttcacctcaagcctgctgggctaacacttgcgatttttactagagttaactttgtaatgtatgtctctgactctagaatttcaagagaagttccacttagtgactcctaagtggaagttctaagatggcttcccagtgaggtgatgaagaggtttgagctttagagtgcagttgcaaagctcttctctgacctgaacaatggctgtagctgtggaccaacaaatccagactccttcagtacaagatctccaaatagttaaactggaagaagattcccactgggagcaggaaatttcccttcaagggaattaccctggaccagagacatcctgccagagcttttggcatttccgttaccaagaagcatcacgaccccgagaggccctcctccagctccagaagctctgttgtcagtggctaaggccagagaagtgtacaaaagagcagatcctggagttgctggtcctagaacagttcccgactgtccttctccaggagatccagatctgggtcagacagcagcatccggagagtggagaggaggcagtggccctggtggaagacttgcagaaagaacctggaagacagaggctggagccctgcctgatgtggctctgggaattcctgcagagaagagcaggggtggccaggagatagtgagcagctcccaggaggcatggagggatccagaacctggactgaagaaccacctagaaataactcagcagaattctgaaaatgaggtcacgctggattttccaatccataggcccaaagtgaactcccacgtggagtaggatgaaaacccacagcatctagatcttcaaattctggagaaaaagagagtgtgaaagactgctcagtggctggggtgagagtcaagtctggccaggtgctaatctggagaaaagccaagacctggagcgagctggagtggcaggccctggaggatgagaaggtggcaggagtgcactggggatacaaagaaaccaagatttttctgggaattctcagaggcctggatccacgaaaaactccgcacctgccatcgaaaccaccaggtgtaccggattatggctgagcagctgtgagaacatggcttcctgtggaccctggagcaatgttgctatcggttcaaaaacctcctgaccgactactgcaaagccaggagcacctacacaccaggcaccagtgtcttctatgatgagatggatgccctgttgagtcttggggcactttctaacacctttgatgccttagaggtggtaggaggccttctttgggattgagaggattccaaagggaaccagggcatagcactagaagatgtggcgggatggtaatgaaatagtggaggagtctcaagaggaatcctggaggcttggtccccaggccttgaggtggaatcccagtggcaactctcccccacaatggacctcagagcagtgggagcgacgcagtcctgtgggaagcattcaggctcagaatcaggagatgtgattattgtcctggctctgttatgactaatttgggtctggaatggcctcatcgggggaaaaattggtgacaactttaagaaatactgtttatatcccgtcctcaaatattgcttgactcaaccctctactgaaccagtagtccagggtggctcacaaagaccactttgaggctcttgctctgctctttagccaaggagtctcccttcctgccttcagtaacaacattacaggaagagaggagagaaaggtaggagttaaagatccagtcatttgtttccatctaaagtgccctataagccgggcatggtggcgcaagcctgtagtcccagctactcgggaggctggggcaggagaatcacttgagcccaggagttggaggccgcagtgagctgtgatcatgccactgcattccagcctgggcgacagagtgagacccagactcagctgaaaaataataatattattaaaagaatttaaaataaagtgttccatagatgtg

SEQ ID NO: 422463 - DNA, 3199 bp, Homo sapiens
  misc_feature (3199)..(3199): n is a, c, g, or t
gattggcttcgagggccagaatcggcaaagggccgaatagccgtgtttgggacctgggctcgggcttcttgcgtccccgctaagaacatgtcacggggccgaatcgtccgtattctctcagcttcaagctcctctacttttcaaccaggtcactagcccttgactcctcttatcaaacttccggaactgccaccccaccagtgactccacaggcaccagggcatgcaacagggctgggacaggaaggctctcttcttcacctcaagcctgctgggctaacacttgcgatttttactagagttaactttgtaatgtatgtctctgactctagaatttcaagagaagttccacttagtgactcctaagtggaagttctaagatggcttcccagtgaggtgatgaagaggtttgagctttagagtgcagttgcaaagctcttctctgacctgaacaatggctgtagctgtggaccaacaaatccagactccttcagtacaagatctccaaatagttaaactggaagaagattcccactgggagcaggaaatttcccttcaagggaattaccctggaccagagacatcctgccagagcttttggcatttccgttaccaagaagcatcacgaccccgagaggccctcctccagctccagaagctctgttgtcagtggctaaggccagagaagtgtacaaaagagcagatcctggagttgctggtcctagaacagttcccgactgtccttctccaggagatccagatctgggtcagacagcagcatccggagagtggagaggaggcagtggccctggtggaagacttgcagaaagaacctggaagacagaggctggagcctcgggcgaggccgtccggccgcacccctcctgctcagctgcggtcgccatggccaatgacagctgcgggcccggcgagccgagctcgagcgagcgagaccggcagtactgcgagctgtgcgggaagatggagaacctgctgcgctgcagccgcagctccttctgctgcaaggagcgccagcgccaggactggaagaagcacaagctcgtgtgccagggcagcgagggcgccctcggccacggagggggccctcaccaggactccggccccgcgccgcccgctgcagcgccgccgtccagggaccgggccctggaggccaggaaggcagcgaggcgccgggacagcgcctccggggacgcagccaaggcaaaggccaagtccgcggccgaccccgcggcggccgcgtccccgcctcgcgcgtccccgggccggacaaaagccatggctgcttgttatccggtcaatggaacgggttatgtacgtcatgttgataatccaaatggagacggaagacgtgtgaaatgtattacattacgttaaagaacgggatgccaagccctgcctgatgtggctctgggaattcctgcagagaagagcaggggtggccaggagatagtgagcagctcccaggaggcatggagggatccagaacctggactgaagaaccacctagaaataactcagcagaattctgaaaatgaggtcacgctggattttccaatccataggcccaaagtgaactcccacgtggagtaggatgaaaacccacagcatctagatcttcaaattctggagaaaaagagagtgtgaaagactgctcagtggctggggtgagagtcaagtctggccaggtgctaatctggagaaaagccaagacctggagcgagctggagtggcaggccctggaggatgagaaggtggcaggagtgcactggggatacaaagaaaccaagatttttctgggaattctcagaggcctggatccacgaaaaactccgcacctgccatcgaaaccaccaggtgtaccggattatggctgagcagctgtgagaacatggcttcctgtggaccctggagcaatgttgctatcggttcaaaaacctcctgaccgactactgcaaagccaggagcacctacacaccaggcaccagtgtcttctatgatgagatggatgccctgttgagtcttggggcactttctaacacctttgatgccttagaggtggtaggaggccttctttgggattgagaggattccaaagggaaccagggcatagcactagaagatgtggcgggatggtaatgaaatagtggaggagtctcaagaggaatcctggaggcttggtccccaggccttgaggtggaatcccagtggcaactctcccccacaatggacctcagagcagtgggagcgacgcagtcctgtgggaagcattcaggctcagaatcaggagatgtgattattgtcctggctctgttatgactaatttgggtctggaatggcctcatcgggggaaaaattggtgacaactttaagaaatactgtttatatcccgtcctcaaatattgcttgactcaaccctctactgaaccagtagtccagggtggctcacaaagaccactttgaggctcttgctctgctctttagccaaggagtctcccttcctgccttcagtaacaacattacaggaagagaggagagaaaggtaggagttaaagatccagtcatttgtttccatctaaagtgccctataagccggactacaggcgcctgccaccatgcctggctaattttttgtatttttagtagggacggggtttcaccgtgttagccactgtccccttttctttctgacccagcccgatgtctgtcccagtgtcttactgtctgcaggcccctccaccaacctgagacctgaattcctgctaggctaggaaaggcctgctgccaatgtgtggaagtttagtagccagggtaggaaaaggcctgccactgaagaacctggagagttcgaatttctctgtgagcaactttaactcctggagccaggtttatcatggtgctggaggctccttcctgagcacccaacagtctcctggaagaaagagatcagataacaagacgaaatcctgctcggcagtacctgagatggccaagcaattcttcaggcctggggcccaagtcactcgcagcagctctgggtcagggctaggtacggatactgggcactggactgagctcacaggatggcagagatcccgggggtcaagaagacaaagacgcccatctgagccaaggctggcaatgctgggcccagggccctggccccagctcccacttcagan

SEQ ID NO: 422464 - DNA, 2547 bp, Homo sapiens
gattggcttcgagggccagaatcggcaaagggccgaatagccgtgtttgggacctgggctcgggcttcttgcgtccccgctaagaacatgtcacggggccgaatcgtccgtattctctcagcttcaagctcctctacttttcaaccaggtcactagcccttgactcctcttatcaaacttccggaactgccaccccaccagtgactccacaggcaccagggcatgcaacagggctgggacaggaaggctctcttcttcacctcaagcctgctgggctaacacttgcgatttttactagagttaactttgtaatgtatgtctctgactctagaatttcaagagaagttccacttagtgactcctaagtggaagttctaagatggcttcccagtgaggtgatgaagaggtttgagctttagagtgcagttgcaaagctcttctctgacctgaacaatggctgtagctgtggaccaacaaatccagactccttcagtacaagatctccaaatagttaaactggaagaagattcccactgggagcaggaaatttcccttcaagggaattaccctggaccagagacatcctgccagagcttttggcatttccgttaccaagaagcatcacgaccccgagaggccctcctccagctccagaagctctgttgtcagtggctaaggccagagaagtgtacaaaagagcagatcctggagttgctggtcctagaacagttcccgactgtccttctccaggagatccagatctgggtcagacagcagcatccggagagtggagaggaggcagtggccctggtggaagacttgcagaaagaacctggaagacagaggctggagccctgcctgatgtggctctgggaattcctgcagagaagagcaggggtggccaggagatagtgagcagctcccaggaggcatggagggatccagaacctggactgaagaaccacctagaaataactcagcagaattctgaaaatgaggtcacgctggattttccaatccataggcccaaagtgaactcccacgtggagtaggatgaaaacccacagcatctagatcttcaaattctggagaaaaagagagtgtgaaagactgctcagtggctggggtgagagtcaagtctggccaggtgctaatctggagaaaagccaagacctggagcgagctggagtggcaggccctggaggatgagaaggtggcaggagtgcactggggatacaaagaaaccaagatttttctgggaattctcagaggcctggatccacgaaaaactccgcacctgccatcgaaaccaccaggtgtaccggattatggctgagcagctgtgagaacatggcttcctgtggaccctggagcaatgttgctatcggttcaaaaacctcctgaccgactactgcaaagccaggagcacctacacaccaggcaccagtgtcttctatgatgagatggatgccctgttgagtcttggggcactttctaacacctttgatgccttagaggtggtaggaggccttctttgggattgagaggattccaaagggaaccagggcatagcactagaagatgtggcgggatggtaatgaaatagtggaggagtctcaagaggaatcctggaggcttggtccccaggccttgaggtggaatcccagtggcaactctcccccacaatggacctcagagcagtgggagcgacgcagtcctgtgggaagcattcaggctcagaatcaggagatgtgattattgtcctggctctgttatgactaatttgggtctggaatggcctcatcgggggaaaaattggtgacaactttaagaaatactgtttatatcccgtcctcaaatattgcttgactcaaccctctactgaaccagtagtccagggtggctcacaaagaccactttgaggctcttgctctgctctttagccaaggagtctcccttcctgccttcagtaacaacattacaggaagagaggagagaaaggtaggagttaaagatccagtcatttgtttccatctaaagtgccctataagccgggcatggtggcgcaagcctgtagtcccagctactcgggaggctggggcaggagaatcacttgagcccaggagttggaggccgcagtgagctgtgatcatgccactgcattccagcctgggcgacagagtgagacccagactcagctgaaaaataataatattattaaaagaatttaaaataaagtgttccatagatgtgaaccctgcgtagattatacacaccagtctgccatttaaaaggtttgttgttcttgggcaacctctttaaatacccttagcctccattttctcatctggacagtggacattgtgatggtttctacctccctgggctgttatgaggatcctgacacagtattagcacttggcaaacgttagttttcattatcatcatcattataattattatgaaaatagataagggcattatcctgtaccctcaaaggagtaaaagggggaaaatgagtcattaaactttctcttctgggaacta

SEQ ID NO: 422465 - DNA, 3217 bp, Homo sapiens
  misc_feature (3217)..(3217): n is a, c, g, or t
tctgtttggacaagcggtgaaccctcagagactttatcttactcttatcctttaatacagtgaatctatataactatatccagagacagttccctttgttttaaattgttattgggccgaatcgtccgtattctctcagcttcaagctcctctacttttcaaccaggtcactagcccttgactcctcttatcaaacttccggaactgccaccccaccagtgactccacaggcaccagggcatgcaacagggctgggacaggaaggctctcttcttcacctcaagcctgctgggctaacacttgcgatttttactagagttaactttgtaatgtatgtctctgactctagaatttcaagagaagttccacttagtgactcctaagtggaagttctaagatggcttcccagtgaggtgatgaagaggtttgagctttagagtgcagttgcaaagctcttctctgacctgaacaatggctgtagctgtggaccaacaaatccagactccttcagtacaagatctccaaatagttaaactggaagaagattcccactgggagcaggaaatttcccttcaagggaattaccctggaccagagacatcctgccagagcttttggcatttccgttaccaagaagcatcacgaccccgagaggccctcctccagctccagaagctctgttgtcagtggctaaggccagagaagtgtacaaaagagcagatcctggagttgctggtcctagaacagttcccgactgtccttctccaggagatccagatctgggtcagacagcagcatccggagagtggagaggaggcagtggccctggtggaagacttgcagaaagaacctggaagacagaggctggagcctcgggcgaggccgtccggccgcacccctcctgctcagctgcggtcgccatggccaatgacagctgcgggcccggcgagccgagctcgagcgagcgagaccggcagtactgcgagctgtgcgggaagatggagaacctgctgcgctgcagccgcagctccttctgctgcaaggagcgccagcgccaggactggaagaagcacaagctcgtgtgccagggcagcgagggcgccctcggccacggagggggccctcaccaggactccggccccgcgccgcccgctgcagcgccgccgtccagggaccgggccctggaggccaggaaggcagcgaggcgccgggacagcgcctccggggacgcagccaaggcaaaggccaagtccgcggccgaccccgcggcggccgcgtccccgcctcgcgcgtccccgggccggacaaaagccatggctgcttgttatccggtcaatggaacgggttatgtacgtcatgttgataatccaaatggagacggaagacgtgtgaaatgtattacattacgttaaagaacgggatgccaagccctgcctgatgtggctctgggaattcctgcagagaagagcaggggtggccaggagatagtgagcagctcccaggaggcatggagggatccagaacctggactgaagaaccacctagaaataactcagcagaattctgaaaatgaggtcacgctggattttccaatccataggcccaaagtgaactcccacgtggagtaggatgaaaacccacagcatctagatcttcaaattctggagaaaaagagagtgtgaaagactgctcagtggctggggtgagagtcaagtctggccaggtgctaatctggagaaaagccaagacctggagcgagctggagtggcaggccctggaggatgagaaggtggcaggagtgcactggggatacaaagaaaccaagatttttctgggaattctcagaggcctggatccacgaaaaactccgcacctgccatcgaaaccaccaggtgtaccggattatggctgagcagctgtgagaacatggcttcctgtggaccctggagcaatgttgctatcggttcaaaaacctcctgaccgactactgcaaagccaggagcacctacacaccaggcaccagtgtcttctatgatgagatggatgccctgttgagtcttggggcactttctaacacctttgatgccttagaggtggtaggaggccttctttgggattgagaggattccaaagggaaccagggcatagcactagaagatgtggcgggatggtaatgaaatagtggaggagtctcaagaggaatcctggaggcttggtccccaggccttgaggtggaatcccagtggcaactctcccccacaatggacctcagagcagtgggagcgacgcagtcctgtgggaagcattcaggctcagaatcaggagatgtgattattgtcctggctctgttatgactaatttgggtctggaatggcctcatcgggggaaaaattggtgacaactttaagaaatactgtttatatcccgtcctcaaatattgcttgactcaaccctctactgaaccagtagtccagggtggctcacaaagaccactttgaggctcttgctctgctctttagccaaggagtctcccttcctgccttcagtaacaacattacaggaagagaggagagaaaggtaggagttaaagatccagtcatttgtttccatctaaagtgccctataagccggactacaggcgcctgccaccatgcctggctaattttttgtatttttagtagggacggggtttcaccgtgttagccactgtccccttttctttctgacccagcccgatgtctgtcccagtgtcttactgtctgcaggcccctccaccaacctgagacctgaattcctgctaggctaggaaaggcctgctgccaatgtgtggaagtttagtagccagggtaggaaaaggcctgccactgaagaacctggagagttcgaatttctctgtgagcaactttaactcctggagccaggtttatcatggtgctggaggctccttcctgagcacccaacagtctcctggaagaaagagatcagataacaagacgaaatcctgctcggcagtacctgagatggccaagcaattcttcaggcctggggcccaagtcactcgcagcagctctgggtcagggctaggtacggatactgggcactggactgagctcacaggatggcagagatcccgggggtcaagaagacaaagacgcccatctgagccaaggctggcaatgctgggcccagggccctggccccagctcccacttcagan

SEQ ID NO: 422466 - DNA, 3166 bp, Homo sapiens
gattggcttcgagggccagaatcggcaaagggccgaatagccgtgtttgggacctgggctcgggcttcttgcgtccccgctaagaacatgtcacggggccgaatcgtccgtattctctcagcttcaagctcctctacttttcaaccaggtcactagcccttgactcctcttatcaaacttccggaactgccaccccaccagtgactccacaggcaccagggcatgcaacagggctgggacaggaaggctctcttcttcacctcaagcctgctgggctaacacttgcgatttttactagagttaactttgtaatgtatgtctctgactctagaatttcaagagaagttccacttagtgactcctaagtggaagttctaagatggcttcccagtgaggtgatgaagaggtttgagctttagagtgcagttgcaaagctcttctctgacctgaacaatggctgtagctgtggaccaacaaatccagactccttcagtacaagatctccaaatagttaaactggaagaagattcccactgggagcaggaaatttcccttcaagggaattaccctggaccagagacatcctgccagagcttttggcatttccgttaccaagaagcatcacgaccccgagaggccctcctccagctccagaagctctgttgtcagtggctaaggccagagaagtgtacaaaagagcagatcctggagttgctggtcctagaacagttcccgactgtccttctccaggagatccagatctgggtcagacagcagcatccggagagtggagaggaggcagtggccctggtggaagacttgcagaaagaacctggaagacagaggctggagcctcgggcgaggccgtccggccgcacccctcctgctcagctgcggtcgccatggccaatgacagctgcgggcccggcgagccgagctcgagcgagcgagaccggcagtactgcgagctgtgcgggaagatggagaacctgctgcgctgcagccgcagctccttctgctgcaaggagcgccagcgccaggactggaagaagcacaagctcgtgtgccagggcagcgagggcgccctcggccacggagggggccctcaccaggactccggccccgcgccgcccgctgcagcgccgccgtccagggaccgggccctggaggccaggaaggcagcgaggcgccgggacagcgcctccggggacgcagccaaggcaaaggccaagtccgcggccgaccccgcggcggccgcgtccccgcctcgcgcgtccccgggccggacaaaagccatggctgcttgttatccggtcaatggaacgggttatgtacgtcatgttgataatccaaatggagacggaagacgtgtgaaatgtattacattacgttaaagaacgggatgccaagacaggaaccttgtctctgttgaagagcatcaagggaagattacatacgccttgaaaccgaaccctgcctgatgtggctctgggaattcctgcagagaagagcaggggtggccaggagatagtgagcagctcccaggaggcatggagggatccagaacctggactgaagaaccacctagaaataactcagcagaattctgaaaatgaggtcacgctggattttccaatccataggcccaaagtgaactcccacgtggagtaggatgaaaacccacagcatctagatcttcaaattctggagaaaaagagagtgtgaaagactgctcagtggctggggtgagagtcaagtctggccaggtgctaatctggagaaaagccaagacctggagcgagctggagtggcaggccctggaggatgagaaggtggcaggagtgcactggggatacaaagaaaccaagatttttctgggaattctcagaggcctggatccacgaaaaactccgcacctgccatcgaaaccaccaggtgtaccggattatggctgagcagctgtgagaacatggcttcctgtggaccctggagcaatgttgctatcggttcaaaaacctcctgaccgactactgcaaagccaggagcacctacacaccaggcaccagtgtcttctatgatgagatggatgccctgttgagtcttggggcactttctaacacctttgatgccttagaggtggtaggaggccttctttgggattgagaggattccaaagggaaccagggcatagcactagaagatgtggcgggatggtaatgaaatagtggaggagtctcaagaggaatcctggaggcttggtccccaggccttgaggtggaatcccagtggcaactctcccccacaatggacctcagagcagtgggagcgacgcagtcctgtgggaagcattcaggctcagaatcaggagatgtgattattgtcctggctctgttatgactaatttgggtctggaatggcctcatcgggggaaaaattggtgacaactttaagaaatactgtttatatcccgtcctcaaatattgcttgactcaaccctctactgaaccagtagtccagggtggctcacaaagaccactttgaggctcttgctctgctctttagccaaggagtctcccttcctgccttcagtaacaacattacaggaagagaggagagaaaggtaggagttaaagatccagtcatttgtttccatctaaagtgccctataagccgggcatggtggcgcaagcctgtagtcccagctactcgggaggctggggcaggagaatcacttgagcccaggagttggaggccgcagtgagctgtgatcatgccactgcattccagcctgggcgacagagtgagacccagactcagctgaaaaataataatattattaaaagaatttaaaataaagtgttccatagatgtgaaccctgcgtagattatacacaccagtctgccatttaaaaggtttgttgttcttgggcaacctctttaaatacccttagcctccattttctcatctggacagtggacattgtgatggtttctacctccctgggctgttatgaggatcctgacacagtattagcacttggcaaacgttagttttcattatcatcatcattataattattatgaaaatagataagggcattatcctgtaccctcaaaggagtaaaagggggaaaatgagtcattaaactttctcttctgggaacta

SEQ ID NO: 422467 - DNA, 3147 bp, Homo sapiens
gattggcttcgagggccagaatcggcaaagggccgaatagccgtgtttgggacctgggctcgggcttcttgcgtccccgctaagaacatgtcacggggccgaatcgtccgtattctctcagcttcaagctcctctacttttcaaccaggtcactagcccttgactcctcttatcaaacttccggaactgccaccccaccagtgactccacaggcaccagggcatgcaacagggctgggacaggaaggctctcttcttcacctcaagcctgctgggctaacacttgcgatttttactagagttaactttgtaatgtatgtctctgactctagaatttcaagagaagttccacttagtgactcctaagtggaagttctaagatggcttcccagtgaggtgatgaagaggtttgagctttagagtgcagttgcaaagctcttctctgacctgaacaatggctgtagctgtggaccaacaaatccagactccttcagtacaagatctccaaatagttaaactggaagaagattcccactgggagcaggaaatttcccttcaagggaattaccctggaccagagacatcctgccagagcttttggcatttccgttaccaagaagcatcacgaccccgagaggccctcctccagctccagaagctctgttgtcagtggctaaggccagagaagtgtacaaaagagcagatcctggagttgctggtcctagaacagttcccgactgtccttctccaggagatccagatctgggtcagacagcagcatccggagagtggagaggaggcagtggccctggtggaagacttgcagaaagaacctggaagacagaggctggagcctcgggcgaggccgtccggccgcacccctcctgctcagctgcggtcgccatggccaatgacagctgcgggcccggcgagccgagctcgagcgagcgagaccggcagtactgcgagctgtgcgggaagatggagaacctgctgcgctgcagccgcagctccttctgctgcaaggagcgccagcgccaggactggaagaagcacaagctcgtgtgccagggcagcgagggcgccctcggccacggagggggccctcaccaggactccggccccgcgccgcccgctgcagcgccgccgtccagggaccgggccctggaggccaggaaggcagcgaggcgccgggacagcgcctccggggacgcagccaaggcaaaggccaagtccgcggccgaccccgcggcggccgcgtccccgcctcgcgcgtccccgggccggacaaaagccatggctgcttgttatccggtcaatggaacgggttatgtacgtcatgttgataatccaaatggagacggaagacgtgtgaaatgtattacattacgttaaagaacgggatgccaagccctgcctgatgtggctctgggaattcctgcagagaagagcaggggtggccaggagatagtgagcagctcccaggagctagtgacacctggtgattcggctgtgtatatctcctaggaggcatggagggatccagaacctggactgaagaaccacctagaaataactcagcagaattctgaaaatgaggtcacgctggattttccaatccataggcccaaagtgaactcccacgtggagtaggatgaaaacccacagcatctagatcttcaaattctggagaaaaagagagtgtgaaagactgctcagtggctggggtgagagtcaagtctggccaggtgctaatctggagaaaagccaagacctggagcgagctggagtggcaggccctggaggatgagaaggtggcaggagtgcactggggatacaaagaaaccaagatttttctgggaattctcagaggcctggatccacgaaaaactccgcacctgccatcgaaaccaccaggtgtaccggattatggctgagcagctgtgagaacatggcttcctgtggaccctggagcaatgttgctatcggttcaaaaacctcctgaccgactactgcaaagccaggagcacctacacaccaggcaccagtgtcttctatgatgagatggatgccctgttgagtcttggggcactttctaacacctttgatgccttagaggtggtaggaggccttctttgggattgagaggattccaaagggaaccagggcatagcactagaagatgtggcgggatggtaatgaaatagtggaggagtctcaagaggaatcctggaggcttggtccccaggccttgaggtggaatcccagtggcaactctcccccacaatggacctcagagcagtgggagcgacgcagtcctgtgggaagcattcaggctcagaatcaggagatgtgattattgtcctggctctgttatgactaatttgggtctggaatggcctcatcgggggaaaaattggtgacaactttaagaaatactgtttatatcccgtcctcaaatattgcttgactcaaccctctactgaaccagtagtccagggtggctcacaaagaccactttgaggctcttgctctgctctttagccaaggagtctcccttcctgccttcagtaacaacattacaggaagagaggagagaaaggtaggagttaaagatccagtcatttgtttccatctaaagtgccctataagccgggcatggtggcgcaagcctgtagtcccagctactcgggaggctggggcaggagaatcacttgagcccaggagttggaggccgcagtgagctgtgatcatgccactgcattccagcctgggcgacagagtgagacccagactcagctgaaaaataataatattattaaaagaatttaaaataaagtgttccatagatgtgaaccctgcgtagattatacacaccagtctgccatttaaaaggtttgttgttcttgggcaacctctttaaatacccttagcctccattttctcatctggacagtggacattgtgatggtttctacctccctgggctgttatgaggatcctgacacagtattagcacttggcaaacgttagttttcattatcatcatcattataattattatgaaaatagataagggcattatcctgtaccctcaaaggagtaaaagggggaaaatgagtcattaaactttctcttctgggaacta

SEQ ID NO: 422468 - DNA, 3815 bp, Homo sapiens
  misc_feature (3815)..(3815): n is a, c, g, or t
gagccggggtgaatctggaggggccgggccgagcccgggggcgctttcgcacgcgaagcaaccgctagagcaggacctggtctcccaagagcgggactacttgttgatatttgaggagggaagtgtcttacctgagagcctggctggagaagactgaggtccaaggcttgaagcctaagtgattgccccaggactgtggatgatggctgcagacatcccgagagtgaccactccgctgagctccttggtccaggtgcctcaagaggaagatagacaggaggaggaggtcaccaccatgatcctggaggatgactcctgggtgcaagaagctgtgctgcaggaggatggccctgagtctgagccctttccccagagtgctggcaagggcggcccccaggaggaggtgaccaggggaccacagggtgcactcggccgcctccgagagctctgccggcgctggctgagaccagaggtacacaccaaggagcagatgttaaccatgctgccaaaggaaattcaggcttggctgcaagagcatcggcctgaaagcagtgaggaggcagcggccctggtggaagacttgacccagacccttcaggacagtgattttgagatacagagtgaaaatggggagaactgtaatcaagacatgtttgagaatgaatcacgtaagatattctcggaaatgcctgaaggtgaaagtgctcagcactccgatggggaaagtgactttgagagagatgctggcatccagaggctccagggacacaccccaggtgaggaccacggggaggtggtttctcaggacagggaagttggccagctcataggcctgcagggcacctacctaggggagaagccctacgaatgtccccagtgtgggaagaccttcagccggaaatcccacctcatcacacacgagaggacccacacaggagagaaatactacaaatgtgatgaatgtggaaaaagctttagtgatggttcaaattttagtagacaccaaaccactcacaccggggagaagccctacaaatgcagagactgtgggaagagctttagccggagtgccaacctcataacccaccagaggatccacacgggggaaaagcccttccagtgtgccgagtgtggcaagagcttcagcaggagtcccaacctcattgcacatcagcgcacccacacaggagagaaaccctactcgtgccccgagtgtggaaagagctttggcaaccgatccagccttaacacgcatcaggggatccacactggagaaaagccctacgaatgtaaagaatgcggcgaaagctttagttacaactccaatctaatcagacaccagagaatccacacaggagagaaaccctacaaatgtaccgactgtgggcagaggttcagccagagttcagccctcatcacccaccggagaacccacacaggagagaaaccctaccagtgcagcgagtgtgggaaaagcttcagccgcagctctaacctggccacacaccggagaacccacatggtggagaagccctataagtgtgggggtggtgtgggaagagcttcagccagagctccagtctgattgcacaccagggcatgcacacaggggagaaaccctacgagttgcctgacatgtggggaagagcttcagctggagctccaacctcctcaagcaccagaggatccacacgggagagaaaccctacaaatgcagcgagtgtgggaaatgcttcagccagcgctcccagctcgtagtgcaccagcggacccacacgggcgagaagccctacaaatgcctcatgtgcggcaagagcttcagccggggctccattctggtcatgcaccagagagcccatttgggagacaagccctacaggtgccctgagtgtgggaaaggctttagctggaactcagtcctcattatacatcagcgaatccacactggggagaagccctacaaatgccccgagtgtggcaaaggcttcagcaacagctctaactttatcacacatcagagaactcacatgaaagagaaactttattgaagtggcaaagagtgaaagtgagggactggcctggagtgggagttgccacactgccccaacagtgattccctttcaaagagctgtgcttcctaaacattctggggggttttgccagagtcttccccttgctcatcctcatttccaggacactgtcattttagtggtctgagtcaagtcccgtatacattcaagaacagggcataggcgtggaaggtctggaaagttgggtctttttcccttacattgggtgacttgattggccccctctcatgattcctctgtgcctcagtttcctctttggtaaaatggggggaaatgtttctccatgtggaatggaagacagcatggcccacaacgtgggccgagtcctcagagaaatactggaaatcattggtgtggttctggttgttttgttgttttgctgccacgttgttgggctaaggtgccttcaccccaagctgttagtgttccagggcaccccaagctgtcagttagaatctgctcttctggctttggtgtcttgggctttgatttcaggtcaagatggaggggcttctccagttctgagtcacccacgtgaaggtaaagaccctttctatttccagaaagtgtcaggagcacagaaacttgaggaagtacagcctggagccagtgtcccagtgtcctttccattggtaagagttggacagggccttcaggaaaggggtaaaccgaggacatttcagtgcttgcttttgtctctgcctactgtcctgtggtagatcagctaccaggggaacacatttgttctcgtggggttttgtcctggagagtgtagtgaagtccgagagccctagctgccaacccatggtggatggtaacttctgtctcatcaagagtaaaacagtcctgcacacagcagggtgggtttgtgcctttggcccaacaggtacatagccccataatttctgaattattctatgcacttgtttccctcttcttttattttttatttgatatatgccgagctagaatcctgtcgggtagcttttgtatactaagaacattattattattattatttttgagacagtctcgctctgttgcccaggctggagtgcagtggtgcaatctcagctcactgcaagctccgcctcccaggttcacgccattcttctgcctcagcctcctaagtagctgggactacaggcgcctgccaccatgcctggctaattttttgtatttttagtagggacggggtttcaccgtgttagccactgtccccttttctttctgacccagcccgatgtctgtcccagtgtcttactgtctgcaggcccctccaccaacctgagacctgaattcctgctaggctaggaaaggcctgctgccaatgtgtggaagtttagtagccagggtaggaaaaggcctgccactgaagaacctggagagttcgaatttctctgtgagcaactttaactcctggagccaggtttatcatggtgctggaggctccttcctgagcacccaacagtctcctggaagaaagagatcagataacaagacgaaatcctgctcggcagtacctgagatggccaagcaattcttcaggcctggggcccaagtcactcgcagcagctctgggtcagggctaggtacggatactgggcactggactgagctcacaggatggcagagatcccgggggtcaagaagacaaagacgcccatctgagccaaggctggcaatgctgggcccagggccctggccccagctcccacttcagan

SEQ ID NO: 422469 - DNA, 2254 bp, Homo sapiens
  misc_feature (216)..(216): n is a, c, g, or t
  misc_feature (221)..(221): n is a, c, g, or t
  misc_feature (442)..(442): n is a, c, g, or t
  misc_feature (446)..(446): n is a, c, g, or t
  misc_feature (2254)..(2254): n is a, c, g, or t
aggttcaaacaagaacttttggtggaaggtggtggtactttgtaaataataaaagattaagggtttcctatttgacagattcaaagagattttaatcgattatgcaacaaatttggtcaagttgtacacggtgctccatccagatggccagtcggctcaaggggccaaggatcaggctctgagggaataaatttaatcaaggtctttgcaaaacanaagcncagaagggagcctatatagaactaacactgcagacttatcaagaagcactcagtcgccattctgcagcttcctaaaaatattttaaaaatacatttattttactaaatactgactacatttctctgttaatattgagctaaatgttaaaaaatggccagattaaaagatatcaatttgtagttctccctaaaaaaaaaaaaaaaaaactcgagtttttttntttntttttttttttttttttcacatgaaagagaaactttattgaagtggcaaagagtgaaagtgagggactggcctggagtgggagttgccacactgccccaacagtgattccctttcaaagagctgtgcttcctaaacattctggggggttttgccagagtcttccccttgctcatcctcatttccaggacactgtcattttagtggtctgagtcaagtcccgtatacattcaagaacagggcataggcgtggaaggtctggaaagttgggtctttttcccttacattgggtgacttgattggccccctctcatgattcctctgtgcctcagtttcctctttggtaaaatggggggaaatgtttctccatgtggaatggaagacagcatggcccacaacgtgggccgagtcctcagagaaatactggaaatcattggtgtggttctggttgttttgttgttttgctgccacgttgttgggctaaggtgccttcaccccaagctgttagtgttccagggcaccccaagctgtcagttagaatctgctcttctggctttggtgtcttgggctttgatttcaggtcaagatggaggggcttctccagttctgagtcacccacgtgaaggtaaagaccctttctatttccagaaagtgtcaggagcacagaaacttgaggaagtacagcctggagccagtgtcccagtgtcctttccattggtaagagttggacagggccttcaggaaaggggtaaaccgaggacatttcagtgcttgcttttgtctctgcctactgtcctgtggtagatcagctaccaggggaacacatttgttctcgtggggttttgtcctggagagtgtagtgaagtccgagagccctagctgccaacccatggtggatggtaacttctgtctcatcaagagtaaaacagtcctgcacacagcagggtgggtttgtgcctttggcccaacaggtacatagccccataatttctgaattattctatgcacttgtttccctcttcttttattttttatttgatatatgccgagctagaatcctgtcgggtagcttttgtatactaagaacattattattattattatttttgagacagtctcgctctgttgcccaggctggagtgcagtggtgcaatctcagctcactgcaagctccgcctcccaggttcacgccattcttctgcctcagcctcctaagtagctgggactacaggcgcctgccaccatgcctggctaattttttgtatttttagtagggacggggtttcaccgtgttagccactgtccccttttctttctgacccagcccgatgtctgtcccagtgtcttactgtctgcaggcccctccaccaacctgagacctgaattcctgctaggctaggaaaggcctgctgccaatgtgtggaagtttagtagccagggtaggaaaaggcctgccactgaagaacctggagagttcgaatttctctgtgagcaactttaactcctggagccaggtttatcatggtgctggaggctccttcctgagcacccaacagtctcctggaagaaagagatcagataacaagacgaaatcctgctcggcagtacctgagatggccaagcaattcttcaggcctggggcccaagtcactcgcagcagctctgggtcagggctaggtacggatactgggcactggactgagctcacaggatggcagagatcccgggggtcaagaagacaaagacgcccatctgagccaaggctggcaatgctgggcccagggccctggccccagctcccacttcagan

SEQ ID NO: 422470 - DNA, 2200 bp, Homo sapiens
  misc_feature (216)..(216): n is a, c, g, or t
  misc_feature (221)..(221): n is a, c, g, or t
  misc_feature (388)..(388): n is a, c, g, or t
  misc_feature (392)..(392): n is a, c, g, or t
  misc_feature (2200)..(2200): n is a, c, g, or t
aggttcaaacaagaacttttggtggaaggtggtggtactttgtaaataataaaagattaagggtttcctatttgacagattcaaagagattttaatcgattatgcaacaaatttggtcaagttgtacacggtgctccatccagatggccagtcggctcaaggggccaaggatcaggctctgagggaataaatttaatcaaggtctttgcaaaacanaagcncagaagggagcctatatagaactaacactgaaaaatacatttattttactaaatactgactacatttctctgttaatattgagctaaatgttaaaaaatggccagattaaaagatatcaatttgtagttctccctaaaaaaaaaaaaaaaaaactcgagtttttttntttntttttttttttttttttcacatgaaagagaaactttattgaagtggcaaagagtgaaagtgagggactggcctggagtgggagttgccacactgccccaacagtgattccctttcaaagagctgtgcttcctaaacattctggggggttttgccagagtcttccccttgctcatcctcatttccaggacactgtcattttagtggtctgagtcaagtcccgtatacattcaagaacagggcataggcgtggaaggtctggaaagttgggtctttttcccttacattgggtgacttgattggccccctctcatgattcctctgtgcctcagtttcctctttggtaaaatggggggaaatgtttctccatgtggaatggaagacagcatggcccacaacgtgggccgagtcctcagagaaatactggaaatcattggtgtggttctggttgttttgttgttttgctgccacgttgttgggctaaggtgccttcaccccaagctgttagtgttccagggcaccccaagctgtcagttagaatctgctcttctggctttggtgtcttgggctttgatttcaggtcaagatggaggggcttctccagttctgagtcacccacgtgaaggtaaagaccctttctatttccagaaagtgtcaggagcacagaaacttgaggaagtacagcctggagccagtgtcccagtgtcctttccattggtaagagttggacagggccttcaggaaaggggtaaaccgaggacatttcagtgcttgcttttgtctctgcctactgtcctgtggtagatcagctaccaggggaacacatttgttctcgtggggttttgtcctggagagtgtagtgaagtccgagagccctagctgccaacccatggtggatggtaacttctgtctcatcaagagtaaaacagtcctgcacacagcagggtgggtttgtgcctttggcccaacaggtacatagccccataatttctgaattattctatgcacttgtttccctcttcttttattttttatttgatatatgccgagctagaatcctgtcgggtagcttttgtatactaagaacattattattattattatttttgagacagtctcgctctgttgcccaggctggagtgcagtggtgcaatctcagctcactgcaagctccgcctcccaggttcacgccattcttctgcctcagcctcctaagtagctgggactacaggcgcctgccaccatgcctggctaattttttgtatttttagtagggacggggtttcaccgtgttagccactgtccccttttctttctgacccagcccgatgtctgtcccagtgtcttactgtctgcaggcccctccaccaacctgagacctgaattcctgctaggctaggaaaggcctgctgccaatgtgtggaagtttagtagccagggtaggaaaaggcctgccactgaagaacctggagagttcgaatttctctgtgagcaactttaactcctggagccaggtttatcatggtgctggaggctccttcctgagcacccaacagtctcctggaagaaagagatcagataacaagacgaaatcctgctcggcagtacctgagatggccaagcaattcttcaggcctggggcccaagtcactcgcagcagctctgggtcagggctaggtacggatactgggcactggactgagctcacaggatggcagagatcccgggggtcaagaagacaaagacgcccatctgagccaaggctggcaatgctgggcccagggccctggccccagctcccacttcagan

SEQ ID NO: 422471 - DNA, 2094 bp, Homo sapiens
ttggcagagatggggtttcaccatgttggccaggctggtcttgaactcctgaccttaagtaatctgcctgcctcggcctcccaaagtgctgggactacaggcctgagccaccacggggccccagtgtgcagtcttttatcccctcagtctgtacccagtgtgtagtcttttatccctcacccccctgctcccaccctttccccctgggttgaatatttcaaatctatttcttccttaaatcttactcaaaggaaatccaataccatagtcagtttcaccaaggatgaatttcttgacccagaaaggaaagctcattttagggagatggtcagtttaggtatgtgtctgaattttatttaagatagatgaacgtggatatatagttatgcatttgggcctgaatttttttttctagttgttcttttcactgagctttcccaagaatccccccagaattaaaaaaaaaaaattactatctcctctccctggcatataaaatggttgggattagatttaccaaaccattacatctcccttttgtctgcctgcaaacagattttccaatccataggcccaaagtgaactcccacgtggagtaggatgaaaacccacagcatctagatcttcaaattctggagaaaaagagagtgtgaaagactgctcagtggctggggtgagagtcaagtctggccaggtgctaatctggagaaaagccaagacctggagcgagctggagtggcaggccctggaggatgagaaggtggcaggagtgcactggggatacaaagaaaccaagatttttctgggaattctcagaggcctggatccacgaaaaactccgcacctgccatcgaaaccaccaggtgtaccggattatggctgagcagctgtgagaacatggcttcctgtggaccctggagcaatgttgctatcggttcaaaaacctcctgaccgactactgcaaagccaggagcacctacacaccaggcaccagtgtcttctatgatgagatggatgccctgttgagtcttggggcactttctaacacctttgatgccttagaggtggtaggaggccttctttgggattgagaggattccaaagggaaccagggcatagcactagaagatgtggcgggatggtaatgaaatagtggaggagtctcaagaggaatcctggaggcttggtccccaggccttgaggtggaatcccagtggcaactctcccccacaatggacctcagagcagtgggagcgacgcagtcctgtgggaagcattcaggctcagaatcaggagatgtgattattgtcctggctctgttatgactaatttgggtctggaatggcctcatcgggggaaaaattggtgacaactttaagaaatactgtttatatcccgtcctcaaatattgcttgactcaaccctctactgaaccagtagtccagggtggctcacaaagaccactttgaggctcttgctctgctctttagccaaggagtctcccttcctgccttcagtaacaacattacaggaagagaggagagaaaggtaggagttaaagatccagtcatttgtttccatctaaagtgccctataagccgggcatggtggcgcaagcctgtagtcccagctactcgggaggctggggcaggagaatcacttgagcccaggagttggaggccgcagtgagctgtgatcatgccactgcattccagcctgggcgacagagtgagacccagactcagctgaaaaataataatattattaaaagaatttaaaataaagtgttccatagatgtgaaccctgcgtagattatacacaccagtctgccatttaaaaggtttgttgttcttgggcaacctctttaaatacccttagcctccattttctcatctggacagtggacattgtgatggtttctacctccctgggctgttatgaggatcctgacacagtattagcacttggcaaacgttagttttcattatcatcatcattataattattatgaaaatagataagggcattatcctgtaccctcaaaggagtaaaagggggaaaatgagtcattaaactttctcttctgggaacta

SEQ ID NO: 422472 - DNA, 1886 bp, Homo sapiens
gattggcttcgagggccagaatcggcaaagggccgaatagccgtgtttgggacctgggctcgggcttcttgcgtccccgctaagaacatgtcacggggccgaatcgtccgtattctctcagcttcaagctcctctacttttcaaccaggtcactagcccttgactcctcttatcaaacttccggaactgccaccccaccagtgactccacaggcaccagggcatgcaacagggctgggacaggaaggctctcttcttcacctcaagcctgctgggctaacacttgcgatttttactagagttaactttgtaatgtatgtctctgactctagaatttcaagagaagttccacttagtgactcctaagtggaagttctaagatggcttcccagtgaggtgatgaagaggtttgagctttagagtgcagttgcaaagctcttctctgacctgaacaatggctgtagctgtggaccaacaaatccagactccttcagtacaagatctccaaatagttaaactggaagaagattcccactgggagcaggaaatttcccttcaagggaattaccctggaccagagacatcctgccagagcttttggcatttccgttaccaagaagcatcacgaccccgagaggccctcctccagctccagaagctctgttgtcagtggctaaggccagagaagtgtacaaaagagcagatcctggagttgctggtcctagaacagttcccgactgtccttctccaggagatccagatctgggtcagacagcagcatccggagagtggagaggaggcagtggccctggtggaagacttgcagaaagaacctggaagacagaggctggagcctcgggcgaggccgtccggccgcacccctcctgctcagctgcggtcgccatggccaatgacagctgcgggcccggcgagccgagctcgagcgagcgagaccggcagtactgcgagctgtgcgggaagatggagaacctgctgcgctgcagccgcagctccttctgctgcaaggagcgccagcgccaggactggaagaagcacaagctcgtgtgccagggcagcgagggcgccctcggccacggagggggccctcaccaggactccggccccgcgccgcccgctgcagcgccgccgtccagggaccgggccctggaggccaggaaggcagcgaggcgccgggacagcgcctccggggacgcagccaaggcaaaggccaagtccgcggccgaccccgcggcggccgcgtccccgcctcgcgcgtccccgggccggacaaaagccatggctgcttgttatccggtcaatggaacgggttatgtacgtcatgttgataatccaaatggagacggaagacgtgtgaaatgtattacattacgttaaagaacgggatgccaagccctgcctgatgtggctctgggaattcctgcagagaagagcaggggtggccaggagatagtgagcagctcccaggaggcatggagggatccagaacctggactgaagaaccacctagaaataactcagcagaattctgaaaatgaggtcacgctgggacttccagttccccagccagatggggtcacaatgctgcagaaaagtgaagagctttggaatgaagatctcccggacttcaaggagattcagaaaacgtccagtgcaggtgggaaatgaatgggagctagcattccaccaacaaagtcagccctgggattctaaactcggacaagccagcactggttaagggctgaggggaaccaggcactcagtgcacccagtttactattctgtggtgtggaaagcacaggacttgagaagcaggtggcacccaggaaagcctgttcccctaagtaagtttgaactttagttacttga

SEQ ID NO: 422473 - DNA, 2960 bp, Homo sapiens
gagccggggtgaatctggaggggccgggccgagcccgggggcgctttcgcacgcgaagcaaccgctagagcaggacctggtctcccaagagcgggactacttgttgatatttgaggagggaagtgtcttacctgagagcctggctggagaagactgaggtccaaggcttgaagcctaagtgattgccccaggactgtggatgatggctgcagacatcccgagagtgaccactccgctgagctccttggtccaggtgcctcaagaggaagatagacaggaggaggaggtcaccaccatgatcctggaggatgactcctgggtgcaagaagctgtgctgcaggaggatggccctgagtctgagccctttccccagagtgctggcaagggcggcccccaggaggaggtgaccaggggaccacagggtgcactcggccgcctccgagagctctgccggcgctggctgagaccagaggtacacaccaaggagcagatgttaaccatgctgccaaaggaaattcaggcttggctgcaagagcatcggcctgaaagcagtgaggaggcagcggccctggtggaagacttgacccagacccttcaggacagtgattttgagatacagagtgaaaatggggagaactgtaatcaagacatgtttgagaatgaatcacgtaagatattctcggaaatgcctgaaggtgaaagtgctcagcactccgatggggaaagtgactttgagagagatgctggcatccagaggctccagggacacaccccaggtgaggaccacggggaggtggtttctcaggacagggaagttggccagctcataggcctgcagggcacctacctaggggagaagccctacgaatgtccccagtgtgggaagaccttcagccggaaatcccacctcatcacacacgagaggacccacacaggagagaaatactacaaatgtgatgaatgtggaaaaagctttagtgatggttcaaattttagtagacaccaaaccactcacaccggggagaagccctacaaatgcagagactgtgggaagagctttagccggagtgccaacctcataacccaccagaggatccacacgggggaaaagcccttccagtgtgccgagtgtggcaagagcttcagcaggagtcccaacctcattgcacatcagcgcacccacacaggagagaaaccctactcgtgccccgagtgtggaaagagctttggcaaccgatccagccttaacacgcatcaggggatccacactggagaaaagccctacgaatgtaaagaatgcggcgaaagctttagttacaactccaatctaatcagacaccagagaatccacacaggagagaaaccctacaaatgtaccgactgtgggcagaggttcagccagagttcagccctcatcacccaccggagaacccacacaggagagaaaccctaccagtgcagcgagtgtgggaaaagcttcagccgcagctctaacctggccacacaccggagaacccacatggtggagaagccctataagtgtgggggtggtgtgggaagagcttcagccagagctccagtctgattgcacaccagggcatgcacacaggggagaaaccctacgagttgcctgacatgtggggaagagcttcagctggagctccaacctcctcaagcaccagaggatccacacgggagagaaaccctacaaatgcagcgagtgtgggaaatgcttcagccagcgctcccagctcgtagtgcaccagcggacccacacgggcgagaagccctacaaatgcctcatgtgcggcaagagcttcagccggggctccattctggtcatgcaccagagagcccatttgggagacaagccctacaggtgccctgagtgtgggaaaggctttagctggaactcagtcctcattatacatcagcgaatccacactggggagaagccctacaaatgccccgagtgtggcaaaggcttcagcaacagctctaactttatcacacatcagagaactcacatgaaagagaaactttattgaagtggcaaagagtgaaagtgagggactggcctggagtgggagttgccacactgccccaacagtgattccctttcaaagagctgtgcttcctaaacattctggggggttttgccagagtcttccccttgctcatcctcatttccaggacactgtcattttagtggtctgagtcaagtcccgtatacattcaagaacagggcataggcgtggaaggtctggaaagttgggtctttttcccttacattgggtgacttgattggccccctctcatgattcctctgtgcctcagtttcctctttggtaaaatggggggaaatgtttctccatgtggaatggaagacagcatggcccacaacgtgggccgagtcctcagagaaatactggaaatcattggtgtggttctggttgttttgttgttttgctgccacgttgttgggctaaggtgccttcaccccaagctgttagtgttccagggcaccccaagctgtcagttagaatctgctcttctggctttggtgtcttgggctttgatttcaggtcaagatggaggggcttctccagttctgagtcacccacgtgaaggtaaagaccctttctatttccagaaagtgtcaggagcacagaaacttgaggaagtacagcctggagccagtgtcccagtgtcctttccattggtgtcgcccttgatctcaggatgctaccagggctttgttctcgggatcctcgcacctggagagtgaagacgggcatgacggcaggtgaaggggtttgctgtgaaggaagaggagataaggcatttccaggaaatgggaaactgcctcctcctacacatggggcctgtgctcagaatgggcttagttcttataggatggatgctcagtattccttaataaagtagagttccattctttt

SEQ ID NO: 422474 - DNA, 3350 bp, Homo sapiens
gagccggggtgaatctggaggggccgggccgagcccgggggcgctttcgcacgcgaagcaaccgctagagcaggacctggtctcccaagagcgggactacttgttgatatttgaggagggaagtgtcttacctgagagcctggctggagaagactgaggtccaaggcttgaagcctaagtgattgccccaggactgtggatgatggctgcagacatcccgagagtgaccactccgctgagctccttggtccaggtgcctcaagaggaagatagacaggaggaggaggtcaccaccatgatcctggaggatgactcctgggtgcaagaagctgtgctgcaggaggatggccctgagtctgagccctttccccagagtgctggcaagggcggcccccaggaggaggtgaccaggggaccacagggtgcactcggccgcctccgagagctctgccggcgctggctgagaccagaggtacacaccaaggagcagatgttaaccatgctgccaaaggaaattcaggcttggctgcaagagcatcggcctgaaagcagtgaggaggcagcggccctggtggaagacttgacccagacccttcaggacagtgattttgagatacagagtgaaaatggggagaactgtaatcaagacatgtttgagaatgaatcacgtaagatattctcggaaatgcctgaaggtgaaagtgctcagcactccgatggggaaagtgactttgagagagatgctggcatccagaggctccagggacacaccccaggtgaggaccacggggaggtggtttctcaggacagggaagttggccagctcataggcctgcagggcacctacctaggggagaagccctacgaatgtccccagtgtgggaagaccttcagccggaaatcccacctcatcacacacgagaggacccacacaggagagaaatactacaaatgtgatgaatgtggaaaaagctttagtgatggttcaaattttagtagacaccaaaccactcacaccggggagaagccctacaaatgcagagactgtgggaagagctttagccggagtgccaacctcataacccaccagaggatccacacgggggaaaagcccttccagtgtgccgagtgtggcaagagcttcagcaggagtcccaacctcattgcacatcagcgcacccacacaggagagaaaccctactcgtgccccgagtgtggaaagagctttggcaaccgatccagccttaacacgcatcaggggatccacactggagaaaagccctacgaatgtaaagaatgcggcgaaagctttagttacaactccaatctaatcagacaccagagaatccacacaggagagaaaccctacaaatgtaccgactgtgggcagaggttcagccagagttcagccctcatcacccaccggagaacccacacaggagagaaaccctaccagtgcagcgagtgtgggaaaagcttcagccgcagctctaacctggccacacaccggagaacccacatggtggagaagccctataagtgtgggggtggtgtgggaagagcttcagccagagctccagtctgattgcacaccagggcatgcacacaggggagaaaccctacgagttgcctgacatgtggggaagagcttcagctggagctccaacctcctcaagcaccagaggatccacacgggagagaaaccctacaaatgcagcgagtgtgggaaatgcttcagccagcgctcccagctcgtagtgcaccagcggacccacacgggcgagaagccctacaaatgcctcatgtgcggcaagagcttcagccggggctccattctggtcatgcaccagagagcccatttgggagacaagccctacaggtgccctgagtgtgggaaaggctttagctggaactcagtcctcattatacatcagcgaatccacactggggagaagccctacaaatgccccgagtgtggcaaaggcttcagcaacagctctaactttatcacacatcagagaactcacatgaaagagaaactttattgaagtggcaaagagtgaaagtgagggactggcctggagtgggagttgccacactgccccaacagtgattccctttcaaagagctgtgcttcctaaacattctggggggttttgccagagtcttccccttgctcatcctcatttccaggacactgtcattttagtggtctgagtcaagtcccgtatacattcaagaacagggcataggcgtggaaggtctggaaagttgggtctttttcccttacattgggtgacttgattggccccctctcatgattcctctgtgcctcagtttcctctttggtaaaatggggggaaatgtttctccatgtggaatggaagacagcatggcccacaacgtgggccgagtcctcagagaaatactggaaatcattggtgtggttctggttgttttgttgttttgctgccacgttgttgggctaaggtgccttcaccccaagctgttagtgttccagggcaccccaagctgtcagttagaatctgctcttctggctttggtgtcttgggctttgatttcaggtcaagatggaggggcttctccagttctgagtcacccacgtgaaggtaaagaccctttctatttccagaaagtgtcaggagcacagaaacttgaggaagtacagcctggagccagtgtcccagtgtcctttccattggtaagagttggacagggccttcaggaaaggggtaaaccgaggacatttcagtgcttgcttttgtctctgcctactgtcctgtggtagatcagctaccaggggaacacatttgttctcgtggggttttgtcctggagagtgtagtgaagtccgagagccctagctgccaacccatggtggatggtaacttctgtctcatcaagagtaaaacagtcctgcacacagcagggtgggtttgtgcctttggcccaacaggtacatagccccataatttctgaattattctatgcacttgtttccctcttcttttattttttatttgatatatgccgagctagaatcctgtcgggtagcttttgtatactaagaacattattattattattatttttgagacggagtctcactctgtcacccaggcgctcctgcctataatcctaactctttgggaggccgaggtgggtggatcacttgaggtcagaagttcaagaccagcctggccaacatggtgaaaccccacctctactaaaaataaaaaaattagccaggtgtggtggcgcctacctgttgtctcagctactcaagaggctgaggcaagacaatcacttgaacccaggaggtggagcttg

SEQ ID NO: 422475 - DNA, 1005 bp, Homo sapiens
gattggcttcgagggccagaatcggcaaagggccgaatagccgtgtttgggacctgggctcgggcttcttgcgtccccgctaagaacatgtcacggggccgaatcgtccgtattctctcagcttcaagctcctctacttttcaaccaggtcactagcccttgactcctcttatcaaacttccggaactgccaccccaccagtgactccacaggcaccagggcatgcaacagggctgggacaggaaggctctcttcttcacctcaagcctgctgggctaacacttgcgatttttactagagttaactttgtaatgtatgtctctgactctagaatttcaagagaagttccacttagtgactcctaagtggaagttctaagatggcttcccagtgaggtgatgaagaggtttgagctttagagtgcagttgcaaagctcttctctgacctgaacaatggctgtagctgtggaccaacaaatccagactccttcagtacaagatctccaaatagttaaactggaagaagattcccactgggagcaggaaatttcccttcaagggaattaccctggaccagagacatcctgccagagcttttggcatttccgttaccaagaagcatcacgaccccgagaggccctcctccagctccagaagctctgttgtcagtggctaaggccagagaagtgtacaaaagagcagatcctggagttgctggtcctagaacagttcccgactgtccttctccaggagatccagatctgggtcagacagcagcatccggagagtggagaggaggcagtggccctggtggaagacttgcagaaagaaccctgcgctcctccgcagcctgggccgggccgcccgggacgctgaggcggtggcggcagccgagggggccggtcttgcgctccgcaggctcgcgcgcccgagcccgggttgccgttcgccgcacaggccgcgttctctcagcccacggcggcgattaggcgctgaggcggccgc

SEQ ID NO: 422476 - DNA, 1083 bp, Homo sapiens
gagccggggtgaatctggaggggccgggccgagcccgggggcgctttcgcacgcgaagcaaccgctagagcaggacctggtctcccaagagcgggactacttgttgatatttgaggagggaagtgtcttacctgagagcctggctggagaagactgaggtccaaggcttgaagcctaagtgattgccccaggactgtggatgatggctgcagacatcccgagagtgaccactccgctgagctccttggtccaggtgcctcaagaggaagatagacaggaggaggaggtcaccaccatgatcctggaggatgactcctgggtgcaagaagctgtgctgcaggaggatggccctgagtctgagccctttccccagagtgctggcaagggcggcccccaggaggaggtgaccaggggaccacagggtgcactcggccgcctccgagagctctgccggcgctggctgagaccagaggtacacaccaaggagcagatgttaaccatgctgccaaaggaaattcaggcttggctgcaagagcatcggcctgaaagcagtgaggaggcagcggccctggtggaagacttgacccagacccttcaggacagtgattttgagatacagagtgaaaatggggagaactgtaatcaagacatgtttgagaatgaatcacgtaagatattctcggaaatgcctgaaggtgaaagtgctcagcactccgatggggaaagtgactttgagagagatgctggcatccagaggctccagggacacaccccagaaagtgtcaggagcacagaaacttgaggaagtacagcctggagccagtgtcccagtgtcctttccattggtgtcgcccttgatctcaggatgctaccagggctttgttctcgggatcctcgcacctggagagtgaagacgggcatgacggcaggtgaaggggtttgctgtgaaggaagaggagataaggcatttccaggaaatgggaaactgcctcctcctacacatggggcctgtgctcagaatgggcttagttcttataggatggatgctcagtattccttaataaagtagagttccattctttt

SEQ ID NO: 422477 - DNA, 911 bp, Homo sapiens
gagccggggtgaatctggaggggccgggccgagcccgggggcgctttcgcacgcgaagcaaccgctagagcaggacctggtctcccaagagcgggactacttgttgatatttgaggagggaagtgtcttacctgagagcctggctggagaagactgaggtccaaggcttgaagcctaagtgattgccccaggactgtggatgatggctgcagacatcccgagagtgaccactccgctgagctccttggtccaggtgcctcaagaggaagatagacaggaggaggaggtcaccaccatgatcctggaggatgactcctgggtgcaagaagctgtgctgcaggaggatggccctgagtctgagccctttccccagagtgctggcaagggcggcccccaggaggaggtgaccaggggaccacagggtgcactcggccgcctccgagagctctgccggcgctggctgagaccagaggtacacaccaaggagcagatgttaaccatgctgccaaaggaaattcaggcttggctgcaagagcatcggcctgaaagcagtgaggaggcagcggccctggtggaagacttgacccagacccttcaggacagtgaaacagcttcctgcgtacatggctgccctgtgtgattccagttgcagcctcacctcctttgcctctctgaaccaaagaagccagccctgcttaccccagttcccaaacacaggaagtgattttctgcctgagctttctgagttctgttccctcccaccccagggctctccatgcttattcattgcatttccttcctcattgcttttacccagtctgctgttttgggaagccctgacatgtattttggtgcctacatattttatcttctgatctcactgaaaataaaattggattttacttgttttc

SEQ ID NO: 422478 - DNA, 850 bp, Homo sapiens
gagccggggtgaatctggaggggccgggccgagcccgggggcgctttcgcacgcgaagcaaccgctagagcaggacctggtctcccaagagcgggactacttgttgatatttgaggagggaagtgtcttacctgagagcctggctggagaagactgaggtccaaggcttgaagcctaagtgattgccccaggactgtggatgatggctgcagacatcccgagagtgaccactccgctgagctccttggtccaggtgcctcaagaggaagatagacaggaggaggaggtcaccaccatgatcctggaggatgactcctgggtgcaagaagctgtgctgcaggaggatggccctgagtctgagccctttccccagagtgctggcaagggcggcccccaggaggaggtgaccaggggaccacagggtgcactcggccgcctccgagagctctgccggcgctggctgagaccagaggtacacaccaaggagcagatgttaaccatgctgccaaaggaaattcaggcttggctgcaagagcatcggcctgaaagcagtgaggaggcagcggccctggtggaagacttgacccagacccttcaggacagtgctgtagctgtctttgcttcccttccggtggaggtgaccagtttgtaatgaacttctggatctccagtcagatactatggaggagagagtgatggagggctgaggagaggcctcaggttgttatttggttgggaaccaatggggaccatcccagacacatgggtttgtctgtccctgacttctgcctctgagattgtctttgttggtctttgtttaataaacgccccgaccttcctcatgattgca

SEQ ID NO: 422479 - DNA, 406 bp, Homo sapiens
gggtttaagttaaatttttttaaaaactaaagtgactggcactaagtgaacttgagattatcctcagcttcaagttcctaagataagggctttcttaagctttcagatacatgtatcctctagatgtagacaataatgtcccatttctaagtcttttcctttgcttctccttaagttgattgtacttccaaatttgctgttattttttttcctaatactgtgatttatttgatctacagacaggaaccttgtctctgttgaagagcatcaagggaagattacatacgccttgaaaccgaagtgtgttgttaccgacttaatgtgcagtaactcctcagatatctgttaaggcacttcccagatgtgatgccagtcttcttacctgtactgaaagatgtttagctta

SEQ ID NO: 422480 - DNA, 926 bp, Homo sapiens
gcggccgcgctgagcccctagcccgccgggagcgccaggccggccaggcctgcgccgccgccgccgccgccgtcgccgccgcgccgaccatgtcggcagccaaggagaacccgtgcaggaaattccaggccaacatcttcaacaagagcaagtgtcagaactgcttcaagccccgcgagtcgcatctgctcaacgacgaggacctgacgcaggcaaaacccatttatggcggttggctgctcctggctccagatgggaccgactttgacaacccagtgcaccggtctcggaaatggcagcgacggttcttcatcctttacgagcacggcctcttgcgctacgccctggatgagatgatgtcttcccagtgactctccttggggcctggggaaaccacaagggagcttggattcattcacccattgctgccttgctgtgtgcctcagaggggctcagaggtggaaaataaatatgaaaaagcatccttgtcttctagaatctcgtcggctgctgggaagaccaaggggccagccatcgcagggagcataagcactgagacaggcacacgtgcctgcccggctatcgtagccaggctggcagccttgcaactccctggggaagaacaatctaggaacattctggggtgtggagcaggaagggagtgtcacatgcaaaaggcaggatcagccaaagcagaggggctgaagaagcagtgattcccccacctaatgtcagaagtaaaatcagttcatggtgaaaatttggggaaacaaaatcatgcagcaaaattgcctattaaaccccacacggaggtaaaaatcggttcatattgtggttatgtatctattctcttatgatgtgtatttatgtgcttatgtaagacctaaaaacaataatttttaaataaaccagttatttttaataag

SEQ ID NO: 422481 - DNA, 503 bp, Homo sapiens
gcggccgcgctgagcccctagcccgccgggagcgccaggccggccaggcctgcgccgccgccgccgccgccgtcgccgccgcgccgaccatgtcggcagccaaggagaacccgtgcaggaaattccaggccaacatcttcaacaagagcaagtgtcagaactgcttcaagccccgcgagtcgcatctgctcaacgacgaggacctgacgcagcaaaacacccacccccttgaaatgaaacgtggagctcacatatatgatgcacgaatgttctcatgttgaaggacaggaagaggaatggcatcagctatgagaccaccctgacccccacccgctgccccatcctacacccgaggtggcccctgaagcatgacctccagggatcttcacagtttgaagagccgctgatatactctaatacttgcagtaatattttttaatagaatgcaatattggatgtacacaaaaggatacaagcagcatacatttacaatataaatctaa

SEQ ID NO: 422482 - DNA, 3753 bp, Homo sapiens
gcggccgcgctgagcccctagcccgccgggagcgccaggccggccaggcctgcgccgccgccgccgccgccgtcgccgccgcgccgaccatgtcggcagccaaggagaacccgtgcaggaaattccaggccaacatcttcaacaagagcaagtgtcagaactgcttcaagccccgcgagtcgcatctgctcaacgacgaggacctgacgcaggcaaaacccatttatggcggttggctgctcctggctccagatgggaccgactttgacaacccagtgcaccggtctcggaaatggcagcgacggttcttcatcctttacgagcacggcctcttgcgctacgccctggatgagatgcccacgacccttcctcagggcaccatcaacatgaaccagtgcacagatgtggtggatggggagggccgcacgggccagaagttctccctgtgtattctgacgcctgagaaggagcatttcatccgggcggagaccaaggagatcgtcagtgggtggctggagatgctcatggtctatccccggaccaacaagcagaatcagaagaagaaacggaaagtggagccccccacaccacaggagcctgggcctgccaaggtggctgttaccagcagacagcagcagcagcagcagcagcatccccagtgctgagaaagtccccaccaccaagtccacactctggcaggaagaaatgaggaccaaggaccagccagatggcagcagcctgagtccagctcagagtcccagccagagccagcctcctgctgccagctccctgcgggaacctgggctagagagcaaagaagaggagagcgccatgagtagcgaccgcatggactgtggccgcaaagtccgggtggagagcggctacttctctctggagaagaccaaacaggacttgaaggctgaagaacagcagctgcccccgccgctctcccctcccagccccagcacccccaaccacaggaggtcccaggtgattgaaaagtttgaggccttggacattgagaaggcagagcacatggagaccaatgcagtggggccctcaccatccagcgacacacgccagggccgcagcgagaagagggcgttccctaggaagcggcccgacctgctgaatttcaagaaaggctggctgactaagcagtatgaggacggccagtggaagaaacactggtttgtcctcgccgatcaaagcctgagatactacagggattcagtggctgaggaggcagccgacttggatggagaaattgacttgtccgcatgttacgatgtcacagagtatccagttcagagaaactatggcttccagatacatacaaaggagggcgagtttaccctgtcggccatgacatctgggattcggcggaactggatccagaccatcatgaagcacgtgcacccgaccactgccccggatgtgaccagctcgttgccagaggaaaaaaacaagagcagctgctcttttgagacctgcccgaggcctactgagaagcaagaggcagagctgggggagccggaccctgagcagaagaggagccgcgcacgggagcggaggcgagagggccgctccaagacctttgactgggctgagttccgtcccatccagcaggccctggctcaggagcgggtgggcggcgtggggcctgctgacacccacgagcccctgcgccctgaggcggagcctggggagctggagcgggagcgtgcacggaggcgggaggagcgccgcaagcgcttcgggatgctcgacgccacagacgggccaggcactgaggatgcagccctgcgcatggaggtggaccggagcccagggctgcctatgagcgacctcaaaacgcataacgtccacgtggagattgagcagcggtggcatcaggtggagaccacacctctccgggaagagaagcaggtgcccatcgcccccgtccacctgtcttctgaagatgggggtgaccggctctccacacacgagctgacctctctgctcgagaaggagctggagcagagccagaaggaggcctcagaccttctggagcagaaccggctcctgcaggaccagctgagggtggccctgggccgggagcagagcgcccgtgagggctacgtgctgcaggccacgtgcgagcgagggtttgcagcaatggaagaaacgcaccagaagaagattgaagatctccagaggcagcaccagcgggagctagagaaacttcgagaagagaaagaccgcctcctagccgaggagacagcggccaccatctcagccatcgaagccatgaagaacgcccaccgggaggaaatggagcgggagctggagaagagccagcggtcccagatcagcagcgtcaactcggatgttgaggccctgcggcgccagtacctggaggagctgcagtcggtgcagcgggaactggaggtcctctcggagcagtactcgcagaagtgcctggagaatgcccatctggcccaggcgctggaggccgagcggcaggccctgcggcagtgccagcgtgagaaccaggagctcaatgcccacaaccaggagctgaacaaccgcctggctgcagagatcacacggttgcggacgctgctgactggggacggcggtggggaggccactgggtcaccccttgcacagggcaaggatgcctatgaactagaggtcttattgcgggtaaaggaatcggaaatacagtacctgaaacaggagattagctccctcaaggatgagctgcagacggcactgcgggacaagaagtacgcaagtgacaagtacaaagacatctacacagagctcagcatcgcgaaggctaaggctgactgtgacatcagcaggttgaaggagcagctcaaggctgcaacggaagcactgggggagaagtcccctgacagtgccacggtgtccggatatgatataatgaaatctaaaagcaaccctgacttcttgaagaaagacagatcctgtgtcacccggcaactcagaaacatcaggtccaagagtctgaaggaaggcctgacggtgcaagaacggttgaagctctttgaatccagggacttgaagaaagactaggtgtgtcccatccaagttgagcacgcgccttccccagcttgcagcagcacaccccaagcgctgcttttcacctgtacctttgttttattattattattattattgctgttgttgtcatcgttaactgtgggcatggaatgcgtgaggctggcttctgggttgtccacaccactctctgctgtgttgacttcctgttgtcttcatcaaagcttttttccgtggtattctaaaattaggccagcagtgggggctgggagggcatctgtgttagtcctttcctggctgtgacccgccacactcactgtcagtattaaggcccagcagcctgttgataagctaccctgtctcaccatgtgctggtgtggaaacggggcccagccagcacgcctcaaggtagatggaatccccactggtcagagaaaaagctatgcggacactccagcttggcctgggtcacagcactgactcctcacccgctagtctggctgttaagaggagaaagtgcactgccttccagcccaggaggaggacagcattttgtatttgttccactgatgcagcttagaaccacacccctgagagtcgtggcaaacctttcacaacctggaaaatgttgaaagcaaccattcctatttttgtttgttttttattaaatcttgcacaaaa

SEQ ID NO: 422483 - DNA, 3601 bp, Homo sapiens
gcggccgcgctgagcccctagcccgccgggagcgccaggccggccaggcctgcgccgccgccgccgccgccgtcgccgccgcgccgaccatgtcggcagccaaggagaacccgtgcaggaaattccaggccaacatcttcaacaagagcaagtgtcagaactgcttcaagccccgcgagtcgcatctgctcaacgacgaggacctgacgcaggcaaaacccatttatggcggttggctgctcctggctccagatgggaccgactttgacaacccagtgcaccggtctcggaaatggcagcgacggttcttcatcctttacgagcacggcctcttgcgctacgccctggatgagatggtggctggagatgctcatggtctatccccggaccaacaagcagaatcagaagaagaaacggaaagtggagccccccacaccacaggagcctgggcctgccaaggtggctgttaccagcagacagcagcagcagcagcagcagcatccccagtgctgagaaagtccccaccaccaagtccacactctggcaggaagaaatgaggaccaaggaccagccagatggcagcagcctgagtccagctcagagtcccagccagagccagcctcctgctgccagctccctgcgggaacctgggctagagagcaaagaagaggagagcgccatgagtagcgaccgcatggactgtggccgcaaagtccgggtggagagcggctacttctctctggagaagaccaaacaggacttgaaggctgaagaacagcagctgcccccgccgctctcccctcccagccccagcacccccaaccacaggaggtcccaggtgattgaaaagtttgaggccttggacattgagaaggcagagcacatggagaccaatgcagtggggccctcaccatccagcgacacacgccagggccgcagcgagaagagggcgttccctaggaagcggcccgacctgctgaatttcaagaaaggctggctgactaagcagtatgaggacggccagtggaagaaacactggtttgtcctcgccgatcaaagcctgagatactacagggattcagtggctgaggaggcagccgacttggatggagaaattgacttgtccgcatgttacgatgtcacagagtatccagttcagagaaactatggcttccagatacatacaaaggagggcgagtttaccctgtcggccatgacatctgggattcggcggaactggatccagaccatcatgaagcacgtgcacccgaccactgccccggatgtgaccagctcgttgccagaggaaaaaaacaagagcagctgctcttttgagacctgcccgaggcctactgagaagcaagaggcagagctgggggagccggaccctgagcagaagaggagccgcgcacgggagcggaggcgagagggccgctccaagacctttgactgggctgagttccgtcccatccagcaggccctggctcaggagcgggtgggcggcgtggggcctgctgacacccacgagcccctgcgccctgaggcggagcctggggagctggagcgggagcgtgcacggaggcgggaggagcgccgcaagcgcttcgggatgctcgacgccacagacgggccaggcactgaggatgcagccctgcgcatggaggtggaccggagcccagggctgcctatgagcgacctcaaaacgcataacgtccacgtggagattgagcagcggtggcatcaggtggagaccacacctctccgggaagagaagcaggtgcccatcgcccccgtccacctgtcttctgaagatgggggtgaccggctctccacacacgagctgacctctctgctcgagaaggagctggagcagagccagaaggaggcctcagaccttctggagcagaaccggctcctgcaggaccagctgagggtggccctgggccgggagcagagcgcccgtgagggctacgtgctgcaggccacgtgcgagcgagggtttgcagcaatggaagaaacgcaccagaagaagattgaagatctccagaggcagcaccagcgggagctagagaaacttcgagaagagaaagaccgcctcctagccgaggagacagcggccaccatctcagccatcgaagccatgaagaacgcccaccgggaggaaatggagcgggagctggagaagagccagcggtcccagatcagcagcgtcaactcggatgttgaggccctgcggcgccagtacctggaggagctgcagtcggtgcagcgggaactggaggtcctctcggagcagtactcgcagaagtgcctggagaatgcccatctggcccaggcgctggaggccgagcggcaggccctgcggcagtgccagcgtgagaaccaggagctcaatgcccacaaccaggagctgaacaaccgcctggctgcagagatcacacggttgcggacgctgctgactggggacggcggtggggaggccactgggtcaccccttgcacagggcaaggatgcctatgaactagaggtcttattgcgggtaaaggaatcggaaatacagtacctgaaacaggagattagctccctcaaggatgagctgcagacggcactgcgggacaagaagtacgcaagtgacaagtacaaagacatctacacagagctcagcatcgcgaaggctaaggctgactgtgacatcagcaggttgaaggagcagctcaaggctgcaacggaagcactgggggagaagtcccctgacagtgccacggtgtccggatatgatataatgaaatctaaaagcaaccctgacttcttgaagaaagacagatcctgtgtcacccggcaactcagaaacatcaggtccaagagtctgaaggaaggcctgacggtgcaagaacggttgaagctctttgaatccagggacttgaagaaagactaggtgtgtcccatccaagttgagcacgcgccttccccagcttgcagcagcacaccccaagcgctgcttttcacctgtacctttgttttattattattattattattgctgttgttgtcatcgttaactgtgggcatggaatgcgtgaggctggcttctgggttgtccacaccactctctgctgtgttgacttcctgttgtcttcatcaaagcttttttccgtggtattctaaaattaggccagcagtgggggctgggagggcatctgtgttagtcctttcctggctgtgacccgccacactcactgtcagtattaaggcccagcagcctgttgataagctaccctgtctcaccatgtgctggtgtggaaacggggcccagccagcacgcctcaaggtagatggaatccccactggtcagagaaaaagctatgcggacactccagcttggcctgggtcacagcactgactcctcacccgctagtctggctgttaagaggagaaagtgcactgccttccagcccaggaggaggacagcattttgtatttgttccactgatgcagcttagaaccacacccctgagagtcgtggcaaacctttcacaacctggaaaatgttgaaagcaaccattcctatttttgtttgttttttattaaatcttgcacaaaa

SEQ ID NO: 422484 - DNA, 3867 bp, Homo sapiens
gcggccgcgctgagcccctagcccgccgggagcgccaggccggccaggcctgcgccgccgccgccgccgccgtcgccgccgcgccgaccatgtcggcagccaaggagaacccgtgcaggaaattccaggccaacatcttcaacaagagcaagtgtcagaactgcttcaagccccgcgagtcgcatctgctcaacgacgaggacctgacgcaggcaaaacccatttatggcggttggctgctcctggctccagatgggaccgactttgacaacccagtgcaccggtctcggaaatggcagcgacggttcttcatcctttacgagcacggcctcttgcgctacgccctggatgagatgcccacgacccttcctcagggcaccatcaacatgaaccagtgcacagatgtggtggatggggagggccgcacgggccagaagttctccctgtgtattctgacgcctgagaaggagcatttcatccgggcggagaccaaggagatcgtcagtgggtggctggagatgctcatggtctatccccggaccaacaagcagaatcagaagaagaaacggaaagtggagccccccacaccacaggagcctgggcctgccaaggtggctgttaccagcagacagcagcagcagcagcagcagcatccccagtgctgagaaagtccccaccaccaagtccacactctggcaggaagaaatgaggaccaaggaccagccagatggcagcagcctgagtccagctcagagtcccagccagagccagcctcctgctgccagctccctgcgggaacctgggctagagagcaaagaagaggagagcgccatgagtagcgaccgcatggactgtggccgcaaagtccgggtggagagcggctacttctctctggagaagaccaaacaggacttgaaggctgaagaacagcagctgcccccgccgctctcccctcccagccccagcacccccaaccacaggaggtcccaggtgattgaaaagtttgaggccttggacattgagaaggcagagcacatggagaccaatgcagtggggccctcaccatccagcgacacacgccagggccgcagcgagaagagggcgttccctaggaagcgggacttcaccaatgaagcccccccagctcctctcccagacgcctcggcttcccccctgtctccacaccgaagagccaagtcactggacaggaggtccacggagccctccgtgacgcccgacctgctgaatttcaagaaaggctggctgactaagcagtatgaggacggccagtggaagaaacactggtttgtcctcgccgatcaaagcctgagatactacagggattcagtggctgaggaggcagccgacttggatggagaaattgacttgtccgcatgttacgatgtcacagagtatccagttcagagaaactatggcttccagatacatacaaaggagggcgagtttaccctgtcggccatgacatctgggattcggcggaactggatccagaccatcatgaagcacgtgcacccgaccactgccccggatgtgaccagctcgttgccagaggaaaaaaacaagagcagctgctcttttgagacctgcccgaggcctactgagaagcaagaggcagagctgggggagccggaccctgagcagaagaggagccgcgcacgggagcggaggcgagagggccgctccaagacctttgactgggctgagttccgtcccatccagcaggccctggctcaggagcgggtgggcggcgtggggcctgctgacacccacgagcccctgcgccctgaggcggagcctggggagctggagcgggagcgtgcacggaggcgggaggagcgccgcaagcgcttcgggatgctcgacgccacagacgggccaggcactgaggatgcagccctgcgcatggaggtggaccggagcccagggctgcctatgagcgacctcaaaacgcataacgtccacgtggagattgagcagcggtggcatcaggtggagaccacacctctccgggaagagaagcaggtgcccatcgcccccgtccacctgtcttctgaagatgggggtgaccggctctccacacacgagctgacctctctgctcgagaaggagctggagcagagccagaaggaggcctcagaccttctggagcagaaccggctcctgcaggaccagctgagggtggccctgggccgggagcagagcgcccgtgagggctacgtgctgcaggccacgtgcgagcgagggtttgcagcaatggaagaaacgcaccagaagaagattgaagatctccagaggcagcaccagcgggagctagagaaacttcgagaagagaaagaccgcctcctagccgaggagacagcggccaccatctcagccatcgaagccatgaagaacgcccaccgggaggaaatggagcgggagctggagaagagccagcggtcccagatcagcagcgtcaactcggatgttgaggccctgcggcgccagtacctggaggagctgcagtcggtgcagcgggaactggaggtcctctcggagcagtactcgcagaagtgcctggagaatgcccatctggcccaggcgctggaggccgagcggcaggccctgcggcagtgccagcgtgagaaccaggagctcaatgcccacaaccaggagctgaacaaccgcctggctgcagagatcacacggttgcggacgctgctgactggggacggcggtggggaggccactgggtcaccccttgcacagggcaaggatgcctatgaactagaggtcttattgcgggtaaaggaatcggaaatacagtacctgaaacaggagattagctccctcaaggatgagctgcagacggcactgcgggacaagaagtacgcaagtgacaagtacaaagacatctacacagagctcagcatcgcgaaggctaaggctgactgtgacatcagcaggttgaaggagcagctcaaggctgcaacggaagcactgggggagaagtcccctgacagtgccacggtgtccggatatgatataatgaaatctaaaagcaaccctgacttcttgaagaaagacagatcctgtgtcacccggcaactcagaaacatcaggtccaagagtctgaaggaaggcctgacggtgcaagaacggttgaagctctttgaatccagggacttgaagaaagactaggtgtgtcccatccaagttgagcacgcgccttccccagcttgcagcagcacaccccaagcgctgcttttcacctgtacctttgttttattattattattattattgctgttgttgtcatcgttaactgtgggcatggaatgcgtgaggctggcttctgggttgtccacaccactctctgctgtgttgacttcctgttgtcttcatcaaagcttttttccgtggtattctaaaattaggccagcagtgggggctgggagggcatctgtgttagtcctttcctggctgtgacccgccacactcactgtcagtattaaggcccagcagcctgttgataagctaccctgtctcaccatgtgctggtgtggaaacggggcccagccagcacgcctcaaggtagatggaatccccactggtcagagaaaaagctatgcggacactccagcttggcctgggtcacagcactgactcctcacccgctagtctggctgttaagaggagaaagtgcactgccttccagcccaggaggaggacagcattttgtatttgttccactgatgcagcttagaaccacacccctgagagtcgtggcaaacctttcacaacctggaaaatgttgaaagcaaccattcctatttttgtttgttttttattaaatcttgcacaaaa

SEQ ID NO: 422485 - DNA, 7674 bp, Homo sapiens
gcggccgcgctgagcccctagcccgccgggagcgccaggccggccaggcctgcgccgccgccgccgccgccgtcgccgccgcgccgaccatgtcggcagccaaggagaacccgtgcaggaaattccaggccaacatcttcaacaagagcaagtgtcagaactgcttcaagccccgcgagtcgcatctgctcaacgacgaggacctgacgcaggcaaaacccatttatggcggttggctgctcctggctccagatgggaccgactttgacaacccagtgcaccggtctcggaaatggcagcgacggttcttcatcctttacgagcacggcctcttgcgctacgccctggatgagatgcccacgacccttcctcagggcaccatcaacatgaaccagtgcacagatgtggtggatggggagggccgcacgggccagaagttctccctgtgtattctgacgcctgagaaggagcatttcatccgggcggagaccaaggagatcgtcagtgggtggctggagatgctcatggtctatccccggaccaacaagcagaatcagaagaagaaacggaaagtggagccccccacaccacaggagcctgggcctgccaaggtggctgttaccagcagacagcagcagcagcagcagcagcatccccagtgctgagaaagtccccaccaccaagtccacactctggcaggaagaaatgaggaccaaggaccagccagatggcagcagcctgagtccagctcagagtcccagccagagccagcctcctgctgccagctccctgcgggaacctgggctagagagcaaagaagaggagagcgccatgagtagcgaccgcatggactgtggccgcaaagtccgggtggagagcggctacttctctctggagaagaccaaacaggacttgaaggctgaagaacagcagctgcccccgccgctctcccctcccagccccagcacccccaaccacaggaggtcccaggtgattgaaaagtttgaggccttggacattgagaaggcagagcacatggagaccaatgcagtggggccctcaccatccagcgacacacgccagggccgcagcgagaagagggcgttccctaggaagcgggacttcaccaatgaagcccccccagctcctctcccagacgcctcggcttcccccctgtctccacaccgaagagccaagtcactggacaggaggtccacggagccctccgtgacgcccgacctgctgaatttcaagaaaggctggctgactaagcagtatgaggacggccagtggaagaaacactggtttgtcctcgccgatcaaagcctgagatactacagggattcagtggctgaggaggcagccgacttggatggagaaattgacttgtccgcatgttacgatgtcacagagtatccagttcagagaaactatggcttccagatacatacaaaggagggcgagtttaccctgtcggccatgacatctgggattcggcggaactggatccagaccatcatgaagcacgtgcacccgaccactgccccggatgtgaccagctcgttgccagaggaaaaaaacaagagcagctgctcttttgagacctgcccgaggcctactgagaagcaagaggcagagctgggggagccggaccctgagcagaagaggagccgcgcacgggagcggaggcgagagggccgctccaagacctttgactgggctgagttccgtcccatccagcaggccctggctcaggagcgggtgggcggcgtggggcctgctgacacccacgagcccctgcgccctgaggcggagcctggggagctggagcgggagcgtgcacggaggcgggaggagcgccgcaagcgcttcgggatgctcgacgccacagacgggccaggcactgaggatgcagccctgcgcatggaggtggaccggagcccagggctgcctatgagcgacctcaaaacgcataacgtccacgtggagattgagcagcggtggcatcaggtggagaccacacctctccgggaagagaagcaggtgcccatcgcccccgtccacctgtcttctgaagatgggggtgaccggctctccacacacgagctgacctctctgctcgagaaggagctggagcagagccagaaggaggcctcagaccttctggagcagaaccggctcctgcaggaccagctgagggtggccctgggccgggagcagagcgcccgtgagggctacgtgctgcagactgaagtggccgcctccccatcgggtgcctggcagaggctccatagagtcaaccaagaccttcaaagtgagcttgaagcccagtgccagcgccaggagctgattacacaccagattcagaccctgaagcgtagctatggggaggccaaggacacgatccggcaccacgaggctgagatccggagccttcaggcacggctcagcaatgcggccgctgagctagccatcaaggagcaggcgctggccaagctcaagggcgacctgaagcgggagcagggccgggtccgcgagcagctggaggagcggcaacacagcgaggcggcgctgagcagccagctgagggctagcgagcagaagctcaagagtgctgaggccctgctgctggagaagacgcaggagctacggggcctggagacacagcaggcgctgcagcgggaccggcagaaggaggtccagaggctgcaggagcgcattgccgacctcagccagcaactgggcgccagtgagcaggcgcagcggctgatggaggagaagctgcagagaaactatgagctgctgctggagagctgtgagaaggagaagcaggcattgctgcagaacctaaaggaagtggaagacaaggccagcgcctatgaggaccagctgcagggtcaggcacagcaggtggagaccctgcagaaggagaagctgagcgccactttcgagggcagtgagcaggtgcaccagctggaggagcagctggaggcacgagaggccagcgtgcgcaggctcgcagagcacgtgcagagcctctgtgacgagcgggacctcctcagacagcggttccaggagctgacagagcgcgtggccacgtccgacgaggatgtggctgagctccgggaaaagctgaggagaagagaggctgacaaccagagcctggagcactcctaccagagggtctccagccagctgcagagcatgcacactctgctgagagagaaggaggaagagctggagcgcattaaggaagcacatgagaaggttctggagaagaaggagcaggacctcaatgaggctttggttaaaatggttgccttggggagcagcttagaggaaacagaaattaagctccaggcaaaagaagagattttaaggaaatttgcaagtgaatctccaaaggacatggaagagccacggagtacccctgaagagacagaaagggatggcactttgctcccaggccaaccagtccaagccactagggcacctctaggcctcccacacacaaggctcgaggatgaggacgaggacctgggggctcctccgggggaagagtacggtgatggcagccccagtagggaagacagcatggtgcccccaaagtcagtggaagtgcttgacagggagggccatcagcagggcacagccaaactcgaccaaggggcacctggtgttaaaaggcaaagaatccggttctccacaatccagtgccaaagatacattcaccccgaagggtctgagaagacctggaccagcagcacatcttccgacaccagccaggaccggtcaccctcggaagaaagcatgtcctcagagcctgcacccagtgtactgcctgcaactggcgactctgacacgtacctctccatcatccactccctggagaccaagctctacgtcacagaggaaaagctcaaagacgtgaccgtgaggctggagagccagcagggtcagagccgtgaggcactgctcgcactgcaccaccagtgggcgggcaccgaggcccagctgcgtgagcagctccgcgccagcctgctccaggttggcgcactggcctcccagctggagcaggagaggcaggagagggccaggagggttgaagggcatgttggagagcttggggacttccaggtcaagaatagtcaggccctgatgtgcctggaaaattgccgagaacaactgagatctctgcctagggccagccaggaggatgagcaggacgcacgcgcagcctccctggccagtgtggagagtgcactcgtcagcgccatccaagccctgcagcactggccggccccagcccatggcggggcccgtgcacagctggagacaggtggcaccgaggagaatgggaagcctgcctccctgcagcagtgctcccagtctgagttgacagagcaggagcaggtgaggcttctttctgaccagattgctctggaggcctcgctgatcagccagatagcagattccctgaagaacacaacatcagatgtctcccgaatgctccatgagatttcttggtcaggacagccaccgatggaatctgctggggcccccgtagacacctgggccaggaaggtcctagtggatggtgagttctggagccaggttgagtctctgaggaagcacttggggacactgggaggagaggcagtcggtgcctcaggagacgggcagcaaagcatcccacagggcctggcccccatcctggccaatgccacatgggtcagggcagagctcagctttgccacacagtcagtgagggagtcgttccaccgcaggctacagagcatccaggagaccctgcggggcacccagacggccctgcggcagcacaaatgcctgctgagggaaatcctgggagcctaccaaaccccagactttgaaagagtgatgcagcaggtcttggaagccctcaggcttccagcgggccatgaagatggtgttcagctgtcctgggacctgagccccttaggagaagtcctgggccgagactcagacagctctcaggagcccttcgatgtgtctgaccagagccctggggcctttgttgctattcaggaggagcttgcccagcagctgaaggagaaggccagcctcttagaggagatagcggctgccttaccatctctgccacctgtggaatcgctgagagattgccagaagcttctccaggtgtcccagagtctctcgtataacacttgtttgggaggcctcggtcagtattcttcattgttggttcaggatgccattattcaggcccaggtttgctatgcgtcctgcagaatccggctagaatatgagaaggagctccagctctgcaaggagtcctggcaaacccgggagccctcctgctcagagcaggcacaggcagcccgggccctgagggaggagtatgaggagcttctccgcaagcagaagagcgagtacctggatgtgatcgccattgttgaaagggagaatgcagagctcaaggccaaggccgcccagctagaccatcagcagcagtgtctggaggatgcagagagcaagcacagcatgagcatgttcaccctgcggggcaggtatgaggaggagattcggtgtgtggtggagcagctgaccaggaccgagagcacactgcaggctgagcgcagccgggtcctgagccagctggatgcctcggtcagagacaggcaggacatggagaggcatcatggtgagcagatacagaccctggaggacaggttccagctcaaggtccgggagctgcagacgatccacgaggaggagctgaggaccctgcaggagcactactcgcagagcctgaggtgccttcaggacaccctctgcctccaccaggggccacaccccaaggccctgccagcccctgcccccaactggcaggccacccagggagaggctgactccatgacggggctgagggagcgcatccaggagctggaggcccagatggatgtcatgcgggaggagctgggacacaaggacctggagggcgacgcggccacactgcgtgagaagtaccagagggacttggagagccttaaggccacgtgcgagcgagggtttgcagcaatggaagaaacgcaccagaagaagattgaagatctccagaggcagcaccagcgggagctagagaaacttcgagaagagaaagaccgcctcctagccgaggagacagcggccaccatctcagccatcgaagccatgaagaacgcccaccgggaggaaatggagcgggagctggagaagagccagcggtcccagatcagcagcgtcaactcggatgttgaggccctgcggcgccagtacctggaggagctgcagtcggtgcagcgggaactggaggtcctctcggagcagtactcgcagaagtgcctggagaatgcccatctggcccaggcgctggaggccgagcggcaggccctgcggcagtgccagcgtgagaaccaggagctcaatgcccacaaccaggagctgaacaaccgcctggctgcagagatcacacggttgcggacgctgctgactggggacggcggtggggaggccactgggtcaccccttgcacagggcaaggatgcctatgaactagaggtcttattgcgggtaaaggaatcggaaatacagtacctgaaacaggagattagctccctcaaggatgagctgcagacggcactgcgggacaagaagtacgcaagtgacaagtacaaagacatctacacagagctcagcatcgcgaaggctaaggctgactgtgacatcagcaggttgaaggagcagctcaaggctgcaacggaagcactgggggagaagtcccctgacagtgccacggtgtccggatatgatataatgaaatctaaaagcaaccctgacttcttgaagaaagacagatcctgtgtcacccggcaactcagaaacatcaggtccaagagtctgaaggaaggcctgacggtgcaagaacggttgaagctctttgaatccagggacttgaagaaagactaggtgtgtcccatccaagttgagcacgcgccttccccagcttgcagcagcacaccccaagcgctgcttttcacctgtacctttgttttattattattattattattgctgttgttgtcatcgttaactgtgggcatggaatgcgtgaggctggcttctgggttgtccacaccactctctgctgtgttgacttcctgttgtcttcatcaaagcttttttccgtggtattctaaaattaggccagcagtgggggctgggagggcatctgtgttagtcctttcctggctgtgacccgccacactcactgtcagtattaaggcccagcagcctgttgataagctaccctgtctcaccatgtgctggtgtggaaacggggcccagccagcacgcctcaaggtagatggaatccccactggtcagagaaaaagctatgcggacactccagcttggcctgggtcacagcactgactcctcacccgctagtctggctgttaagaggagaaagtgcactgccttccagcccaggaggaggacagcattttgtatttgttccactgatgcagcttagaaccacacccctgagagtcgtggcaaacctttcacaacctggaaaatgttgaaagcaaccattcctatttttgtttgttttttattaaatcttgcacaaaa

SEQ ID NO: 422486 - DNA, 7737 bp, Homo sapiens
gcggccgcgctgagcccctagcccgccgggagcgccaggccggccaggcctgcgccgccgccgccgccgccgtcgccgccgcgccgaccatgtcggcagccaaggagaacccgtgcaggaaattccaggccaacatcttcaacaagagcaagtgtcagaactgcttcaagccccgcgagtcgcatctgctcaacgacgaggacctgacgcaggcaaaacccatttatggcggttggctgctcctggctccagatgggaccgactttgacaacccagtgcaccggtctcggaaatggcagcgacggttcttcatcctttacgagcacggcctcttgcgctacgccctggatgagatgcccacgacccttcctcagggcaccatcaacatgaaccagtgcacagatgtggtggatggggagggccgcacgggccagaagttctccctgtgtattctgacgcctgagaaggagcatttcatccgggcggagaccaaggagatcgtcagtgggtggctggagatgctcatggtctatccccggaccaacaagcagaatcagaagaagaaacggaaagtggagccccccacaccacaggagcctgggcctgccaaggtggctgttaccagcagacagcagcagcagcagcagcagcatccccagtgctgagaaagtccccaccaccaagtccacactctggcaggaagaaatgaggaccaaggaccagccagatggcagcagcctgagtccagctcagagtcccagccagagccagcctcctgctgccagctccctgcgggaacctgggctagagagcaaagaagaggagagcgccatgagtagcgaccgcatggactgtggccgcaaagtccgggtggagagcggctacttctctctggagaagaccaaacaggacttgaaggctgaagaacagcagctgcccccgccgctctcccctcccagccccagcacccccaaccacaggaggtcccaggtgattgaaaagtttgaggccttggacattgagaaggcagagcacatggagaccaatgcagtggggccctcaccatccagcgacacacgccagggccgcagcgagaagagggcgttccctaggaagcgggacttcaccaatgaagcccccccagctcctctcccagacgcctcggcttcccccctgtctccacaccgaagagccaagtcactggacaggaggtccacggagccctccgtgacgcccgacctgctgaatttcaagaaaggctggctgactaagcagtatgaggacggccagtggaagaaacactggtttgtcctcgccgatcaaagcctgagatactacagggattcagtggctgaggaggcagccgacttggatggagaaattgacttgtccgcatgttacgatgtcacagagtatccagttcagagaaactatggcttccagatacatacaaaggagggcgagtttaccctgtcggccatgacatctgggattcggcggaactggatccagaccatcatgaagcacgtgcacccgaccactgccccggatgtgaccagctcgttgccagaggaaaaaaacaagagcagctgctcttttgagacctgcccgaggcctactgagaagcaagaggcagagctgggggagccggaccctgagcagaagaggagccgcgcacgggagcggaggcgagagggccgctccaagacctttgactgggctgagttccgtcccatccagcaggccctggctcaggagcgggtgggcggcgtggggcctgctgacacccacgagcccctgcgccctgaggcggagcctggggagctggagcgggagcgtgcacggaggcgggaggagcgccgcaagcgcttcgggatgctcgacgccacagacgggccaggcactgaggatgcagccctgcgcatggaggtggaccggagcccagggctgcctatgagcgacctcaaaacgcataacgtccacgtggagattgagcagcggtggcatcaggtggagaccacacctctccgggaagagaagcaggtgcccatcgcccccgtccacctgtcttctgaagatgggggtgaccggctctccacacacgagctgacctctctgctcgagaaggagctggagcagagccagaaggaggcctcagaccttctggagcagaaccggctcctgcaggaccagctgagggtggccctgggccgggagcagagcgcccgtgagggctacgtgctgcagactgaagtggccgcctccccatcgggtgcctggcagaggctccatagagtcaaccaagaccttcaaagtgagcttgaagcccagtgccagcgccaggagctgattacacaccagattcagaccctgaagcgtagctatggggaggccaaggacacgatccggcaccacgaggctgagatccggagccttcaggcacggctcagcaatgcggccgctgagctagccatcaaggagcaggcgctggccaagctcaagggcgacctgaagcgggagcagggccgggtccgcgagcagctggaggagcggcaacacagcgaggcggcgctgagcagccagctgagggctagcgagcagaagctcaagagtgctgaggccctgctgctggagaagacgcaggagctacggggcctggagacacagcaggcgctgcagcgggaccggcagaaggaggtccagaggctgcaggagcgcattgccgacctcagccagcaactgggcgccagtgagcaggcgcagcggctgatggaggagaagctgcagagaaactatgagctgctgctggagagctgtgagaaggagaagcaggcattgctgcagaacctaaaggaagtggaagacaaggccagcgcctatgaggaccagctgcagggtcaggcacagcaggtggagaccctgcagaaggagaagctgagcgccactttcgagggcagtgagcaggtgcaccagctggaggagcagctggaggcacgagaggccagcgtgcgcaggctcgcagagcacgtgcagagcctctgtgacgagcgggacctcctcagacagcggttccaggagctgacagagcgcgtggccacgtccgacgaggatgtggctgagctccgggaaaagctgaggagaagagaggctgacaaccagagcctggagcactcctaccagagggtctccagccagctgcagagcatgcacactctgctgagagagaaggaggaagagctggagcgcattaaggaagcacatgagaaggttctggagaagaaggagcaggacctcaatgaggctttggttaaaatggttgccttggggagcagcttagaggaaacagaaattaagctccaggcaaaagaagagattttaaggaaatttgcaagtgaatctccaaaggacatggaagagccacggagtacccctgaagagacagaaagggatggcactttgctcccaggccaaccagtccaagccactagggcacctctaggcctcccacacacaaggctcgaggatgaggacgaggacctgggggctcctccgggggaagagtacggtgatggcagccccagtagggaagacagcatggtgcccccaaagtcagtggaagtgcttgacagggagggccatcagcagggcacagccaaactcgaccaaggggcacctggtgttaaaaggcaaagaatccggttctccacaatccagtgccaaagatacattcaccccgaagggtctgagaagacctggaccagcagcacatcttccgacaccagccaggaccggtcaccctcggaagaaagcatgtcctcagagcctgcacccagtgtactgcctgcaactggcgactctgacacgtacctctccatcatccactccctggagaccaagctctacgtcacagaggaaaagctcaaagacgtgaccgtgaggctggagagccagcagggtcagagccgtgaggcactgctcgcactgcaccaccagtgggcgggcaccgaggcccagctgcgtgagcagctccgcgccagcctgctccaggttggcgcactggcctcccagctggagcaggagaggcaggagagggccaggagggttgaagggcatgttggagagcttggggacttccaggtcaagaatagtcaggccctgatgtgcctggaaaattgccgagaacaactgagatctctgcctagggccagccaggaggatgagcaggacgcacgcgcagcctccctggccagtgtggagagtgcactcgtcagcgccatccaagccctgcagcactggccggccccagcccatggcggggcccgtgcacagctggagacaggtggcaccgaggagaatgggaagcctgcctccctgcagcagtgctcccagtctgagttgacagagcaggagcaggtgaggcttctttctgaccagattgctctggaggcctcgctgatcagccagatagcagattccctgaagaacacaacatcagatgtctcccgaatgctccatgagatttcttggtcaggacagccaccgatggaatctgctggggcccccgtagacacctgggccaggaaggtcctagtggatggtgagttctggagccaggttgagtctctgaggaagcacttggggacactgggaggagaggcagtcggtgcctcaggagacgggcagcaaagcatcccacagggcctggcccccatcctggccaatgccacatgggtcagggcagagctcagctttgccacacagtcagtgagggagtcgttccaccgcaggctacagagcatccaggagaccctgcggggcacccagacggccctgcggcagcacaaatgcctgctgagggaaatcctgggagcctaccaaaccccagactttgaaagagtgatgcagcaggtcttggaagccctcaggcttccagcgggccatgaagatggtgttcagctgtcctgggacctgagccccttaggagaagtcctgggccgagactcagacagctctcaggagcccttcgatgtgtctgaccagagccctggggcctttgttgctattcaggaggagcttgcccagcagctgaaggagaaggccagcctcttagaggagatagcggctgccttaccatctctgccacctgtggaatcgctgagagattgccagaagcttctccaggtgtcccagagtctctcgtataacacttgtttgggaggcctcggtcagtattcttcattgttggttcaggatgccattattcaggcccaggtttgctatgcgtcctgcagaatccggctagaatatgagaaggagctccagctctgcaaggagtcctggcaaacccgggagccctcctgctcagagcaggcacaggcagcccgggccctgagggaggagtatgaggagcttctccgcaagcagaagagcgagtacctggatgtgatcgccattgttgaaagggagaatgcagagctcaaggccaaggccgcccagctagaccatcagcagcagtgtctggaggatgcagagagcaagcacagcatgagcatgttcaccctgcggggcaggtatgaggaggagattcggtgtgtggtggagcagctgaccaggaccgagagcacactgcaggctgagcgcagccgggtcctgagccagctggatgcctcggtcagagacaggcaggacatggagaggcatcatggtgagcagatacagaccctggaggacaggttccagctcaaggtccgggagctgcagacgatccacgaggaggagctgaggaccctgcaggagcactactcgcagagcctgaggtgccttcaggacaccctctgcctccaccaggggccacaccccaaggccctgccagcccctgcccccaactggcaggccacccagggagaggctgactccatgacggggctgagggagcgcatccaggagctggaggcccagatggatgtcatgcgggaggagctgggacacaaggacctggagggcgacgcggccacactgcgtgagaagtaccagagggacttggagagccttaaggccacgtgcgagcgagggtttgcagcaatggaagaaacgcaccagaagaagattgaagatctccagaggcagcaccagcgggagctagagaaacttcgagaagagaaagaccgcctcctagccgaggagacagcggccaccatctcagccatcgaagccatgaagaacgcccaccgggaggaaatggagcgggagctggagaagagccagcggtcccagatcagcagcgtcaactcggatgttgaggccctgcggcgccagtacctggaggagctgcagtcggtgcagcgggaactggaggtcctctcggagcagtactcgcagaagtgcctggagaatgcccatctggcccaggcgctggaggccgagcggcaggccctgcggcagtgccagcgtgagaaccaggagctcaatgcccacaaccaggagctgaacaaccgcctggctgcagagatcacacggttgcggacgctgctgactggggacggcggtggggaggccactgggtcaccccttgcacagggcaaggatgcctatgaactagaggtcttattgcgggtaaaggaatcggaaatacagtacctgaaacaggagattagctccctcaaggatgagctgcagacggcactgcgggacaagaagtacgcaagtgacaagtacaaagacatctacacagagctcagcatcgcgaaggctaaggctgactgtgacatcagcaggttgaaggagcagctcaaggctgcaacggaagcactgggggagaagtcccctgacagtgccacggtgtccggatatgatataatgaaatctaaaagcaaccctgacttcttgaagaaagacagatcctgtgtcacccggcaactcagaaacatcaggtccaagtccgtaattgagcaggtctcgtgggatacctgaaatgcacccgcttcccggcccatgcaggagagtctgaaggaaggcctgacggtgcaagaacggttgaagctctttgaatccagggacttgaagaaagactaggtgtgtcccatccaagttgagcacgcgccttccccagcttgcagcagcacaccccaagcgctgcttttcacctgtacctttgttttattattattattattattgctgttgttgtcatcgttaactgtgggcatggaatgcgtgaggctggcttctgggttgtccacaccactctctgctgtgttgacttcctgttgtcttcatcaaagcttttttccgtggtattctaaaattaggccagcagtgggggctgggagggcatctgtgttagtcctttcctggctgtgacccgccacactcactgtcagtattaaggcccagcagcctgttgataagctaccctgtctcaccatgtgctggtgtggaaacggggcccagccagcacgcctcaaggtagatggaatccccactggtcagagaaaaagctatgcggacactccagcttggcctgggtcacagcactgactcctcacccgctagtctggctgttaagaggagaaagtgcactgccttccagcccaggaggaggacagcattttgtatttgttccactgatgcagcttagaaccacacccctgagagtcgtggcaaacctttcacaacctggaaaatgttgaaagcaaccattcctatttttgtttgttttttattaaatcttgcacaaaa

SEQ ID NO: 422487 - DNA, 6089 bp, Homo sapiens
aaggtttgtttgttttgttgattattgtatcttactccatggttcccgttcccccctcgttttgacttcttacaggtagagattagttcttcctgttactctagaggactgactacactttccacaggaaaatgtttggatgtcaccttgctgacatctcccgagtgttaccttccttccttctcctcctgtcttagaaggaagtggcatcatttacctacaccttgtgtcctgcgcttgtttaggatttgttgtcaagactgcgtactttttgttttgtgaaacaaacagctgcaggtgctgtgctcctcccgcctgtccctcttcctggcgctctcttgtcctttagtctttgttttgcttcttagtgtgttccattattcagttttgtttggtttatttctcctagaagctgtttggttaaagctgttttctgatgttattgtccatgttttctgtttacctggaagcagctacttactaaaaaaaaaaaaaaagaaaatttgttggatttttttaatgggaaaaaaaaataaagttgtacaaaggataaaagccaaagccatcaaggagctttctgtggttgttcctggccagaggtgtgacactcagaactgggaggcccgagtgttactaaccagtatttaatcggtttttttaagactgaagtggccgcctccccatcgggtgcctggcagaggctccatagagtcaaccaagaccttcaaagtgagcttgaagcccagtgccagcgccaggagctgattacacaccagattcagaccctgaagcgtagctatggggaggccaaggacacgatccggcaccacgaggctgagatccggagccttcaggcacggctcagcaatgcggccgctgagctagccatcaaggagcaggcgctggccaagctcaagggcgacctgaagcgggagcagggccgggtccgcgagcagctggaggagcggcaacacagcgaggcggcgctgagcagccagctgagggctagcgagcagaagctcaagagtgctgaggccctgctgctggagaagacgcaggagctacggggcctggagacacagcaggcgctgcagcgggaccggcagaaggaggtccagaggctgcaggagcgcattgccgacctcagccagcaactgggcgccagtgagcaggcgcagcggctgatggaggagaagctgcagagaaactatgagctgctgctggagagctgtgagaaggagaagcaggcattgctgcagaacctaaaggaagtggaagacaaggccagcgcctatgaggaccagctgcagggtcaggcacagcaggtggagaccctgcagaaggagaagctgagcgccactttcgagggcagtgagcaggtgcaccagctggaggagcagctggaggcacgagaggccagcgtgcgcaggctcgcagagcacgtgcagagcctctgtgacgagcgggacctcctcagacagcggttccaggagctgacagagcgcgtggccacgtccgacgaggatgtggctgagctccgggaaaagctgaggagaagagaggctgacaaccagagcctggagcactcctaccagagggtctccagccagctgcagagcatgcacactctgctgagagagaaggaggaagagctggagcgcattaaggaagcacatgagaaggttctggagaagaaggagcaggacctcaatgaggctttggttaaaatggttgccttggggagcagcttagaggaaacagaaattaagctccaggcaaaagaagagattttaaggaaatttgcaagtgaatctccaaaggacatggaagagccacggagtacccctgaagagacagaaagggatggcactttgctcccaggccaaccagtccaagccactagggcacctctaggcctcccacacacaaggctcgaggatgaggacgaggacctgggggctcctccgggggaagagtacggtgatggcagccccagtagggaagacagcatggtgcccccaaagtcagtggaagtgcttgacagggagggccatcagcagggcacagccaaactcgaccaaggggcacctggtgttaaaaggcaaagaatccggttctccacaatccagtgccaaagatacattcaccccgaagggtctgagaagacctggaccagcagcacatcttccgacaccagccaggaccggtcaccctcggaagaaagcatgtcctcagagcctgcacccagtgtactgcctgcaactggcgactctgacacgtacctctccatcatccactccctggagaccaagctctacgtcacagaggaaaagctcaaagacgtgaccgtgaggctggagagccagcagggtcagagccgtgaggcactgctcgcactgcaccaccagtgggcgggcaccgaggcccagctgcgtgagcagctccgcgccagcctgctccaggttggcgcactggcctcccagctggagcaggagaggcaggagagggccaggagggttgaagggcatgttggagagcttggggacttccaggtcaagaatagtcaggccctgatgtgcctggaaaattgccgagaacaactgagatctctgcctagggccagccaggaggatgagcaggacgcacgcgcagcctccctggccagtgtggagagtgcactcgtcagcgccatccaagccctgcagcactggccggccccagcccatggcggggcccgtgcacagctggagacaggtggcaccgaggagaatgggaagcctgcctccctgcagcagtgctcccagtctgagttgacagagcaggagcaggtgaggcttctttctgaccagattgctctggaggcctcgctgatcagccagatagcagattccctgaagaacacaacatcagatgtctcccgaatgctccatgagatttcttggtcaggacagccaccgatggaatctgctggggcccccgtagacacctgggccaggaaggtcctagtggatggtgagttctggagccaggttgagtctctgaggaagcacttggggacactgggaggagaggcagtcggtgcctcaggagacgggcagcaaagcatcccacagggcctggcccccatcctggccaatgccacatgggtcagggcagagctcagctttgccacacagtcagtgagggagtcgttccaccgcaggctacagagcatccaggagaccctgcggggcacccagacggccctgcggcagcacaaatgcctgctgagggaaatcctgggagcctaccaaaccccagactttgaaagagtgatgcagcaggtcttggaagccctcaggcttccagcgggccatgaagatggtgttcagctgtcctgggacctgagccccttaggagaagtcctgggccgagactcagacagctctcaggagcccttcgatgtgtctgaccagagccctggggcctttgttgctattcaggaggagcttgcccagcagctgaaggagaaggccagcctcttagaggagatagcggctgccttaccatctctgccacctgtggaatcgctgagagattgccagaagcttctccaggtgtcccagagtctctcgtataacacttgtttgggaggcctcggtcagtattcttcattgttggttcaggatgccattattcaggcccaggtttgctatgcgtcctgcagaatccggctagaatatgagaaggagctccagctctgcaaggagtcctggcaaacccgggagccctcctgctcagagcaggcacaggcagcccgggccctgagggaggagtatgaggagcttctccgcaagcagaagagcgagtacctggatgtgatcgccattgttgaaagggagaatgcagagctcaaggccaaggccgcccagctagaccatcagcagcagtgtctggaggatgcagagagcaagcacagcatgagcatgttcaccctgcggggcaggtatgaggaggagattcggtgtgtggtggagcagctgaccaggaccgagagcacactgcaggctgagcgcagccgggtcctgagccagctggatgcctcggtcagagacaggcaggacatggagaggcatcatggtgagcagatacagaccctggaggacaggttccagctcaaggtccgggagctgcagacgatccacgaggaggagctgaggaccctgcaggagcactactcgcagagcctgaggtgccttcaggacaccctctgcctccaccaggggccacaccccaaggccctgccagcccctgcccccaactggcaggccacccagggagaggctgactccatgacggggctgagggagcgcatccaggagctggaggcccagatggatgtcatgcgggaggagctgggacacaaggacctggagggcgacgcggccacactgcgtgagaagtaccagagggacttggagagccttaaggccacgtgcgagcgagggtttgcagcaatggaagaaacgcaccagaagaagattgaagatctccagaggcagcaccagcgggagctagagaaacttcgagaagagaaagaccgcctcctagccgaggagacagcggccaccatctcagccatcgaagccatgaagaacgcccaccgggaggaaatggagcgggagctggagaagagccagcggtcccagatcagcagcgtcaactcggatgttgaggccctgcggcgccagtacctggaggagctgcagtcggtgcagcgggaactggaggtcctctcggagcagtactcgcagaagtgcctggagaatgcccatctggcccaggcgctggaggccgagcggcaggccctgcggcagtgccagcgtgagaaccaggagctcaatgcccacaaccaggagctgaacaaccgcctggctgcagagatcacacggttgcggacgctgctgactggggacggcggtggggaggccactgggtcaccccttgcacagggcaaggatgcctatgaactagaggtcttattgcgggtaaaggaatcggaaatacagtacctgaaacaggagattagctccctcaaggatgagctgcagacggcactgcgggacaagaagtacgcaagtgacaagtacaaagacatctacacagagctcagcatcgcgaaggctaaggctgactgtgacatcagcaggttgaaggagcagctcaaggctgcaacggaagcactgggggagaagtcccctgacagtgccacggtgtccggatatgatataatgaaatctaaaagcaaccctgacttcttgaagaaagacagatcctgtgtcacccggcaactcagaaacatcaggtccaagagtctgaaggaaggcctgacggtgcaagaacggttgaagctctttgaatccagggacttgaagaaagactaggtgtgtcccatccaagttgagcacgcgccttccccagcttgcagcagcacaccccaagcgctgcttttcacctgtacctttgttttattattattattattattgctgttgttgtcatcgttaactgtgggcatggaatgcgtgaggctggcttctgggttgtccacaccactctctgctgtgttgacttcctgttgtcttcatcaaagcttttttccgtggtattctaaaattaggccagcagtgggggctgggagggcatctgtgttagtcctttcctggctgtgacccgccacactcactgtcagtattaaggcccagcagcctgttgataagctaccctgtctcaccatgtgctggtgtggaaacggggcccagccagcacgcctcaaggtagatggaatccccactggtcagagaaaaagctatgcggacactccagcttggcctgggtcacagcactgactcctcacccgctagtctggctgttaagaggagaaagtgcactgccttccagcccaggaggaggacagcattttgtatttgttccactgatgcagcttagaaccacacccctgagagtcgtggcaaacctttcacaacctggaaaatgttgaaagcaaccattcctatttttgtttgttttttattaaatcttgcacaaaa

SEQ ID NO: 422488 - DNA, 2249 bp, Homo sapiens
ccacgcgtctgccacgcgtcctgggggagccggaccctgagcagaagaggagccgcgcacgggagcggaggcgagagggccgctccaagacctttgactgggctgagttccgtcccatccagcaggccctggctcaggagcgggtgggcggcgtggggcctgctgacacccacgagcccctgcgccctgaggcggagcctggggagctggagcgggagcgtgcacggaggcgggaggagcgccgcaagcgcttcgggatgctcgacgccacagacgggccaggcactgaggatgcagccctgcgcatggaggtggaccggagcccagggctgcctatgagcgacctcaaaacgcataacgtccacgtggagattgagcagcggtggcatcaggtggagaccacacctctccgggaagagaagcaggtgcccatcgcccccgtccacctgtcttctgaagatgggggtgaccggctctccacacacgagctgacctctctgctcgagaaggagctggagcagagccagaaggaggcctcagaccttctggagcagaaccggctcctgcaggaccagctgagggtggccctgggccgggagcagagcgcccgtgagggctacgtgctgcaggccacgtgcgagcgagggtttgcagcaatggaagaaacgcaccagaagaagattgaagatctccagaggcagcaccagcgggagctagagaaacttcgagaagagaaagaccgcctcctagccgaggagacagcggccaccatctcagccatcgaagccatgaagaacgcccaccgggaggaaatggagcgggagctggagaagagccagcggtcccagatcagcagcgtcaactcggatgttgaggccctgcggcgccagtacctggaggagctgcagtcggtgcagcgggaactggaggtcctctcggagcagtactcgcagaagtgcctggagaatgcccatctggcccaggcgctggaggccgagcggcaggccctgcggcagtgccagcgtgagaaccaggagctcaatgcccacaaccaggagctgaacaaccgcctggctgcagagatcacacggttgcggacgctgctgactggggacggcggtggggaggccactgggtcaccccttgcacagggcaaggatgcctatgaactagaggtcttattgcgggtaaaggaatcggaaatacagtacctgaaacaggagattagctccctcaaggatgagctgcagacggcactgcgggacaagaagtacgcaagtgacaagtacaaagacatctacacagagctcagcatcgcgaaggctaaggctgactgtgacatcagcaggttgaaggagcagctcaaggctgcaacggaagcactgggggagaagtcccctgacagtgccacggtgtccggatatgatataatgaaatctaaaagcaaccctgacttcttgaagaaagacagatcctgtgtcacccggcaactcagaaacatcaggtccaagagtctgaaggaaggcctgacggtgcaagaacggttgaagctctttgaatccagggacttgaagaaagactaggtgtgtcccatccaagttgagcacgcgccttccccagcttgcagcagcacaccccaagcgctgcttttcacctgtacctttgttttattattattattattattgctgttgttgtcatcgttaactgtgggcatggaatgcgtgaggctggcttctgggttgtccacaccactctctgctgtgttgacttcctgttgtcttcatcaaagcttttttccgtggtattctaaaattaggccagcagtgggggctgggagggcatctgtgttagtcctttcctggctgtgacccgccacactcactgtcagtattaaggcccagcagcctgttgataagctaccctgtctcaccatgtgctggtgtggaaacggggcccagccagcacgcctcaaggtagatggaatccccactggtcagagaaaaagctatgcggacactccagcttggcctgggtcacagcactgactcctcacccgctagtctggctgttaagaggagaaagtgcactgccttccagcccaggaggaggacagcattttgtatttgttccactgatgcagcttagaaccacacccctgagagtcgtggcaaacctttcacaacctggaaaatgttgaaagcaaccattcctatttttgtttgttttttattaaatcttgcacaaaa

SEQ ID NO: 422489 - DNA, 3810 bp, Homo sapiens
gcggccgcgctgagcccctagcccgccgggagcgccaggccggccaggcctgcgccgccgccgccgccgccgtcgccgccgcgccgaccatgtcggcagccaaggagaacccgtgcaggaaattccaggccaacatcttcaacaagagcaagtgtcagaactgcttcaagccccgcgagtcgcatctgctcaacgacgaggacctgacgcaggcaaaacccatttatggcggttggctgctcctggctccagatgggaccgactttgacaacccagtgcaccggtctcggaaatggcagcgacggttcttcatcctttacgagcacggcctcttgcgctacgccctggatgagatgcccacgacccttcctcagggcaccatcaacatgaaccagtgcacagatgtggtggatggggagggccgcacgggccagaagttctccctgtgtattctgacgcctgagaaggagcatttcatccgggcggagaccaaggagatcgtcagtgggtggctggagatgctcatggtctatccccggaccaacaagcagaatcagaagaagaaacggaaagtggagccccccacaccacaggagcctgggcctgccaaggtggctgttaccagcagacagcagcagcagcagcagcagcatccccagtgctgagaaagtccccaccaccaagtccacactctggcaggaagaaatgaggaccaaggaccagccagatggcagcagcctgagtccagctcagagtcccagccagagccagcctcctgctgccagctccctgcgggaacctgggctagagagcaaagaagaggagagcgccatgagtagcgaccgcatggactgtggccgcaaagtccgggtggagagcggctacttctctctggagaagaccaaacaggacttgaaggctgaagaacagcagctgcccccgccgctctcccctcccagccccagcacccccaaccacaggaggtcccaggtgattgaaaagtttgaggccttggacattgagaaggcagagcacatggagaccaatgcagtggggccctcaccatccagcgacacacgccagggccgcagcgagaagagggcgttccctaggaagcgggacttcaccaatgaagcccccccagctcctctcccagacgcctcggcttcccccctgtctccacaccgaagagccaagtcactggacaggaggtccacggagccctccgtgacgcccgacctgctgaatttcaagaaaggctggctgactaagcagtatgaggacggccagtggaagaaacactggtttgtcctcgccgatcaaagcctgagatactacagggattcagtggctgaggaggcagccgacttggatggagaaattgacttgtccgcatgttacgatgtcacagagtatccagttcagagaaactatggcttccagatacatacaaaggagggcgagtttaccctgtcggccatgacatctgggattcggcggaactggatccagaccatcatgaagcacgtgcacccgaccactgccccggatgtgaccagctcgttgccagaggaaaaaaacaagagcagctgctcttttgagacctgcccgaggcctactgagaagcaagaggcagagctgggggagccggaccctgagcagaagaggagccgcgcacgggagcggaggcgagagggccgctccaagacctttgactgggctgagttccgtcccatccagcaggccctggctcaggagcgggtgggcggcgtggggcctgctgacacccacgagcccctgcgccctgaggcggagcctggggagctggagcgggagcgtgcacggaggcgggaggagcgccgcaagcgcttcgggatgctcgacgccacagacgggccaggcactgaggatgcagccctgcgcatggaggtggaccggagcccagggctgcctatgagcgacctcaaaacgcataacgtccacgtggagattgagcagcggtggcatcaggtggagaccacacctctccgggaagagaagcaggtgcccatcgcccccgtccacctgtcttctgaagatgggggtgaccggctctccacacacgagctgacctctctgctcgagaaggagctggagcagagccagaaggaggcctcagaccttctggagcagaaccggctcctgcaggaccagctgagggtggccctgggccgggagcagagcgcccgtgagggctacgtgctgcaggccacgtgcgagcgagggtttgcagcaatggaagaaacgcaccagaagaagattgaagatctccagaggcagcaccagcgggagctagagaaacttcgagaagagaaagaccgcctcctagccgaggagacagcggccaccatctcagccatcgaagccatgaagaacgcccaccgggaggaaatggagcgggagctggagaagagccagcggtcccagatcagcagcgtcaactcggatgttgaggccctgcggcgccagtacctggaggagctgcagtcggtgcagcgggaactggaggtcctctcggagcagtactcgcagaagtgcctggagaatgcccatctggcccaggcgctggaggccgagcggcaggccctgcggcagtgccagcgtgagaaccaggagctcaatgcccacaaccaggtcttattgcgggtaaaggaatcggaaatacagtacctgaaacaggagattagctccctcaaggatgagctgcagacggcactgcgggacaagaagtacgcaagtgacaagtacaaagacatctacacagagctcagcatcgcgaaggctaaggctgactgtgacatcagcaggttgaaggagcagctcaaggctgcaacggaagcactgggggagaagtcccctgacagtgccacggtgtccggatatgatataatgaaatctaaaagcaaccctgacttcttgaagaaagacagatcctgtgtcacccggcaactcagaaacatcaggtccaagtccgtaattgagcaggtctcgtgggatacctgaaatgcacccgcttcccggcccatgcaggagagtctgaaggaaggcctgacggtgcaagaacggttgaagctctttgaatccagggacttgaagaaagactaggtgtgtcccatccaagttgagcacgcgccttccccagcttgcagcagcacaccccaagcgctgcttttcacctgtacctttgttttattattattattattattgctgttgttgtcatcgttaactgtgggcatggaatgcgtgaggctggcttctgggttgtccacaccactctctgctgtgttgacttcctgttgtcttcatcaaagcttttttccgtggtattctaaaattaggccagcagtgggggctgggagggcatctgtgttagtcctttcctggctgtgacccgccacactcactgtcagtattaaggcccagcagcctgttgataagctaccctgtctcaccatgtgctggtgtggaaacggggcccagccagcacgcctcaaggtagatggaatccccactggtcagagaaaaagctatgcggacactccagcttggcctgggtcacagcactgactcctcacccgctagtctggctgttaagaggagaaagtgcactgccttccagcccaggaggaggacagcattttgtatttgttccactgatgcagcttagaaccacacccctgagagtcgtggcaaacctttcacaacctggaaaatgttgaaagcaaccattcctatttttgtttgttttttattaaatcttgcacaaaa

SEQ ID NO: 422490 - DNA, 3747 bp, Homo sapiens
gcggccgcgctgagcccctagcccgccgggagcgccaggccggccaggcctgcgccgccgccgccgccgccgtcgccgccgcgccgaccatgtcggcagccaaggagaacccgtgcaggaaattccaggccaacatcttcaacaagagcaagtgtcagaactgcttcaagccccgcgagtcgcatctgctcaacgacgaggacctgacgcaggcaaaacccatttatggcggttggctgctcctggctccagatgggaccgactttgacaacccagtgcaccggtctcggaaatggcagcgacggttcttcatcctttacgagcacggcctcttgcgctacgccctggatgagatgcccacgacccttcctcagggcaccatcaacatgaaccagtgcacagatgtggtggatggggagggccgcacgggccagaagttctccctgtgtattctgacgcctgagaaggagcatttcatccgggcggagaccaaggagatcgtcagtgggtggctggagatgctcatggtctatccccggaccaacaagcagaatcagaagaagaaacggaaagtggagccccccacaccacaggagcctgggcctgccaaggtggctgttaccagcagacagcagcagcagcagcagcagcatccccagtgctgagaaagtccccaccaccaagtccacactctggcaggaagaaatgaggaccaaggaccagccagatggcagcagcctgagtccagctcagagtcccagccagagccagcctcctgctgccagctccctgcgggaacctgggctagagagcaaagaagaggagagcgccatgagtagcgaccgcatggactgtggccgcaaagtccgggtggagagcggctacttctctctggagaagaccaaacaggacttgaaggctgaagaacagcagctgcccccgccgctctcccctcccagccccagcacccccaaccacaggaggtcccaggtgattgaaaagtttgaggccttggacattgagaaggcagagcacatggagaccaatgcagtggggccctcaccatccagcgacacacgccagggccgcagcgagaagagggcgttccctaggaagcgggacttcaccaatgaagcccccccagctcctctcccagacgcctcggcttcccccctgtctccacaccgaagagccaagtcactggacaggaggtccacggagccctccgtgacgcccgacctgctgaatttcaagaaaggctggctgactaagcagtatgaggacggccagtggaagaaacactggtttgtcctcgccgatcaaagcctgagatactacagggattcagtggctgaggaggcagccgacttggatggagaaattgacttgtccgcatgttacgatgtcacagagtatccagttcagagaaactatggcttccagatacatacaaaggagggcgagtttaccctgtcggccatgacatctgggattcggcggaactggatccagaccatcatgaagcacgtgcacccgaccactgccccggatgtgaccagctcgttgccagaggaaaaaaacaagagcagctgctcttttgagacctgcccgaggcctactgagaagcaagaggcagagctgggggagccggaccctgagcagaagaggagccgcgcacgggagcggaggcgagagggccgctccaagacctttgactgggctgagttccgtcccatccagcaggccctggctcaggagcgggtgggcggcgtggggcctgctgacacccacgagcccctgcgccctgaggcggagcctggggagctggagcgggagcgtgcacggaggcgggaggagcgccgcaagcgcttcgggatgctcgacgccacagacgggccaggcactgaggatgcagccctgcgcatggaggtggaccggagcccagggctgcctatgagcgacctcaaaacgcataacgtccacgtggagattgagcagcggtggcatcaggtggagaccacacctctccgggaagagaagcaggtgcccatcgcccccgtccacctgtcttctgaagatgggggtgaccggctctccacacacgagctgacctctctgctcgagaaggagctggagcagagccagaaggaggcctcagaccttctggagcagaaccggctcctgcaggaccagctgagggtggccctgggccgggagcagagcgcccgtgagggctacgtgctgcaggccacgtgcgagcgagggtttgcagcaatggaagaaacgcaccagaagaagattgaagatctccagaggcagcaccagcgggagctagagaaacttcgagaagagaaagaccgcctcctagccgaggagacagcggccaccatctcagccatcgaagccatgaagaacgcccaccgggaggaaatggagcgggagctggagaagagccagcggtcccagatcagcagcgtcaactcggatgttgaggccctgcggcgccagtacctggaggagctgcagtcggtgcagcgggaactggaggtcctctcggagcagtactcgcagaagtgcctggagaatgcccatctggcccaggcgctggaggccgagcggcaggccctgcggcagtgccagcgtgagaaccaggagctcaatgcccacaaccaggtcttattgcgggtaaaggaatcggaaatacagtacctgaaacaggagattagctccctcaaggatgagctgcagacggcactgcgggacaagaagtacgcaagtgacaagtacaaagacatctacacagagctcagcatcgcgaaggctaaggctgactgtgacatcagcaggttgaaggagcagctcaaggctgcaacggaagcactgggggagaagtcccctgacagtgccacggtgtccggatatgatataatgaaatctaaaagcaaccctgacttcttgaagaaagacagatcctgtgtcacccggcaactcagaaacatcaggtccaagagtctgaaggaaggcctgacggtgcaagaacggttgaagctctttgaatccagggacttgaagaaagactaggtgtgtcccatccaagttgagcacgcgccttccccagcttgcagcagcacaccccaagcgctgcttttcacctgtacctttgttttattattattattattattgctgttgttgtcatcgttaactgtgggcatggaatgcgtgaggctggcttctgggttgtccacaccactctctgctgtgttgacttcctgttgtcttcatcaaagcttttttccgtggtattctaaaattaggccagcagtgggggctgggagggcatctgtgttagtcctttcctggctgtgacccgccacactcactgtcagtattaaggcccagcagcctgttgataagctaccctgtctcaccatgtgctggtgtggaaacggggcccagccagcacgcctcaaggtagatggaatccccactggtcagagaaaaagctatgcggacactccagcttggcctgggtcacagcactgactcctcacccgctagtctggctgttaagaggagaaagtgcactgccttccagcccaggaggaggacagcattttgtatttgttccactgatgcagcttagaaccacacccctgagagtcgtggcaaacctttcacaacctggaaaatgttgaaagcaaccattcctatttttgtttgttttttattaaatcttgcacaaaa

SEQ ID NO: 422491 - DNA, 3650 bp, Homo sapiens
gcggccgcgctgagcccctagcccgccgggagcgccaggccggccaggcctgcgccgccgccgccgccgccgtcgccgccgcgccgaccatgtcggcagccaaggagaacccgtgcaggaaattccaggccaacatcttcaacaagagcaagtgtcagaactgcttcaagccccgcgagtcgcatctgctcaacgacgaggacctgacgcaggcaaaacccatttatggcggttggctgctcctggctccagatgggaccgactttgacaacccagtgcaccggtctcggaaatggcagcgacggttcttcatcctttacgagcacggcctcttgcgctacgccctggatgagatgcccacgacccttcctcagggcaccatcaacatgaaccagtgcacagatgtggtggatggggagggccgcacgggccagaagttctccctgtgtattctgacgcctgagaaggagcatttcatccgggcggagaccaaggagatcgtcagtgggtggctggagatgctcatggtctatccccggaccaacaagcagaatcagaagaagaaacggaaagtggagccccccacaccacaggagcctgggcctgccaaggtggctgttaccagcagacagcagcagcagcagcagcagcatccccagtgctgagaaagtccccaccaccaagtccacactctggcaggaagaaatgaggaccaaggaccagccagatggcagcagcctgagtccagctcagagtcccagccagagccagcctcctgctgccagctccctgcgggaacctgggctagagagcaaagaagaggagagcgccatgagtagcgaccgcatggactgtggccgcaaagtccgggtggagagcggctacttctctctggagaagaccaaacaggacttgaaggctgaagaacagcagctgcccccgccgctctcccctcccagccccagcacccccaaccacaggaggtcccaggtgattgaaaagtttgaggccttggacattgagaaggcagagcacatggagaccaatgcagtggggccctcaccatccagcgacacacgccagggccgcagcgagaagagggcgttccctaggaagcgggacttcaccaatgaagcccccccagctcctctcccagacgcctcggcttcccccctgtctccacaccgaagagccaagtcactggacaggaggtccacggagccctccgtgacgcccgacctgctgaatttcaagaaaggctggctgactaagcagtatgaggacggccagtggaagaaacactggtttgtcctcgccgatcaaagcctgagatactacagggattcagtggctgaggaggcagccgacttggatggagaaattgacttgtccgcatgttacgatgtcacagagtatccagttcagagaaactatggcttccagatacatacaaaggagggcgagtttaccctgtcggccatgacatctgggattcggcggaactggatccagaccatcatgaagcacgtgcacccgaccactgccccggatgtgaccagctcgttgccagaggaaaaaaacaagagcagctgctcttttgagacctgcccgaggcctactgagaagcaagaggcagagctgggggagccggaccctgagcagaagaggagccgcgcacgggagcggaggcgagagggccgctccaagacctttgactgggctgagttccgtcccatccagcaggccctggctcaggagcgggtgggcggcgtggggcctgctgacacccacgagcccctgcgccctgaggcggagcctggggagctggagcgggagcgtgcacggaggcgggaggagcgccgcaagcgcttcgggatgctcgacgccacagacgggccaggcactgaggatgcagccctgcgcatggaggtggaccggagcccagggctgcctatgagcgacctcaaaacgcataacgtccacgtggagattgagcagcggtggcatcaggtggagaccacacctctccgggaagagaagcaggtgcccatcgcccccgtccacctgtcttctgaagatgggggtgaccggctctccacacacgagctgacctctctgctcgagaaggagctggagcagagccagaaggaggcctcagaccttctggagcagaaccggctcctgcaggaccagctgagggtggccctgggccgggagcagagcgcccgtgagggctacgtgctgcaggccacgtgcgagcgagggtttgcagcaatggaagaaacgcaccagaagaagattgaagatctccagaggcagcaccagcgggagctagagaaacttcgagaagagaaagaccgcctcctagccgaggagacagcggccaccatctcagccatcgaagccatgaagaacgcccaccgggaggaaatggagcgggagctggagaagagccagcggtcccagatcagcagcgtcaactcggatgttgaggccctgcggcgccagtacctgtcttattgcgggtaaaggaatcggaaatacagtacctgaaacaggagattagctccctcaaggatgagctgcagacggcactgcgggacaagaagtacgcaagtgacaagtacaaagacatctacacagagctcagcatcgcgaaggctaaggctgactgtgacatcagcaggttgaaggagcagctcaaggctgcaacggaagcactgggggagaagtcccctgacagtgccacggtgtccggatatgatataatgaaatctaaaagcaaccctgacttcttgaagaaagacagatcctgtgtcacccggcaactcagaaacatcaggtccaagtccgtaattgagcaggtctcgtgggatacctgaaatgcacccgcttcccggcccatgcaggagagtctgaaggaaggcctgacggtgcaagaacggttgaagctctttgaatccagggacttgaagaaagactaggtgtgtcccatccaagttgagcacgcgccttccccagcttgcagcagcacaccccaagcgctgcttttcacctgtacctttgttttattattattattattattgctgttgttgtcatcgttaactgtgggcatggaatgcgtgaggctggcttctgggttgtccacaccactctctgctgtgttgacttcctgttgtcttcatcaaagcttttttccgtggtattctaaaattaggccagcagtgggggctgggagggcatctgtgttagtcctttcctggctgtgacccgccacactcactgtcagtattaaggcccagcagcctgttgataagctaccctgtctcaccatgtgctggtgtggaaacggggcccagccagcacgcctcaaggtagatggaatccccactggtcagagaaaaagctatgcggacactccagcttggcctgggtcacagcactgactcctcacccgctagtctggctgttaagaggagaaagtgcactgccttccagcccaggaggaggacagcattttgtatttgttccactgatgcagcttagaaccacacccctgagagtcgtggcaaacctttcacaacctggaaaatgttgaaagcaaccattcctatttttgtttgttttttattaaatcttgcacaaaa

SEQ ID NO: 422492 - DNA, 4344 bp, Homo sapiens
gcggccgcgctgagcccctagcccgccgggagcgccaggccggccaggcctgcgccgccgccgccgccgccgtcgccgccgcgccgaccatgtcggcagccaaggagaacccgtgcaggaaattccaggccaacatcttcaacaagagcaagtgtcagaactgcttcaagccccgcgagtcgcatctgctcaacgacgaggacctgacgcaggcaaaacccatttatggcggttggctgctcctggctccagatgggaccgactttgacaacccagtgcaccggtctcggaaatggcagcgacggttcttcatcctttacgagcacggcctcttgcgctacgccctggatgagatgcccacgacccttcctcagggcaccatcaacatgaaccagtgcacagatgtggtggatggggagggccgcacgggccagaagttctccctgtgtattctgacgcctgagaaggagcatttcatccgggcggagaccaaggagatcgtcagtgggtggctggagatgctcatggtctatccccggaccaacaagcagaatcagaagaagaaacggaaagtggagccccccacaccacaggagcctgggcctgccaaggtggctgttaccagcagacagcagcagcagcagcagcagcatccccagtgctgagaaagtccccaccaccaagtccacactctggcaggaagaaatgaggaccaaggaccagccagatggcagcagcctgagtccagctcagagtcccagccagagccagcctcctgctgccagctccctgcgggaacctgggctagagagcaaagaagaggagagcgccatgagtagcgaccgcatggactgtggccgcaaagtccgggtggagagcggctacttctctctggagaagaccaaacaggacttgaaggctgaagaacagcagctgcccccgccgctctcccctcccagccccagcacccccaaccacaggaggtcccaggtgattgaaaagtttgaggccttggacattgagaaggcagagcacatggagaccaatgcagtggggccctcaccatccagcgacacacgccagggccgcagcgagaagagggcgttccctaggaagcgggacttcaccaatgaagcccccccagctcctctcccagacgcctcggcttcccccctgtctccacaccgaagagccaagtcactggacaggaggtccacggagccctccgtgacgcccgacctgctgaatttcaagaaaggctggctgactaagcagtatgaggacggccagtggaagaaacactggtttgtcctcgccgatcaaagcctgagatactacagggattcagtggctgaggaggcagccgacttggatggagaaattgacttgtccgcatgttacgatgtcacagagtatccagttcagagaaactatggcttccagatacatacaaaggagggcgagtttaccctgtcggccatgacatctgggattcggcggaactggatccagaccatcatgaagcacgtgcacccgaccactgccccggatgtgaccagctcgttgccagaggaaaaaaacaagagcagctgctcttttgagacctgcccgaggcctactgagaagcaagaggcagagctgggggagccggaccctgagcagaagaggagccgcgcacgggagcggaggcgagagggccgctccaagacctttgactgggctgagttccgtcccatccagcaggccctggctcaggagcgggtgggcggcgtggggcctgctgacacccacgagcccctgcgccctgaggcggagcctggggagctggagcgggagcgtgcacggaggcgggaggagcgccgcaagcgcttcgggatgctcgacgccacagacgggccaggcactgaggatgcagccctgcgcatggaggtggaccggagcccagggctgcctatgagcgacctcaaaacgcataacgtccacgtggagattgagcagcggtggcatcaggtggagaccacacctctccgggaagagaagcaggtgcccatcgcccccgtccacctgtcttctgaagatgggggtgaccggctctccacacacgagctgacctctctgctcgagaaggagctggagcagagccagaaggaggcctcagaccttctggagcagaaccggctcctgcaggaccagctgagggtggccctgggccgggagcagagcgcccgtgagggctacgtgctgcaggccacgtgcgagcgagggtttgcagcaatggaagaaacgcaccagaagaagattgaagatctccagaggcagcaccagcgggagctagagaaacttcgagaagagaaagaccgcctcctagccgaggagacagcggccaccatctcagccatcgaagccatgaagaacgcccaccgggaggaaatggagcgggagctggagaagagccagcggtcccagatcagcagcgtcaactcggatgttgaggccctgcggcgccagtacctggaggagctgcagtcggtgcagcgggaactggaggtcctctcggagcagtactcgcagaagtgcctggagaatgcccatctggcccaggcgctggaggccgagcggcaggccctgcggcagtgccagcgtgagaaccaggagctcaatgcccacaaccaggagctgaacaaccgcctggctgcagagatcacacggttgcggacgctgctgactggggacggcggtggggaggccactgggtcaccccttgcacagggcaaggatgcctatgaactagaggtcttattgcgggtaaaggaatcggaaatacagtacctgaaacaggagattagctccctcaaggatgagctgcagacggcactgcgggacaagaagtacgcaagtgacaagtacaaagacatctacacagagctcagcatcgcgaaggctaaggctgactgtgacatcagcaggttgaaggagcagctcaaggctgcaacggaagcactgggggagaagtcccctgacagtgccacggtgtccggatatgatataatgaaatctaaaagcaaccctgacttcttgaagaaagacagatcctgtgtcacccggcaactcagaaacatcaggtccaagagtctgaaggaaggcctgacggtgcaagaacggttgaagctctttgaatccagggacttgaagaaagactaggtgtgtcccatccaagttgagcacgcgccttccccagcttgcagcagcacaccccaagcgctgcttttcacctgtacctttgttttattattattattattattgctgttgttgtcatcgttaactgtgggcatggaatgcgtgaggctggcttctgggttgtccacaccactctctgctgtgttgacttcctgttgtcttcatcaaagcttttttccgtggtattctaaaattaggccagcagtgggggctgggagggcatctgtgttagtcctttcctggctgtgacccgccacactcactgtcagtattaaggcccagcagcctgttgataagctaccctgtctcaccatgtgctggtgtggaaacggggcccagccagcacgcctcaaggtagatggaatccccactggtcagagaaaaagctatgcggacactccagcttggcctgggtcacagcactgactcctcacccgctagtctggctgttaagaggagaaagtgcactgccttccagcccaggaggaggacagcattttgtatttgttccactgatgcagcttagaaccacacccctgagagtcgtggcaaacctttcacaacctggaaaatgttgaaagcaaccattcctatttttgtttgttttttattaaatcttgcacaaaaaaaaaaaaaaaaaaaaaaaaaaaaaaaaaaaaaaaaaaaaaaaaaaaaaaaaaaaaaaaaaaaaaaaaaaaaaaaaaaaaaaaaataaaaaaaaaaaaaaaaaaagaaggaaagcaacaacacggcggcgcgggaggggagatgttccatgaaggcgcgaaaaaacaacaaaacataaataataaagaaaaagcagccagcaacacagagggagagactaaaaaagagaacaagagacaagagaaaaaaacaaaaaaaaagacgagaaggagaaaagaaggcaggaagaaagatacaatgagcaaaggaaaaagagaagaaaaccataacacgaactatggagggaagaagaaagaagaagagcaaaagaagaaaaaaacgagaaagaagaaaagaagaaggaaagagggataaaaaataaacgagaagaaggaggagaagaaagagaaaaaagcagaaacagacaaggaagaagcg

SEQ ID NO: 422493 - DNA, 4292 bp, Homo sapiens
gcggccgcgctgagcccctagcccgccgggagcgccaggccggccaggcctgcgccgccgccgccgccgccgtcgccgccgcgccgaccatgtcggcagccaaggagaacccgtgcaggaaattccaggccaacatcttcaacaagagcaagtgtcagaactgcttcaagccccgcgagtcgcatctgctcaacgacgaggacctgacgcaggcaaaacccatttatggcggttggctgctcctggctccagatgggaccgactttgacaacccagtgcaccggtctcggaaatggcagcgacggttcttcatcctttacgagcacggcctcttgcgctacgccctggatgagatgcccacgacccttcctcagggcaccatcaacatgaaccagtgcacagatgtggtggatggggagggccgcacgggccagaagttctccctgtgtattctgacgcctgagaaggagcatttcatccgggcggagaccaaggagatcgtcagtgggtggctggagatgctcatggtctatccccggaccaacaagcagaatcagaagaagaaacggaaagtggagccccccacaccacaggagcctgggcctgccaaggtggctgttaccagcagacagcagcagcagcagcagcagcatccccagtgctgagaaagtccccaccaccaagtccacactctggcaggaagaaatgaggaccaaggaccagccagatggcagcagcctgagtccagctcagagtcccagccagagccagcctcctgctgccagctccctgcgggaacctgggctagagagcaaagaagaggagagcgccatgagtagcgaccgcatggactgtggccgcaaagtccgggtggagagcggctacttctctctggagaagaccaaacaggacttgaaggctgaagaacagcagctgcccccgccgctctcccctcccagccccagcacccccaaccacaggaggtcccaggtgattgaaaagtttgaggccttggacattgagaaggcagagcacatggagaccaatgcagtggggccctcaccatccagcgacacacgccagggccgcagcgagaagagggcgttccctaggaagcgggacttcaccaatgaagcccccccagctcctctcccagacgcctcggcttcccccctgtctccacaccgaagagccaagtcactggacaggaggtccacggagccctccgtgacgcccgacctgctgaatttcaagaaaggctggctgactaagcagtatgaggacggccagtggaagaaacactggtttgtcctcgccgatcaaagcctgagatactacagggattcagtggctgaggaggcagccgacttggatggagaaattgacttgtccgcatgttacgatgtcacagagtatccagttcagagaaactatggcttccagatacatacaaaggagggcgagtttaccctgtcggccatgacatctgggattcggcggaactggatccagaccatcatgaagcacgtgcacccgaccactgccccggatgtgaccagctcgttgccagaggaaaaaaacaagagcagctgctcttttgagacctgcccgaggcctactgagaagcaagaggcagagctgggggagccggaccctgagcagaagaggagccgcgcacgggagcggaggcgagagggccgctccaagacctttgactgggctgagttccgtcccatccagcaggccctggctcaggagcgggtgggcggcgtggggcctgctgacacccacgagcccctgcgccctgaggcggagcctggggagctggagcgggagcgtgcacggaggcgggaggagcgccgcaagcgcttcgggatgctcgacgccacagacgggccaggcactgaggatgcagccctgcgcatggaggtggaccggagcccagggctgcctatgagcgacctcaaaacgcataacgtccacgtggagattgagcagcggtggcatcaggtggagaccacacctctccgggaagagaagcaggtgcccatcgcccccgtccacctgtcttctgaagatgggggtgaccggctctccacacacgagctgacctctctgctcgagaaggagctggagcagagccagaaggaggcctcagaccttctggagcagaaccggctcctgcaggaccagctgagggtggccctgggccgggagcagagcgcccgtgagggctacgtgctgcaggccacgtgcgagcgagggtttgcagcaatggaagaaacgcaccagaagaagattgaagatctccagaggcagcaccagcgggagctagagaaacttcgagaagagaaagaccgcctcctagccgaggagacagcggccaccatctcagccatcgaagccatgaagaacgcccaccgggaggaaatggagcgggagctggagaagagccagcggtcccagatcagcagcgtcaactcggatgttgaggccctgcggcgccagtacctggaggagctgcagtcggtgcagcgggaactggaggtcctctcggagcagtactcgcagaagtgcctggagaatgcccatctggcccaggcgctggaggccgagcggcaggccctgcggcagtgccagcgtgagaaccaggagctcaatgcccacaaccaggagctgaacaaccgcctggctgcagagatcacacggttgcggacgctgctgactggggacggcggtggggaggccactgggtcaccccttgcacagggcaaggatgcctatgaactagaggtcttattgcgggtaaaggaatcggaaatacagtacctgaaacaggagattagctccctcaaggatgagctgcagacggcactgcgggacaagaagtacgcaagtgacaagtacaaagacatctacacagagctcagcatcgcgaaggctaaggctgactgtgacatcagcaggttgaaggagcagctcaaggctgcaacggaagcactgggggagaagtcccctgacagtgccacggtgtccggatatgatataatgaaatctaaaagcaaccctgacttcttgaagaaagacagatcctgtgtcacccggcaactcagaaacatcaggtccaagagtctgaaggaaggcctgacggtgcaagaacggttgaagctctttgaatccagggacttgaagaaagactaggtgtgtcccatccaagttgagcacgcgccttccccagcttgcagcagcacaccccaagcgctgcttttcacctgtacctttgttttattattattattattattgctgttgttgtcatcgttaactgtgggcatggaatgcgtgaggctggcttctgggttgtccacaccactctctgctgtgttgacttcctgttgtcttcatcaaagcttttttccgtggtattctaaaattaggccagcagtgggggctgggagggcatctgtgttagtcctttcctggctgtgacccgccacactcactgtcagtattaaggcccagcagcctgttgataagctaccctgtctcaccatgtgctggtgtggaaacggggcccagccagcacgcctcaaggtagatggaatccccactggtcagagaaaaagctatgcggacactccagcttggcctgggtcacagcactgactcctcacccgctagtctggctgttaagaggagaaagtgcactgccttccagcccaggaggaggacagcattttgtatttgttccactgatgcagcttagaaccacacccctgagagtcgtggcaaacctttcacaacctggaaaatgttgaaagcaaccattcctatttttgtttgttttttattaaatcttgcacaaaatccccggcccctctccttccttccttccttccttcctccgctcgttcctttcttggtctccagtaaccctggtcttttcataactgctcgagattgttgacctgcagcccaggtttcagactctgattgcaaaaaacaaatgaattccccccaggaatcattcaaaatgggggaaggtttgggggtttgggttttttttttaccttttggaaaagaaaccgtcacattgctttggaaaaggttgagaggagacccctgttaagtcaagaagaaagtacagaggatgtcagaatctgatgagaacagcacattagtgtttattgagactccgatcttaactctcatttaattaatctgagctctgaaaacctatcttgcagcatttatctttaaaagagcctggttaaagtaaacctatactaaca

SEQ ID NO: 422494 - DNA, 1994 bp, Homo sapiens
gcggccgcgctgagcccctagcccgccgggagcgccaggccggccaggcctgcgccgccgccgccgccgccgtcgccgccgcgccgaccatgtcggcagccaaggagaacccgtgcaggaaattccaggccaacatcttcaacaagagcaagtgtcagaactgcttcaagccccgcgagtcgcatctgctcaacgacgaggacctgacgcaggcaaaacccatttatggcggttggctgctcctggctccagatgggaccgactttgacaacccagtgcaccggtctcggaaatggcagcgacggttcttcatcctttacgagcacggcctcttgcgctacgccctggatgagatgcccacgacccttcctcagggcaccatcaacatgaaccagtgcacagatgtggtggatggggagggccgcacgggccagaagttctccctgtgtattctgacgcctgagaaggagcatttcatccgggcggagaccaaggagatcgtcagtgggtggctggagatgctcatggtctatccccggaccaacaagcagaatcagaagaagaaacggaaagtggagccccccacaccacaggagcctgggcctgccaaggtggctgttaccagcagacagcagcagcagcagcagcagcatccccagtgctgagaaagtccccaccaccaagtccacactctggcaggaagaaatgaggaccaaggaccagccagatggcagcagcctgagtccagctcagagtcccagccagagccagcctcctgctgccagctccctgcgggaacctgggctagagagcaaagaagtgcagagatcacacggttgcggacgctgctgactggggacggcggtggggaggccactgggtcaccccttgcacagggcaaggatgcctatgaactagaggtcttattgcgggtaaaggaatcggaaatacagtacctgaaacaggagattagctccctcaaggatgagctgcagacggcactgcgggacaagaagtacgcaagtgacaagtacaaagacatctacacagagctcagcatcgcgaaggctaaggctgactgtgacatcagcaggttgaaggagcagctcaaggctgcaacggaagcactgggggagaagtcccctgacagtgccacggtgtccggatatgatataatgaaatctaaaagcaaccctgacttcttgaagaaagacagatcctgtgtcacccggcaactcagaaacatcaggtccaagagtctgaaggaaggcctgacggtgcaagaacggttgaagctctttgaatccagggacttgaagaaagactaggtgtgtcccatccaagttgagcacgcgccttccccagcttgcagcagcacaccccaagcgctgcttttcacctgtacctttgttttattattattattattattgctgttgttgtcatcgttaactgtgggcatggaatgcgtgaggctggcttctgggttgtccacaccactctctgctgtgttgacttcctgttgtcttcatcaaagcttttttccgtggtattctaaaattaggccagcagtgggggctgggagggcatctgtgttagtcctttcctggctgtgacccgccacactcactgtcagtattaaggcccagcagcctgttgataagctaccctgtctcaccatgtgctggtgtggaaacggggcccagccagcacgcctcaaggtagatggaatccccactggtcagagaaaaagctatgcggacactccagcttggcctgggtcacagcactgactcctcacccgctagtctggctgttaagaggagaaagtgcactgccttccagcccaggaggaggacagcattttgtatttgttccactgatgcagcttagaaccacacccctgagagtcgtggcaaacctttcacaacctggaaaatgttgaaagcaaccattcctatttttgtttgttttttattaaatcttgcacaaaa

SEQ ID NO: 422495 - DNA, 2717 bp, Homo sapiens
gcggccgcgctgagcccctagcccgccgggagcgccaggccggccaggcctgcgccgccgccgccgccgccgtcgccgccgcgccgaccatgtcggcagccaaggagaacccgtgcaggaaattccaggccaacatcttcaacaagagcaagtgtcagaactgcttcaagccccgcgagtcgcatctgctcaacgacgaggacctgacgcaggcaaaacccatttatggcggttggctgctcctggctccagatgggaccgactttgacaacccagtgcaccggtctcggaaatggcagcgacggttcttcatcctttacgagcacggcctcttgcgctacgccctggatgagatgcccacgacccttcctcagggcaccatcaacatgaaccagtgcacagatgtggtggatggggagggccgcacgggccagaagttctccctgtgtattctgacgcctgagaaggagcatttcatccgggcggagaccaaggagatcgtcagtgggtggctggagatgctcatggtctatccccggaccaacaagcagaatcagaagaagaaacggaaagtggagccccccacaccacaggagcctgggcctgccaaggtggctgttaccagcagacagcagcagcagcagcagcagcatccccagtgctgagaaagtccccaccaccaagtccacactctggcaggaagaaatgaggaccaaggaccagccagatggcagcagcctgagtccagctcagagtcccagccagagccagcctcctgctgccagctccctgcgggaacctgggctagagagcaaagaagaggagagcgccatgagtagcgaccgcatggactgtggccgcaaagtccgggtggagagcggctacttctctctggagaagaccaaacaggacttgaaggctgaagaacagcagctgcccccgccgctctcccctcccagccccagcacccccaaccacaggaggtcccaggtgattgaaaagtttgaggccttggacattgagaaggcagagcacatggagaccaatgcagtggggccctcaccatccagcgacacacgccagggccgcagcgagaagagggcgttccctaggaagcgggacttcaccaatgaagcccccccagctcctctcccagacgcctcggcttcccccctgtctccacaccgaagagccaagtcactggacaggaggtccacggagccctccgtgacgcccgacctgctgaatttcaagaaaggctggctgactaagcagtatgaggacggccagtggaagaaacactggtttgtcctcgccgatcaaagcctgagatactacagggattcagtggctgaggaggcagccgacttggatggagaaattgacttgtccgcatgttacgatgtcacagagtatccagttcagagaaactatggcttccagatacatacaaaggagggcgagtttaccctgtcggccatgacatctgggattcggcggaactggatccagaccatcatgaagcacgtgcacccgaccactgccccggatgtgaccagctgatctctctgtcattttaggtcttattgcgggtaaaggaatcggaaatacagtacctgaaacaggagattagctccctcaaggatgagctgcagacggcactgcgggacaagaagtacgcaagtgacaagtacaaagacatctacacagagctcagcatcgcgaaggctaaggctgactgtgacatcagcaggttgaaggagcagctcaaggctgcaacggaagcactgggggagaagtcccctgacagtgccacggtgtccggatatgatataatgaaatctaaaagcaaccctgacttcttgaagaaagacagatcctgtgtcacccggcaactcagaaacatcaggtccaagtccgtaattgagcaggtctcgtgggatacctgaaatgcacccgcttcccggcccatgcaggagagtctgaaggaaggcctgacggtgcaagaacggttgaagctctttgaatccagggacttgaagaaagactaggtgtgtcccatccaagttgagcacgcgccttccccagcttgcagcagcacaccccaagcgctgcttttcacctgtacctttgttttattattattattattattgctgttgttgtcatcgttaactgtgggcatggaatgcgtgaggctggcttctgggttgtccacaccactctctgctgtgttgacttcctgttgtcttcatcaaagcttttttccgtggtattctaaaattaggccagcagtgggggctgggagggcatctgtgttagtcctttcctggctgtgacccgccacactcactgtcagtattaaggcccagcagcctgttgataagctaccctgtctcaccatgtgctggtgtggaaacggggcccagccagcacgcctcaaggtagatggaatccccactggtcagagaaaaagctatgcggacactccagcttggcctgggtcacagcactgactcctcacccgctagtctggctgttaagaggagaaagtgcactgccttccagcccaggaggaggacagcattttgtatttgttccactgatgcagcttagaaccacacccctgagagtcgtggcaaacctttcacaacctggaaaatgttgaaagcaaccattcctatttttgtttgttttttattaaatcttgcacaaaa

SEQ ID NO: 422496 - DNA, 4545 bp, Homo sapiens
  misc_feature (3842)..(3842): n is a, c, g, or t
gcggccgcgctgagcccctagcccgccgggagcgccaggccggccaggcctgcgccgccgccgccgccgccgtcgccgccgcgccgaccatgtcggcagccaaggagaacccgtgcaggaaattccaggccaacatcttcaacaagagcaagtgtcagaactgcttcaagccccgcgagtcgcatctgctcaacgacgaggacctgacgcaggcaaaacccatttatggcggttggctgctcctggctccagatgggaccgactttgacaacccagtgcaccggtctcggaaatggcagcgacggttcttcatcctttacgagcacggcctcttgcgctacgccctggatgagatgcccacgacccttcctcagggcaccatcaacatgaaccagtgcacagatgtggtggatggggagggccgcacgggccagaagttctccctgtgtattctgacgcctgagaaggagcatttcatccgggcggagaccaaggagatcgtcagtgggtggctggagatgctcatggtctatccccggaccaacaagcagaatcagaagaagaaacggaaagtggagccccccacaccacaggagcctgggcctgccaaggtggctgttaccagcagacagcagcagcagcagcagcagcatccccagtgctgagaaagtccccaccaccaagtccacactctggcaggaagaaatgaggaccaaggaccagccagatggcagcagcctgagtccagctcagagtcccagccagagccagcctcctgctgccagctccctgcgggaacctgggctagagagcaaagaagaggagagcgccatgagtagcgaccgcatggactgtggccgcaaagtccgggtggagagcggctacttctctctggagaagaccaaacaggacttgaaggctgaagaacagcagctgcccccgccgctctcccctcccagccccagcacccccaaccacaggaggtcccaggtgattgaaaagtttgaggccttggacattgagaaggcagagcacatggagaccaatgcagtggggccctcaccatccagcgacacacgccagggccgcagcgagaagagggcgttccctaggaagcgggacttcaccaatgaagcccccccagctcctctcccagacgcctcggcttcccccctgtctccacaccgaagagccaagtcactggacaggaggtccacggagccctccgtgacgcccgacctgctgaatttcaagaaaggctggctgactaagcagtatgaggacggccagtggaagaaacactggtttgtcctcgccgatcaaagcctgagatactacagggattcagtggctgaggaggcagccgacttggatggagaaattgacttgtccgcatgttacgatgtcacagagtatccagttcagagaaactatggcttccagatacatacaaaggagggcgagtttaccctgtcggccatgacatctgggattcggcggaactggatccagaccatcatgaagcacgtgcacccgaccactgccccggatgtgaccagctcgttgccagaggaaaaaaacaagagcagctgctcttttgagacctgcccgaggcctactgagaagcaagaggcagagctgggggagccggaccctgagcagaagaggagccgcgcacgggagcggaggcgagagggccgctccaagacctttgactgggctgagttccgtcccatccagcaggccctggctcaggagcgggtgggcggcgtggggcctgctgacacccacgagcccctgcgccctgaggcggagcctggggagctggagcgggagcgtgcacggaggcgggaggagcgccgcaagcgcttcgggatgctcgacgccacagacgggccaggcactgaggatgcagccctgcgcatggaggtggaccggagcccagggctgcctatgagcgacctcaaaacgcataacgtccacgtggagattgagcagcggtggcatcaggtggagaccacacctctccgggaagagaagcaggtgcccatcgcccccgtccacctgtcttctgaagatgggggtgaccggctctccacacacgagctgacctctctgctcgagaaggagctggagcagagccagaaggaggcctcagaccttctggagcagaaccggctcctgcaggaccagctgagggtggccctgggccgggagcagagcgcccgtgagggctacgtgctgcaggccacgtgcgagcgagggtttgcagcaatggaagaaacgcaccagaagaagattgaagatctccagaggcagcaccagcgggagctagagaaacttcgagaagagaaagaccgcctcctagccgaggagacagcggccaccatctcagccatcgaagccatgaagaacgcccaccgggaggaaatggagcgggagctggagaagagccagcggtcccagatcagcagcgtcaactcggatgttgaggccctgcggcgccagtacctggaggagctgcagtcggtgcagcgggaactggaggtcctctcggagcagtactcgcagaagtgcctggagaatgcccatctggcccaggcgctggaggccgagcggcaggccctgcggcagtgccagcgtgagaaccaggagctcaatgcccacaaccaggagctgaacaaccgcctggctgcagagatcacacggttgcggacgctgctgactggggacggcggtggggaggccactgggtcaccccttgcacagggcaaggatgcctatgaactagaggtcttattgcgggtaaaggaatcggaaatacagtacctgaaacaggagattagctccctcaaggatgagctgcagacggcactgcgggacaagaagtacgcaagtgacaagtacaaagacatctacacagagctcagcatcgcgaaggctaaggctgactgtgacatcagcaggttgaaggagcagctcaaggctgcaacggaagcactgggggagaagtcccctgacagtgccacggtgtccggatatgatataatgaaatctaaaagcaaccctgacttcttgaagaaagacagatcctgtgtcacccggcaactcagaaacatcaggtccaagagtctgaaggaaggcctgacggtgcaagaacggttgaagctctttgaatccagggacttgaagaaagactaggtgtgtcccatccaagttgagcacgcgccttccccagcttgcagcagcacaccccaagcgctgcttttcacctgtacctttgttttattattattattattattgctgttgttgtcatcgttaactgtgggcatggaatgcgtgaggctggcttctgggttgtccacaccactctctgctgtgttgacttcctgttgtcttcatcaaagcttttttccgtggtattctaaaattaggccagcagtgggggctgggagggcatctgtgttagtcctttcctggctgtgacccgccacactcactgtcagtattaaggcccagcagcctgttgataagctaccctgtctcaccatgtgctggtgtggaaacggggcccagccagcacgcctcaaggtagatggaatccccactggtcagagaaaaagctatgcggacactccagcttggcctgggtgggagggcatctgtgttagtcctttcctggctgtgacccgccacactcactgtcagtattaaggcccagcagcctgttgataagctaccctgtctcaccatgtgctggtgtggaaacggggcccagccagcacgcctcaaggtagatggaatccccactggttcagagaaaaagctatgcggaacantccagcttggcctgcacagcactgactcctcacccgctagtctggctgttaagaggagaaagtgcactgccttccagcccaggaggaggacagcattttgtatttgttccactgatgcagcttagaaccacacccctgagagtcgtggcaaacctttcacaacctggaaaatgttgaaagcaaccattcctatttttgtttgttttttattaaatcttgcacaaaaaaaaaaaaaaaaaaaaaaaaaaaaaaaaaaaaaaaaaaaaaaaaaaaaaaaaaaaaaaaaaaaaaaaaaaaaaaaaaaaaaaaaataaaaaaaaaaaaaaaaaaagaaggaaagcaacaacacggcggcgcgggaggggagatgttccatgaaggcgcgaaaaaacaacaaaacataaataataaagaaaaagcagccagcaacacagagggagagactaaaaaagagaacaagagacaagagaaaaaaacaaaaaaaaagacgagaaggagaaaagaaggcaggaagaaagatacaatgagcaaaggaaaaagagaagaaaaccataacacgaactatggagggaagaagaaagaagaagagcaaaagaagaaaaaaacgagaaagaagaaaagaagaaggaaagagggataaaaaataaacgagaagaaggaggagaagaaagagaaaaaagcagaaacagacaaggaagaagcg

SEQ ID NO: 422497 - DNA, 3735 bp, Homo sapiens
gcggccgcgctgagcccctagcccgccgggagcgccaggccggccaggcctgcgccgccgccgccgccgccgtcgccgccgcgccgaccatgtcggcagccaaggagaacccgtgcaggaaattccaggccaacatcttcaacaagagcaagtgtcagaactgcttcaagccccgcgagtcgcatctgctcaacgacgaggacctgacgcaggcaaaacccatttatggcggttggctgctcctggctccagatgggaccgactttgacaacccagtgcaccggtctcggaaatggcagcgacggttcttcatcctttacgagcacggcctcttgcgctacgccctggatgagatgcccacgacccttcctcagggcaccatcaacatgaaccagtgcacagatgtggtggatggggagggccgcacgggccagaagttctccctgtgtattctgacgcctgagaaggagcatttcatccgggcggagaccaaggagatcgtcagtgggtggctggagatgctcatggtctatccccggaccaacaagcagaatcagaagaagaaacggaaagtggagccccccacaccacaggagcctgggcctgccaaggtggctgttaccagcagacagcagcagcagcagcagcagcatccccagtgctgagaaagtccccaccaccaagtccacactctggcaggaagaaatgaggaccaaggaccagccagatggcagcagcctgagtccagctcagagtcccagccagagccagcctcctgctgccagctccctgcgggaacctgggctagagagcaaagaagaggagagcgccatgagtagcgaccgcatggactgtggccgcaaagtccgggtggagagcggctacttctctctggagaagaccaaacaggacttgaaggctgaagaacagcagctgcccccgccgctctcccctcccagccccagcacccccaaccacaggaggtcccaggtgattgaaaagtttgaggccttggacattgagaaggcagagcacatggagaccaatgcagtggggccctcaccatccagcgacacacgccagggccgcagcgagaagagggcgttccctaggaagcgggacttcaccaatgaagcccccccagctcctctcccagacgcctcggcttcccccctgtctccacaccgaagagccaagtcactggacaggaggtccacggagccctccgtgacgcccgacctgctgaatttcaagaaaggctggctgactaagcagtatgaggacggccagtggaagaaacactggtttgtcctcgccgatcaaagcctgagatactacagggattcagtggctgaggaggcagccgacttggatggagaaattgacttgtccgcatgttacgatgtcacagagtatccagttcagagaaactatggcttccagatacatacaaaggagggcgagtttaccctgtcggccatgacatctgggattcggcggaactggatccagaccatcatgaagcacgtgcacccgaccactgccccggatgtgaccagctcgttgccagaggaaaaaaacaagagcagctgctcttttgagacctgcccgaggcctactgagaagcaagaggcagagctgggggagccggaccctgagcagaagaggagccgcgcacgggagcggaggcgagagggccgctccaagacctttgactgggctgagttccgtcccatccagcaggccctggctcaggagcgggtgggcggcgtggggcctgctgacacccacgagcccctgcgccctgaggcggagcctggggagctggagcgggagcgtgcacggaggcgggaggagcgccgcaagcgcttcgggatgctcgacgccacagacgggccaggcactgaggatgcagccctgcgcatggaggtggaccggagcccagggctgcctatgagcgacctcaaaacgcataacgtccacgtggagattgagcagcggtggcatcaggtggagaccacacctctccgggaagagaagcaggtgcccatcgcccccgtccacctgtcttctgaagatgggggtgaccggctctccacacacgagctgacctctctgctcgagaaggagctggagcagagccagaaggaggcctcagaccttctggagcagaaccggctcctgcaggaccagctgagggtggccctgggccgggagcagagcgcccgtgagggctacgtgctgcaggccacgtgcgagcgagggtttgcagcaatggaagaaacgcaccagaagaagattgaagatctccagaggcagcaccagcgggagctagagaaacttcgagaagagaaagaccgcctcctagccgaggagacagcggccaccatctcagccatcgaagccatgaagaacgcccaccgggaggaaatggagcgggagctggagaagagccagcggtcccagatcagcagcgtcaactcggatgttgaggccctgcggcgccagtacctggaggagctgcagtcggtgcagcgggaactggaggtcctctcggagcagtactcgcagaagtgcctggagaatgcccatctggcccaggcgctggaggccgagcggcaggccctgcggcagtgccagcgtgagaaccaggagctcaatgcccacaaccaggagctgaacaaccgcctggctgcagagatcacacggttgcggacgctgctgactggggacggcggtggggaggccactgggtcaccccttgcacagggcaaggatgcctatgaactagaggtcttattgcgggtaaaggaatcggaaatacagtacctgaaacaggagattagctccctcaaggatgagctgcagacggcactgcgggacaagaagtacgcaagtgacaagtacaaagacatctacacagagctcagcatcgcgaaggctaaggctgactgtgacatcagcaggttgaaggagcagctcaaggctgcaacggaagcactgggggagaagtcccctgacagtgccacggtgtccggatatgatataatgaaatctaaaagcaaccctgacttcttgaagaaagacagatcctgtgtcacccggcaactcagaaacatcaggtccaagagtctgaaggaaggcctgacggtgcaagaacggttgaagctctttgaatccagggacttgaagaaagactaggtgtgtcccatccaagttgagcacgcgccttccccagcttgcagcagcacaccccaagcgctgcttttcacctgtacctttgttttattattattattattattgctgttgttgtcatcgttaactgtgggcatggaatgcgtgaggctggcttctgggttgtccacaccactctctgctgtgttgacttcgcctgttgataagctaccctgtctcaccatgtgctggtgtggaaacggggcccagccagcacgcctcaaggtagatggaatccccactggtcagagaaaaagctatgcggacactccagcttggcctgggtcacagcactgactcctcacccgctagtctggctgttaagaggagaaagtgcactgccttccagcccaggaggaggacagcattttgtatttgttccactgatgcagcttagaaccacacccctgagagtcgtggcaaacctttcacaacctggaaaatgttgaaagcaaccattcctatttttgtttgttttttattaaatcttgcacaaaa

SEQ ID NO: 422498 - DNA, 3812 bp, Homo sapiens
gcggccgcgctgagcccctagcccgccgggagcgccaggccggccaggcctgcgccgccgccgccgccgccgtcgccgccgcgccgaccatgtcggcagccaaggagaacccgtgcaggaaattccaggccaacatcttcaacaagagcaagtgtcagaactgcttcaagccccgcgagtcgcatctgctcaacgacgaggacctgacgcaggcaaaacccatttatggcggttggctgctcctggctccagatgggaccgactttgacaacccagtgcaccggtctcggaaatggcagcgacggttcttcatcctttacgagcacggcctcttgcgctacgccctggatgagatgcccacgacccttcctcagggcaccatcaacatgaaccagtgcacagatgtggtggatggggagggccgcacgggccagaagttctccctgtgtattctgacgcctgagaaggagcatttcatccgggcggagaccaaggagatcgtcagtgggtggctggagatgctcatggtctatccccggaccaacaagcagaatcagaagaagaaacggaaagtggagccccccacaccacaggagcctgggcctgccaaggtggctgttaccagcagacagcagcagcagcagcagcagcatccccagtgctgagaaagtccccaccaccaagtccacactctggcaggaagaaatgaggaccaaggaccagccagatggcagcagcctgagtccagctcagagtcccagccagagccagcctcctgctgccagctccctgcgggaacctgggctagagagcaaagaagaggagagcgccatgagtagcgaccgcatggactgtggccgcaaagtccgggtggagagcggctacttctctctggagaagaccaaacaggacttgaaggctgaagaacagcagctgcccccgccgctctcccctcccagccccagcacccccaaccacaggaggtcccaggtgattgaaaagtttgaggccttggacattgagaaggcagagcacatggagaccaatgcagtggggccctcaccatccagcgacacacgccagggccgcagcgagaagagggcgttccctaggaagcgggacttcaccaatgaagcccccccagctcctctcccagacgcctcggcttcccccctgtctccacaccgaagagccaagtcactggacaggaggtccacggagccctccgtgacgcccgacctgctgaatttcaagaaaggctggctgactaagcagtatgaggacggccagtggaagaaacactggtttgtcctcgccgatcaaagcctgagatactacagggattcagtggctgaggaggcagccgacttggatggagaaattgacttgtccgcatgttacgatgtcacagagtatccagttcagagaaactatggcttccagatacatacaaaggagggcgagtttaccctgtcggccatgacatctgggattcggcggaactggatccagaccatcatgaagcacgtgcacccgaccactgccccggatgtgaccagctcgttgccagaggaaaaaaacaagagcagctgctcttttgagacctgcccgaggcctactgagaagcaagaggcagagctgggggagccggaccctgagcagaagaggagccgcgcacgggagcggaggcgagagggccgctccaagacctttgactgggctgagttccgtcccatccagcaggccctggctcaggagcgggtgggcggcgtggggcctgctgacacccacgagcccctgcgccctgaggcggagcctggggagctggagcgggagcgtgcacggaggcgggaggagcgccgcaagcgcttcgggatgctcgacgccacagacgggccaggcactgaggatgcagccctgcgcatggaggtggaccggagcccagggctgcctatgagcgacctcaaaacgcataacgtccacgtggagattgagcagcggtggcatcaggtggagaccacacctctccgggaagagaagcaggtgcccatcgcccccgtccacctgtcttctgaagatgggggtgaccggctctccacacacgagctgacctctctgctcgagaaggagctggagcagagccagaaggaggcctcagaccttctggagcagaaccggctcctgcaggaccagctgagggtggccctgggccgggagcagagcgcccgtgagggctacgtgctgcaggccacgtgcgagcgagggtttgcagcaatggaagaaacgcaccagaagaagattgaagatctccagaggcagcaccagcgggagctagagaaacttcgagaagagaaagaccgcctcctagccgaggagacagcggccaccatctcagccatcgaagccatgaagaacgcccaccgggaggaaatggagcgggagctggagaagagccagcggtcccagatcagcagcgtcaactcggatgttgaggccctgcggcgccagtacctggaggagctgcagtcggtgcagcgggaactggaggtcctctcggagcagtactcgcagaagtgcctggagaatgcccatctggcccaggcgctggaggccgagcggcaggccctgcggcagtgccagcgtgagaaccaggagctcaatgcccacaaccaggagctgaacaaccgcctggctgcagagatcacacggttgcggacgctgctgactggggacggcggtggggaggccactgggtcaccccttgcacagggcaaggatgcctatgaactagaggtcttattgcgggtaaaggaatcggaaatacagtacctgaaacaggagattagctccctcaaggatgagctgcagacggcactgcgggacaagaagtacgcaagtgacaagtacaaagacatctacacagagctcagcatcgcgaaggctaaggctgactgtgacatcagcaggttgaaggagcagctcaaggctgcaacggaagcactgggggagaagtcccctgacagtgccacggtgtccggatatgatataatgaaatctaaaagcaaccctgacttcttgaagaaagacagatcctgtgtcacccggcaactcagaaacatcaggtccaagagtctgaaggaaggcctgacggtgcaagaacggttgaagctctttgaatccagggacttgaagaaagactaggtgtgtcccatccaagttgagcacgcgccttccccagcttgcagcagcacaccccaagcgctgcttttcacctgtacctttgttttattattattattattattgctgttgttgtcatcgttaactgtgggcatggaatgcgtgaggctggcttctgggttgtccacaccactctctgctgtgttgacttcctgttgtcttcatcaaagcttttttccgtggtattctaaaattaggccagcagtgggggctgggagggcatctgtgttagtcctttcctggctgtgacccgccacactcactgtcagtattaaggcccagcaccagcacgcctcaaggtagatggaatccccactggtcagagaaaaagctatgcggacactccagcttggcctgggtcacagcactgactcctcacccgctagtctggctgttaagaggagaaagtgcactgccttccagcccaggaggaggacagcattttgtatttgttccactgatgcagcttagaaccacacccctgagagtcgtggcaaacctttcacaacctggaaaatgttgaaagcaaccattcctatttttgtttgttttttattaaatcttgcacaaaa

SEQ ID NO: 422499 - DNA, 3756 bp, Homo sapiens
gcggccgcgctgagcccctagcccgccgggagcgccaggccggccaggcctgcgccgccgccgccgccgccgtcgccgccgcgccgaccatgtcggcagccaaggagaacccgtgcaggaaattccaggccaacatcttcaacaagagcaagtgtcagaactgcttcaagccccgcgagtcgcatctgctcaacgacgaggacctgacgcaggcaaaacccatttatggcggttggctgctcctggctccagatgggaccgactttgacaacccagtgcaccggtctcggaaatggcagcgacggttcttcatcctttacgagcacggcctcttgcgctacgccctggatgagatgcccacgacccttcctcagggcaccatcaacatgaaccagtgcacagatgtggtggatggggagggccgcacgggccagaagttctccctgtgtattctgacgcctgagaaggagcatttcatccgggcggagaccaaggagatcgtcagtgggtggctggagatgctcatggtctatccccggaccaacaagcagaatcagaagaagaaacggaaagtggagccccccacaccacaggagcctgggcctgccaaggtggctgttaccagcagacagcagcagcagcagcagcagcatccccagtgctgagaaagtccccaccaccaagtccacactctggcaggaagaaatgaggaccaaggaccagccagatggcagcagcctgagtccagctcagagtcccagccagagccagcctcctgctgccagctccctgcgggaacctgggctagagagcaaagaagaggagagcgccatgagtagcgaccgcatggactgtggccgcaaagtccgggtggagagcggctacttctctctggagaagaccaaacaggacttgaaggctgaagaacagcagctgcccccgccgctctcccctcccagccccagcacccccaaccacaggaggtcccaggtgattgaaaagtttgaggccttggacattgagaaggcagagcacatggagaccaatgcagtggggccctcaccatccagcgacacacgccagggccgcagcgagaagagggcgttccctaggaagcgggacttcaccaatgaagcccccccagctcctctcccagacgcctcggcttcccccctgtctccacaccgaagagccaagtcactggacaggaggtccacggagccctccgtgacgcccgacctgctgaatttcaagaaaggctggctgactaagcagtatgaggacggccagtggaagaaacactggtttgtcctcgccgatcaaagcctgagatactacagggattcagtggctgaggaggcagccgacttggatggagaaattgacttgtccgcatgttacgatgtcacagagtatccagttcagagaaactatggcttccagatacatacaaaggagggcgagtttaccctgtcggccatgacatctgggattcggcggaactggatccagaccatcatgaagcacgtgcacccgaccactgccccggatgtgaccagctcgttgccagaggaaaaaaacaagagcagctgctcttttgagacctgcccgaggcctactgagaagcaagaggcagagctgggggagccggaccctgagcagaagaggagccgcgcacgggagcggaggcgagagggccgctccaagacctttgactgggctgagttccgtcccatccagcaggccctggctcaggagcgggtgggcggcgtggggcctgctgacacccacgagcccctgcgccctgaggcggagcctggggagctggagcgggagcgtgcacggaggcgggaggagcgccgcaagcgcttcgggatgctcgacgccacagacgggccaggcactgaggatgcagccctgcgcatggaggtggaccggagcccagggctgcctatgagcgacctcaaaacgcataacgtccacgtggagattgagcagcggtggcatcaggtggagaccacacctctccgggaagagaagcaggtgcccatcgcccccgtccacctgtcttctgaagatgggggtgaccggctctccacacacgagctgacctctctgctcgagaaggagctggagcagagccagaaggaggcctcagaccttctggagcagaaccggctcctgcaggaccagctgagggtggccctgggccgggagcagagcgcccgtgagggctacgtgctgcaggccacgtgcgagcgagggtttgcagcaatggaagaaacgcaccagaagaagattgaagatctccagaggcagcaccagcgggagctagagaaacttcgagaagagaaagaccgcctcctagccgaggagacagcggccaccatctcagccatcgaagccatgaagaacgcccaccgggaggaaatggagcgggagctggagaagagccagcggtcccagatcagcagcgtcaactcggatgttgaggccctgcggcgccagtacctggaggagctgcagtcggtgcagcgggaactggaggtcctctcggagcagtactcgcagaagtgcctggagaatgcccatctggcccaggcgctggaggccgagcggcaggccctgcggcagtgccagcgtgagaaccaggagctcaatgcccacaaccaggagctgaacaaccgcctggctgcagagatcacacggttgcggacgctgctgactggggacggcggtggggaggccactgggtcaccccttgcacagggcaaggatgcctatgaactagaggtcttattgcgggtaaaggaatcggaaatacagtacctgaaacaggagattagctccctcaaggatgagctgcagacggcactgcgggacaagaagtacgcaagtgacaagtacaaagacatctacacagagctcagcatcgcgaaggctaaggctgactgtgacatcagcaggttgaaggagcagctcaaggctgcaacggaagcactgggggagaagtcccctgacagtgccacggtgtccggatatgatataatgaaatctaaaagcaaccctgacttcttgaagaaagacagatcctgtgtcacccggcaactcagaaacatcaggtccaagagtctgaaggaaggcctgacggtgcaagaacggttgaagctctttgaatccagggacttgaagaaagactaggtgtgtcccatccaagttgagcacgcgccttccccagcttgcagcagcacaccccaagcgctgcttttcacctgtacctttgttttattattattattattattgctgttgttgtcatcgttaactgtgggcatggaatgcgtgaggctggcttctgggttgtccacaccactctctgctgtgttgacttcctgttgtcttcatcaaagcttttttccgtggtattctaaaattaggccagcagtgggggctgggagggcatctgtgttagtcctttcctggctgtgacccgccacactcactgtcagtattaaggcccagcagcctgttgataagctaccctcacagcactgactcctcacccgctagtctggctgttaagaggagaaagtgcactgccttccagcccaggaggaggacagcattttgtatttgttccactgatgcagcttagaaccacacccctgagagtcgtggcaaacctttcacaacctggaaaatgttgaaagcaaccattcctatttttgtttgttttttattaaatcttgcacaaaa

SEQ ID NO: 422500 - DNA, 3689 bp, Homo sapiens
gcggccgcgctgagcccctagcccgccgggagcgccaggccggccaggcctgcgccgccgccgccgccgccgtcgccgccgcgccgaccatgtcggcagccaaggagaacccgtgcaggaaattccaggccaacatcttcaacaagagcaagtgtcagaactgcttcaagccccgcgagtcgcatctgctcaacgacgaggacctgacgcaggcaaaacccatttatggcggttggctgctcctggctccagatgggaccgactttgacaacccagtgcaccggtctcggaaatggcagcgacggttcttcatcctttacgagcacggcctcttgcgctacgccctggatgagatgcccacgacccttcctcagggcaccatcaacatgaaccagtgcacagatgtggtggatggggagggccgcacgggccagaagttctccctgtgtattctgacgcctgagaaggagcatttcatccgggcggagaccaaggagatcgtcagtgggtggctggagatgctcatggtctatccccggaccaacaagcagaatcagaagaagaaacggaaagtggagccccccacaccacaggagcctgggcctgccaaggtggctgttaccagcagacagcagcagcagcagcagcagcatccccagtgctgagaaagtccccaccaccaagtccacactctggcaggaagaaatgaggaccaaggaccagccagatggcagcagcctgagtccagctcagagtcccagccagagccagcctcctgctgccagctccctgcgggaacctgggctagagagcaaagaagaggagagcgccatgagtagcgaccgcatggactgtggccgcaaagtccgggtggagagcggctacttctctctggagaagaccaaacaggacttgaaggctgaagaacagcagctgcccccgccgctctcccctcccagccccagcacccccaaccacaggaggtcccaggtgattgaaaagtttgaggccttggacattgagaaggcagagcacatggagaccaatgcagtggggccctcaccatccagcgacacacgccagggccgcagcgagaagagggcgttccctaggaagcgggacttcaccaatgaagcccccccagctcctctcccagacgcctcggcttcccccctgtctccacaccgaagagccaagtcactggacaggaggtccacggagccctccgtgacgcccgacctgctgaatttcaagaaaggctggctgactaagcagtatgaggacggccagtggaagaaacactggtttgtcctcgccgatcaaagcctgagatactacagggattcagtggctgaggaggcagccgacttggatggagaaattgacttgtccgcatgttacgatgtcacagagtatccagttcagagaaactatggcttccagatacatacaaaggagggcgagtttaccctgtcggccatgacatctgggattcggcggaactggatccagaccatcatgaagcacgtgcacccgaccactgccccggatgtgaccagctcgttgccagaggaaaaaaacaagagcagctgctcttttgagacctgcccgaggcctactgagaagcaagaggcagagctgggggagccggaccctgagcagaagaggagccgcgcacgggagcggaggcgagagggccgctccaagacctttgactgggctgagttccgtcccatccagcaggccctggctcaggagcgggtgggcggcgtggggcctgctgacacccacgagcccctgcgccctgaggcggagcctggggagctggagcgggagcgtgcacggaggcgggaggagcgccgcaagcgcttcgggatgctcgacgccacagacgggccaggcactgaggatgcagccctgcgcatggaggtggaccggagcccagggctgcctatgagcgacctcaaaacgcataacgtccacgtggagattgagcagcggtggcatcaggtggagaccacacctctccgggaagagaagcaggtgcccatcgcccccgtccacctgtcttctgaagatgggggtgaccggctctccacacacgagctgacctctctgctcgagaaggagctggagcagagccagaaggaggcctcagaccttctggagcagaaccggctcctgcaggaccagctgagggtggccctgggccgggagcagagcgcccgtgagggctacgtgctgcaggccacgtgcgagcgagggtttgcagcaatggaagaaacgcaccagaagaagattgaagatctccagaggcagcaccagcgggagctagagaaacttcgagaagagaaagaccgcctcctagccgaggagacagcggccaccatctcagccatcgaagccatgaagaacgcccaccgggaggaaatggagcgggagctggagaagagccagcggtcccagatcagcagcgtcaactcggatgttgaggccctgcggcgccagtacctggaggagctgcagtcggtgcagcgggaactggaggtcctctcggagcagtactcgcagaagtgcctggagaatgcccatctggcccaggcgctggaggccgagcggcaggccctgcggcagtgccagcgtgagaaccaggagctcaatgcccacaaccaggagctgaacaaccgcctggctgcagagatcacacggttgcggacgctgctgactggggacggcggtggggaggccactgggtcaccccttgcacagggcaaggatgcctatgaactagaggtcttattgcgggtaaaggaatcggaaatacagtacctgaaacaggagattagctccctcaaggatgagctgcagacggcactgcgggacaagaagtacgcaagtgacaagtacaaagacatctacacagagctcagcatcgcgaaggctaaggctgactgtgacatcagcaggttgaaggagcagctcaaggctgcaacggaagcactgggggagaagtcccctgacagtgccacggtgtccggatatgatataatgaaatctaaaagcaaccctgacttcttgaagaaagacagatcctgtgtcacccggcaactcagaaacatcaggtccaagagtctgaaggaaggcctgacggtgcaagaacggttgaagctctttgaatccagggacttgaagaaagactaggtgtgtcccatccaagttgagcacgcgccttccccagcttgcagcagcacaccccaagcgctgcttttcacctgtacctttgttttattattattattattattgctgttgttgtcatcgttaactgtgggcatggaatgcgtgaggctggcttctgggttgtccacaccactctctgctgtgttgacttcctgttgtcttcatcaaagcttttttccgtggtattctaaaattaggccagcagtgggggctgggagggcatctgtgttagtcctttcctggctgtgacccgccacactcactgtcagtattaaggcccagcagcctgttgataagctaccctgtctcaccatgtgctggtgtggaaacggggcccagccagcacgcctcaaggtagatggaatccccactggttgtcttggttgttagaggaggtgcctggctttcagcccaggagggggacccatcttgcatttgctccactgccg

SEQ ID NO: 422501 - DNA, 1179 bp, Homo sapiens
tccagactgccttcagactccaaggatgcctatgaactagaggtcttattgcgggtaaaggaatcggaaatacagtacctgaaacaggagattagctccctcaaggatgagctgcagacggcactgcgggacaagaagtacgcaagtgacaagtacaaagacatctacacagagctcagcatcgcgaaggctaaggctgactgtgacatcagcaggttgaaggagcagctcaaggctgcaacggaagcactgggggagaagtcccctgacagtgccacggtgtccggatatgatataatgaaatctaaaagcaaccctgacttcttgaagaaagacagatcctgtgtcacccggcaactcagaaacatcaggtccaagtccgtaattgagcaggtctcgtgggatacctgaaatgcacccgcttcccggcccatgcaggagagtctgaaggaaggcctgacggtgcaagaacggttgaagctctttgaatccagggacttgaagaaagactaggtgtgtcccatccaagttgagcacgcgccttccccagcttgcagcagcacaccccaagcgctgcttttcacctgtacctttgttttattattattattattattgctgttgttgtcatcgttaactgtgggcatggaatgcgtgaggctggcttctgggttgtccacaccactctctgctgtgttgacttcctgttgtcttcatcaaagcttttttccgtggtattctaaaattaggccagcagtgggggctgggagggcatctgtgttagtcctttcctggctgtgacccgccacactcactgtcagtattaaggcccagcagcctgttgataagctaccctgtctcaccatgtgctggtgtggaaacggggcccagccagcacgcctcaaggtagatggaatccccactggtcagagaaaaagctatgcggacactccagcttggcctgggtcacagcactgactcctcacccgctagtctggctgttaagaggagaaagtgcactgccttccagcccaggaggaggacagcattttgtatttgttccactgatgcagcttagaaccacacccctgagagtcgtggcaaacctttcacaacctggaaaatgttgaaagcaaccattcctatttttgtttgttttttattaaatcttgcacaaaa

SEQ ID NO: 422502 - DNA, 2258 bp, Homo sapiens
gcggccgcgctgagcccctagcccgccgggagcgccaggccggccaggcctgcgccgccgccgccgccgccgtcgccgccgcgccgaccatgtcggcagccaaggagaacccgtgcaggaaattccaggccaacatcttcaacaagagcaagtgtcagaactgcttcaagccccgcgagtcgcatctgctcaacgacgaggacctgacgcaggcaaaacccatttatggcggttggctgctcctggctccagatgggaccgactttgacaacccagtgcaccggtctcggaaatggcagcgacggttcttcatcctttacgagcacggcctcttgcgctacgccctggatgagatgcccacgacccttcctcagggcaccatcaacatgaaccagtgcacagatgtggtggatggggagggccgcacgggccagaagttctccctgtgtattctgacgcctgagaaggagcatttcatccgggcggagaccaaggagatcgtcagtgggtggctggagatgctcatggtctatccccggaccaacaagcagaatcagaagaagaaacggaaagtggagccccccacaccacaggagcctgggcctgccaaggtggctgttaccagcagacagcagcagcagcagcagcagcatccccagtgctgagaaagtccccaccaccaagtccacactctggcaggaagaaatgaggaccaaggaccagccagatggcagcagcctgagtccagctcagagtcccagccagagccagcctcctgctgccagctccctgcgggaacctgggctagagagcaaagaagaggagagcgccatgagtagcgaccgcatggactgtggccgcaaagtccgggtggagagcggctacttctctctggagaagaccaaacaggacttgaaggctgaagaacagcagctgcccccgccgctctcccctcccagccccagcacccccaaccacaggaggtcccaggtgattgaaaagtttgaggccttggacattgagaaggcagagcacatggagaccaatgcagtggggccctcaccatccagcgacacacgccagggccgcagcgagaagagggcgttccctaggaagcgggacttcaccaatgaagcccccccagctcctctcccagacgcctcggcttcccccctgtctccacaccgaagagccaagtcactggacaggaggtccacggagccctccgtgacgcccgacctgctgaatttcaagaaaggctggctgactaagcagtatgaggacggccagtggaagaaacactggtttgtcctcgccgatcaaagcctgagatactacagggattcagtggctgaggaggcagccgacttggatggagaaattgacttgtccgcatgttacgatgtcacagagtatccagttcagagaaactatggcttccagatacatacaaaggagggcgagtttaccctgtcggccatgacatctgggattcggcggaactggatccagaccatcatgaagcacgtgcacccgaccactgccccggatgtgaccagctctttgaatccagggacttgaagaaagactaggtgtgtcccatccaagttgagcacgcgccttccccagcttgcagcagcacaccccaagcgctgcttttcacctgtacctttgttttattattattattattattgctgttgttgtcatcgttaactgtgggcatggaatgcgtgaggctggcttctgggttgtccacaccactctctgctgtgttgacttcctgttgtcttcatcaaagcttttttccgtggtattctaaaattaggccagcagtgggggctgggagggcatctgtgttagtcctttcctggctgtgacccgccacactcactgtcagtattaaggcccagcagcctgttgataagctaccctgtctcaccatgtgctggtgtggaaacggggcccagccagcacgcctcaaggtagatggaatccccactggtcagagaaaaagctatgcggacactccagcttggcctgggtcacagcactgactcctcacccgctagtctggctgttaagaggagaaagtgcactgccttccagcccaggaggaggacagcattttgtatttgttccactgatgcagcttagaaccacacccctgagagtcgtggcaaacctttcacaacctggaaaatgttgaaagcaaccattcctatttttgtttgttttttattaaatcttgcacaaaa

SEQ ID NO: 422503 - DNA, 1262 bp, Homo sapiens
cagaaatgggtctgagggcagcaggtgctgcggaggcactgtaggagcgaggccctgtcccgggacacccatccttgctggggattccctggagcatctggtcctcctcagctgaggctgtcaggtgaagaatctctggagctggatgtggacaaatccattcacaagacaagacacggggatgggcagtctccttgctcattgcactgttttccctggctggattcgtttgatcactgcttctcttaaagagccctaagctcagaatttagctgcttaaacacatggtcttgtctctctgatttttttttcctttttcatccaagtaattttgtgaaggggaaaacatcctccaataacagcatttcccggggactctcctcctggcatgcccactaaccgcacctgcacccggctctctgactgatgccggctccaccagcggtccggtctggtccggtccggtccagtgcagggggtctaacggtgtgtttattttctcctcctgctctgtctctacccagagtctgaaggaaggcctgacggtgcaagaacggttgaagctctttgaatccagggacttgaagaaagactaggtgtgtcccatccaagttgagcacgcgccttccccagcttgcagcagcacaccccaagcgctgcttttcacctgtacctttgttttattattattattattattgctgttgttgtcatcgttaactgtgggcatggaatgcgtgaggctggcttctgggttgtccacaccactctctgctgtgttgacttcctgttgtcttcatcaaagcttttttccgtggtattctaaaattaggccagcagtgggggctgggagggcatctgtgttagtcctttcctggctgtgacccgccacactcactgtcagtattaaggcccagcagcctgttgataagctaccctgtctcaccatgtgctggtgtggaaacggggcccagccagcacgcctcaaggtagatggaatccccactggtcagagaaaaagctatgcggacactccagcttggcctgggtcacagcactgactcctcacccgctagtctggctgttaagaggagaaagtgcactgccttccagcccaggaggaggacagcattttgtatttgttccactgatgcagcttagaaccacacccctgagagtcgtggcaaacctttcacaacctggaaaatgttgaaagcaaccattcctatttttgtttgttttttattaaatcttgcacaaaa

SEQ ID NO: 422504 - DNA, 979 bp, Homo sapiens
gcggccgcgctgagcccctagcccgccgggagcgccaggccggccaggcctgcgccgccgccgccgccgccgtcgccgccgcgccgaccatgtcggcagccaaggagaacccgtgcaggaaattccaggccaacatcttcaacaagagcaagtgtcagaactgcttcaagccccgcgatccgtaattgagcaggtctcgtgggatacctgaaatgcacccgcttcccggcccatgcaggagagtctgaaggaaggcctgacggtgcaagaacggttgaagctctttgaatccagggacttgaagaaagactaggtgtgtcccatccaagttgagcacgcgccttccccagcttgcagcagcacaccccaagcgctgcttttcacctgtacctttgttttattattattattattattgctgttgttgtcatcgttaactgtgggcatggaatgcgtgaggctggcttctgggttgtccacaccactctctgctgtgttgacttcctgttgtcttcatcaaagcttttttccgtggtattctaaaattaggccagcagtgggggctgggagggcatctgtgttagtcctttcctggctgtgacccgccacactcactgtcagtattaaggcccagcagcctgttgataagctaccctgtctcaccatgtgctggtgtggaaacggggcccagccagcacgcctcaaggtagatggaatccccactggtcagagaaaaagctatgcggacactccagcttggcctgggtcacagcactgactcctcacccgctagtctggctgttaagaggagaaagtgcactgccttccagcccaggaggaggacagcattttgtatttgttccactgatgcagcttagaaccacacccctgagagtcgtggcaaacctttcacaacctggaaaatgttgaaagcaaccattcctatttttgtttgttttttattaaatcttgcacaaaa

SEQ ID NO: 422505 - DNA, 3194 bp, Homo sapiens
gcggccgcgctgagcccctagcccgccgggagcgccaggccggccaggcctgcgccgccgccgccgccgccgtcgccgccgcgccgaccatgtcggcagccaaggagaacccgtgcaggaaattccaggccaacatcttcaacaagagcaagtgtcagaactgcttcaagccccgcgagtcgcatctgctcaacgacgaggacctgacgcaggcaaaacccatttatggcggttggctgctcctggctccagatgggaccgactttgacaacccagtgcaccggtctcggaaatggcagcgacggttcttcatcctttacgagcacggcctcttgcgctacgccctggatgagatgcccacgacccttcctcagggcaccatcaacatgaaccagtgcacagatgtggtggatggggagggccgcacgggccagaagttctccctgtgtattctgacgcctgagaaggagcatttcatccgggcggagaccaaggagatcgtcagtgggtggctggagatgctcatggtctatccccggaccaacaagcagaatcagaagaagaaacggaaagtggagccccccacaccacaggagcctgggcctgccaaggtggctgttaccagcagacagcagcagcagcagcagcagcatccccagtgctgagaaagtccccaccaccaagtccacactctggcaggaagaaatgaggaccaaggaccagccagatggcagcagcctgagtccagctcagagtcccagccagagccagcctcctgctgccagctccctgcgggaacctgggctagagagcaaagaagaggagagcgccatgagtagcgaccgcatggactgtggccgcaaagtccgggtggagagcggctacttctctctggagaagaccaaacaggacttgaaggctgaagaacagcagctgcccccgccgctctcccctcccagccccagcacccccaaccacaggaggtcccaggtgattgaaaagtttgaggccttggacattgagaaggcagagcacatggagaccaatgcagtggggccctcaccatccagcgacacacgccagggccgcagcgagaagagggcgttccctaggaagcgggacttcaccaatgaagcccccccagctcctctcccagacgcctcggcttcccccctgtctccacaccgaagagccaagtcactggacaggaggtccacggagccctccgtgacgcccgacctgctgaatttcaagaaaggctggctgactaagcagtatgaggacggccagtggaagaaacactggtttgtcctcgccgatcaaagcctgagatactacagggattcagtggctgaggaggcagccgacttggatggagaaattgacttgtccgcatgttacgatgtcacagagtatccagttcagagaaactatggcttccagatacatacaaaggagggcgagtttaccctgtcggccatgacatctgggattcggcggaactggatccagaccatcatgaagcacgtgcacccgaccactgccccggatgtgaccagctcgttgccagaggaaaaaaacaagagcagctgctcttttgagacctgcccgaggcctactgagaagcaagaggcagagctgggggagccggaccctgagcagaagaggagccgcgcacgggagcggaggcgagagggccgctccaagacctttgactgggctgagttccgtcccatccagcaggccctggctcaggagcgggtgggcggcgtggggcctgctgacacccacgagcccctgcgccctgaggcggagcctggggagctggagcgggagcgtgcacggaggcgggaggagcgccgcaagcgcttcgggatgctcgacgccacagacgggccaggcactgaggatgcagccctgcgcatggaggtggaccggagcccagggctgcctatgagcgacctcaaaacgcataacgtccacgtggagattgagcagcggtggcatcaggtggagaccacacctctccgggaagagaagcaggtgcccatcgcccccgtccacctgtcttctgaagatgggggtgaccggctctccacacacgagctgacctctctgctcgagaaggagctggagcagagccagaaggaggcctcagaccttctggagcagaaccggctcctgcaggaccagctgagggtggccctgggccgggagcagagcgcccgtgagggctacgtgctgcaggccacgtgcgagcgagggtttgcagcaatggaagaaacgcaccagaagaagattgaagatctccagaggcagcaccagcgggagctagagaaacttcgagaagagaaagaccgcctcctagccgaggagacagcggccaccatctcagccatcgaagccatgaagaacgcccaccgggaggaaatggagcgggagctggagaagagccagcggtcccagatcagcagcgtcaactcggatgttgaggccctgcggcgccagtacctggaggagctgcagtcggtgcagcgggaactggaggtcctctcggagcagtactcgcagaagtgcctggagaatgcccatctggcccaggcgctggaggccgagcggcaggccctgcggcagtgccagcgtgagaaccaggagctcaatgcccacaaccaggagctgaacaaccgcctggctgcagagatcacacggttgcggacgctgctgactggggacggcggtggggaggccactgggtcaccccttgcacagggcaaggatgcctatgaactagaggtcttattgcgggtaaaggaatcggaaatacagtacctgaaacaggagattagctccctcaaggatgagctgcagacggcactgcgggacaagaagtacgcaagtgacaagtacaaagacatctacacagagctcagcatcgcgaaggctaaggctgactgtgacatcagcaggttgaaggagcagctcaaggctgcaacggaagcactgggggagaagtcccctgacagtgccacggtgtccggatatgatataatgaaatctaaaagcaaccctgacttcttgaagaaagacagatcctgtgtcacccggcaactcagaaacatcaggtccaaggtgagtctggggtccagccccctggtgggaggggcttgagggacactggggagagtagcccaaat

SEQ ID NO: 422506 - DNA, 1115 bp, Homo sapiens
gcggccgcgctgagcccctagcccgccgggagcgccaggccggccaggcctgcgccgccgccgccgccgccgtcgccgccgcgccgaccatgtcggcagccaaggagaacccgtgcaggaaattccaggccaacatcttcaacaagagcaagtgtcagaactgcttcaagccccgcgagtcgcatctgctcaacgacgaggacctgacgcaggcaaaacccatttatggcggttggctgctcctggctccagatgggaccgactttgacaacccagtgcaccggtctcggaaatggcagcgacggttcttcatcctttacgagcacggcctcttgcgctacgccctggatgagatgcccacgacccttcctcagggcaccatcaacatgaaccagtgcacagatgtggtggatggggagggccgcacgggccagaagttctccctgtgtattctgacgcctgagaaggagcatttcatccgggcggagaccaaggagatcgtcagtgggtggctggagatgctcatggtctatccccggaccaacaagcagaatcagaagaagaaacggaaagtggagccccccacaccacaggagcctgggcctgccaaggtggctgttaccagcagacagcagcagcagcagcagcagcatccccagtgctgagaaagtccccaccaccaagtccacactctggcaggaagaaatgaggaccaaggaccagccagatggcagcagcctgagtccagctcagagtcccagccagagccagcctcctgctgccagctccctgcgggaacctgggctagagagcaaagaagaggagagcgccatgagtagcgaccgcatggactgtggccgcaaagtccgggtggagagcggctacttctctctggagaagaccaaacaggacttgaaggctgaagaacagcagctgcccccgccgctctcccctcccagccccagcacccccaaccacaggtacagttgccccgagtcgccctcccaggagctcggtggtcctcttccttccccaggtcctcgactcccccaccaaatggtctgcagcatctccctcagctccctggatgtggccagccagccacctgcctacgt

SEQ ID NO: 422507 - DNA, 991 bp, Homo sapiens
gcggccgcgctgagcccctagcccgccgggagcgccaggccggccaggcctgcgccgccgccgccgccgccgtcgccgccgcgccgaccatgtcggcagccaaggagaacccgtgcaggaaattccaggccaacatcttcaacaagagcaagtgtcagaactgcttcaagccccgcgagtcgcatctgctcaacgacgaggacctgacgcaggcaaaacccatttatggcggttggctgctcctggctccagatgggaccgactttgacaacccagtgcaccggtctcggaaatggcagcgacggttcttcatcctttacgagcacggcctcttgcgctacgccctggatgagatgcccacgacccttcctcagggcaccatcaacatgaaccagtgcacagatgtggtggatggggagggccgcacgggccagaagttctccctgtgtattctgacgcctgagaaggagcatttcatccgggcggagaccaaggagatcgtcagtgggtggctggagatgctcatggtctatccccggaccaacaagcagaatcagaagaagaaacggaaagtggagccccccacaccacaggagcctgggcctgccaaggtggctgttaccagcagacagcagcagcagcagcagcagcatccccagtgctgagaaagtccccaccaccaagtccacactctggcaggaagaaatgaggaccaaggaccagccagatggcagcagcctgagtccagctcagagtcccagccagagccagcctcctgctgccagctccctgcgggaacctgggctagagagcaaagaagtggggagcgcctttgcctttaaagccagcaggcaatatgccaccctggccgacgtccctaaggccatcaggatcagccaccgagaagccttccaggtggagagaaggcggctggagcgtagaactcgggcccggagccctggcagggaggaggtggcccgtctgtttggca

SEQ ID NO: 422508 - DNA, 855 bp, Homo sapiens
gcggccgcgctgagcccctagcccgccgggagcgccaggccggccaggcctgcgccgccgccgccgccgccgtcgccgccgcgccgaccatgtcggcagccaaggagaacccgtgcaggaaattccaggccaacatcttcaacaagagcaagtgtcagaactgcttcaagccccgcgagtcgcatctgctcaacgacgaggacctgacgcaggcaaaacccatttatggcggttggctgctcctggctccagatgggaccgactttgacaacccagtgcaccggtctcggaaatggcagcgacggttcttcatcctttacgagcacggcctcttgcgctacgccctggatgagatgcccacgacccttcctcagggcaccatcaacatgaaccagtgcacagatgtggtggatggggagggccgcacgggccagaagttctccctgtgtattctgacgcctgagaaggagcatttcatccgggcggagaccaaggagatcgtcagtgggtggctggagatgctcatggtctatccccggaccaacaagcagaatcagaagaagaaacggaaagtggagccccccacaccacaggagcctgggcctgccaaggtggctgctgctgctgctgctgctgctgctaaagttccagcaaaaaagatcaccgccgcgagtaaaaaggctccagcccagaaggttcctgcccagaaagccacaggccagaaagcagcgcctgctccaaaagctcagaagggtcaaaaagctccagcccagaaagcacctgctccaaaggcatttggcaagaaagcataagtggcaatcataaaaagtaataaaggttctttttgacctgtta

SEQ ID NO: 422509 - DNA, 575 bp, Homo sapiens
ccttggacattgagaaggcagagcacatggagaccaatgcagtggggccctcaccatccagcgacacacgccagggccgcagcgagaagagggcgttccctaggaagcgggtgagctcctggggctgggcagcacctcaggggtggctcgggggcgggtcagcatgcaccccatgcgccaagtcccctccacacaggcctgggatgtgctcctgccaggcttctctccaaccacctcctctgcatagtgacttcttgagagcaggcctgtctcctgcagcttcatatcagagccttctccgtctctgctgaaggatattctcatgcattttagatcccagatttaattaggatcactctcttcctatctgagacagcccagcaacaaggctgaatgtcacaccttcctaactctttctttcagtacaactacacccctcgtttctccactcagcccaaggtagactcggcttctgaaatcctcctgggcacccgcctgctgcttttgtagccggccaagtctaagctcatcttctcctggcttctctcttgttcacaaggtgcctagtgcctact

SEQ ID NO: 422510 - DNA, 394 bp, Homo sapiens
gtggaccggagcccagggctgcctatgagcgacctcaaaacgcataacgtccacgtggagattgagcagcggtggcatcaggtggagaccacacctctccgggaagagaagcaggtgcccatcgcccccgtccacctgtcttctgaagatgggggtgaccggctctccacacacgagctgacctctctgctcgagaaggaggtaatagcctgggaccagatccccaccctgctcccagcagcctttccagagcatcagctgtgcccagctgtggcctgaggggttcatctagacagtcctaccctcgagggacttgcagacccctaggggagacagacgcatagatgagtcctcatagttgaggcagacctgagagctgtgggagcgtgccagt

SEQ ID NO: 422511 - DNA, 427 bp, Homo sapiens
gggtacgcctacgaggtaccgggaccggaattcccggggaggacacttacaactaaaatcgcggccgccgtcgactttttttttagatgaacaccgttttctcttgtttatttaaatttgggagccaaatggtatggagaaggtaatgatggttttcaaaatacagtaagtcttcatttaacattgttaatagaacaatgaaaactccaacttttacgtgaaacagtgtatagccagtcctcaaataactgccttttgttcaacatcctttccttgtaacaactgatgagaaaaagtatggttttgttatacatcatttctcttgaagtacaagttttcaagaacctattgacaaggttaagtgtgggcttacagtttaccaatcttagcctcagattgggctagggcagggatgacaaaccaggct

SEQ ID NO: 422512 - DNA, 5298 bp, Homo sapiens
cccgcacagacgtcaggcggcaggcccggccccttcccacagccggaggggggttgcgcacagcgacgggggatcggggcggggagaggccgtgcgcgcctaggggcggcagacccgggcgcgcgccacgggggtcgctgtcatggcaacgcacccgctcccgcatggagggcgcgaagccgcattgtgagcgctggccctggagcccgcggccccgcggctgagagcgagcctcggtcccgctgaagctcccctgacttctgcctgctccctctcccgacgggacggaaagggccggggctcgggcatggggtcccctgcggtccgagcctgcccacggcgaagccggtgcagcctggccccgtgacccctctgaatccccgtccggccgtcgccgtgcagttgtcaagtttctgggaagattagtgggagcgcagccgcccgagcccgacggccggagggtcgcggccagtcccccttgccgggtcgccacgtcccacaaggtccttcccggccgctccgtgggaggcggggcgcaggttggagtaacagggacgggcttgagctggtacggaaccgggcaaggtgagagaagtgtcttccacgcgattcccaagcctcgctagggaatcgagggagaagaaaggttgctcagagtgataaagaacatgccgttgcaaacggaagagcaacgtgcccgaatctaggtgacaggaagggcttaggccttttcggcacgaatggagccttccagtcaacatgcttctacgtgatgcagctttatagcgcaaaaaaatgacaatgcaaggggtacaaacagccctgctagaccaacagcccgagcctcgacagtctacatccggcgccttcaagcccccaaccacacactgcgaagtgggaaaagttcccagcgcggcttggcgaacccgctaacacggcgctctcacgagctgctggaaaagaccttcgcgagagggcgcagggagtcccgctccctggagggcccgcccccttggaggggaccggaagcgcttgtcctggcccggaagcagtgctgactccgtacacgcgcgctgcggcatggcggcccaccgccccggcccgctcaagcagcagaataaagctcataaaggcggacggcatcggggtcggggatctgcacagcgggacggcaagggccgtctggcactgaaaaccctaagcaagaaggtgagaaaagaactcagcagagtcgaccagaggcatcgcgccagccagctccgaaagcagaagaaggaggcggttctggcagagaagagacagctgggtggcaaggatggccctcctcatcaggtactggtggtgcccctgcacagcagaatttccctgccagaggccatgcagctgcttcaagatagggacactggaacagtacacttgaatgaattgggaaacacccagaactttatgctgctgtgcccccgcttgaaacatcggtggtttttcacctcagcaaggccaggggatctgcacgttgtgttagacatggctaaagtagctgataccatcctgttcctccttgatccactagaaggctgggacagcaccggtgattactgtctttcctgcctctttgctcagggccttccgacctatacactagctgtccaggggatttctggcctcccactgaagaaacaaatagataccaggaagaagctaagtaaagcagtggagaagcgctttccgcatgacaaactcctcttgttagacactcaacaggaggcagggatgctgcttaggcagttggctaaccagaagcaacagcatcttgcttttcgagatcggcgggcctacctatttgcccatgctgttgattttgttcctagtgaagagaataacttggtgggcaccttgaaaatttcaggctatgttcgagggcagactctgaatgtcaataggttgctgcatatcgttggatatggtgatttccagatgaaacagatagatgcccccggagaccctttccctttaaatcctagaggaattaaaccccaaaaggacccagacatggcaatggagatttgtgctacggatgctgtagatgatatggaagaaggtcttaaagtcctaatgaaggcagaccctggtagacaggaatccttgcaagcagaggttatcccagatccaatggagggagagcaaacctggcccactgaggaggagctgagcgaggcaaaggatttcttgaaggaaagttctaaggtggtaaagaaggtccccaaaggaacatccagttaccaagctgaatggattttggatggtggcagccaaagtggtggggaaggagatgaatatgaatatgatgatatggaacatgaggattttatggaggaggaatctcaggatgagagtagtgaagaagaggaagaatatgaaactatgactattggggagtctgtgcatgatgatctgtatgataagaaagtagatgaagaagctgaggcaaaaatgttggagaaatataaacaagaaagactggaagagatgtttccagatgaagtggacacgccccgtgatgtggctgctcgaattcgatttcagaaatacagaggccttaagagcttccggacatctccatgggatcctaaggaaaaccttcctcaagattatgctcgaatatttcagtttcagaactttactaacactaggaaaagcatctttaaagaggttgaagaaaaagaggttgaaggagctgaggttggctggtatgtcacacttcatgtctctgaagtccccgtctcagtggtcgagtgcttcaggcaaggaacacccttgattgcattttctttactacctcatgaacagaagatgtcagtattgaatatggtggtgaggcgtgaccctggcaacactgaacctgtgaaagccaaggaagagctcatatttcactgtggattcaggcgcttccgagcctcacctttattctctcagcacactgcagcggacaaacataaattgcagagattcctgactgctgacatggccctggtggcgacagtctatgcgccaatcacttttcctcctgcatctgtgctgcttttcaagcaaaaaagcaatggaatgcacagcctcattgctacaggccatcttatgtcagtagatccagacagaatggtcatcaagagagttgttctgagtggtcatcctttcaaaatttttactaagatggcagtagtacgttacatgttcttcaacagagaggatgtgctgtggtttaaaccagtggaactgagaacgaagtggggccggagaggacatatcaaggaacctttaggtacccatggccacatgaaatgcagctttgatgggaagctaaaatctcaagacacagtactgatgaacctgtataaacgagtcttccccaaatggacttatgatccatatgtaccagaaccagtaccctggctgaaaagtgagatttcttcaacagtgcctcaagggggcatggagtaatggattcaaagagattctgtcttaccggtgccagtcagtactccagggatgggaggcacaagttgtgattgggcaaagtttattttctatgtcagcctgtcagtccactgccccattttgcaagacttttttttagccttgacaaaatgtctcagttaagtataaaagtttttccactacttagtccaaaaaaaactattaaatcttaatgaaatagccactctccattaagaatctgataactaagagttgacaatactaggaaacaaaatgtcttcagtatctaaagacactgaattcccaccatttccttttctgtaaattaaacagaaacagactgataagaagctggcctttcagcctgcttcacccaagttatggaggaggttaagtctacatttccaccactgagcacaatacaaatgttctttacttctggggaaacagtttgaaaatgttgagacagcacagcagccactccaacaccagctgtaggttcaatgagtagtttcatcctctcccacaccagctgggttgcacactgttgatatggaagggagtaggaattagtgaaaggggagtctagttggtttacctataaagttcagatgagaatacgtgtccagtttgaattttcttatcactgtgtacacacgcttcccaaagcttttctttaattctgactctgcttctgtcaagagggttgtcattaatacatctagggtaccctcccatgtcatgaagttacctagtcaggttcccgtgggtcacttgctactcctaagggaagtttcttctgcctaagaagttacaccatgctttgctatttcttttcttgctggagcctcaccttaatttcatcctctgtgacagtgaagatatcatccacaaggtccctgataataggccaggtgttcaagccaatgctggatttgacaccatctgctatggtttctggaggataaagattgggcatcagtttccccttcagcttggactggtagcagtcatctgcatttgagggttcagcagcatataccttcacactaggtttcagagcctgggaagaggaatattaagacatcttaacaacaaaccacaacattgcctgcatgtctaaaagaaaatatgggcctggtgtggtggctcacacctgtaatcccaacactttgggagcccgaggcgggtggatcagctgaggtcaggagttcaagaccagcctggccaacctggtgaaatgcagtgtcaactaaaaataggaaaatcagccaggcgtggtggcagacccctgtaatcccagctactcaagaggctgaggtaggagaatcacttgaacttgggaggggtaggttgcagtgagctgagatcacaccaaaatggggtggggcgcagtggctcacgcctgtaatcccagcactttgggaggccgaggtgggcggatcacgaggtagggagatcaagaccatcctggctaacacggtgaaaccccgtctctactaaaaatacaaaaaaaaaaaacaaaaaaaaactagccaggcatggtggcaggcacctgtagtcccagctactcgggaggcagaggcaggagaatggcgtgaacctgggaggtggagcttgcagtgagccaagatcgtgccactgcactccagcctgggtgacagagtgagactccgtctcaaaaaaaaaaaagaaaataggcacaataagtaatacatttctgcccaagtaagagccttcccttttgtggatgtaatgaaaatatcttcaagcactttataaataaattatatgtctgatactagc

SEQ ID NO: 422513 - DNA, 5500 bp, Homo sapiens
cccgcacagacgtcaggcggcaggcccggccccttcccacagccggaggggggttgcgcacagcgacgggggatcggggcggggagaggccgtgcgcgcctaggggcggcagacccgggcgcgcgccacgggggtcgctgtcatggcaacgcacccgctcccgcatggagggcgcgaagccgcattgtgagcgctggccctggagcccgcggccccgcggctgagagcgagcctcggtcccgctgaagctcccctgacttctgcctgctccctctcccgacgggacggaaagggccggggctcgggcatggggtcccctgcggtccgagcctgcccacggcgaagccggtgcagcctggccccgtgacccctctgaatccccgtccggccgtcgccgtgcagttgtcaagtttctgggaagattagtgggagcgcagccgcccgagcccgacggccggagggtcgcggccagtcccccttgccgggtcgccacgtcccacaaggtccttcccggccgctccgtgggaggcggggcgcaggttggagtaacagggacgggcttgagctggtacggaaccgggcaaggtgagagaagtgtcttccacgcgattcccaagcctcgctagggaatcgagggagaagaaaggttgctcagagtgataaagaacatgccgttgcaaacggaagagcaacgtgcccgaatctaggtgacaggaagggcttaggccttttcggcacgaatggagccttccagtcaacatgcttctacgtgatgcagctttatagcgcaaaaaaatgacaatgcaaggggtacaaacagccctgctagaccaacagcccgagcctcgacagtctacatccggcgccttcaagcccccaaccacacactgcgaagtgggaaaagttcccagcgcggcttggcgaacccgctaacacggcgctctcacgagctgctggaaaagaccttcgcgagagggcgcagggagtcccgctccctggagggcccgcccccttggaggggaccggaagcgcttgtcctggcccggaagcagtgctgactccgtacacgcgcgctgcggcatggcggcccaccgccccggcccgctcaagcagcagaataaagctcataaaggcggacggcatcggggtcggggatctgcacagcgggacggcaagggccgtctggcactgaaaaccctaagcaagaaggtgagaaaagaactcagcagagtcgaccagaggcatcgcgccagccagctccgaaagcagaagaaggaggcggttctggcagagaagagacagctgggtggcaaggatggccctcctcatcaggtactggtggtgcccctgcacagcagaatttccctgccagaggccatgcagctgcttcaagatagggacactggaacagtacacttgaatgaattgggaaacacccagaactttatgctgctgtgcccccgcttgaaacatcggtggtttttcacctcagcaaggccaggggatctgcacgttgtgttagacatggctaaagtagctgataccatcctgttcctccttgatccactagaaggctgggacagcaccggtgattactgtctttcctgcctctttgctcagggccttccgacctatacactagctgtccaggggatttctggcctcccactgaagaaacaaatagataccaggaagaagctaagtaaagcagtggagaagcgctttccgcatgacaaactcctcttgttagacactcaacaggaggcagggatgctgcttaggcagttggctaaccagaagcaacagcatcttgcttttcgagatcggcgggcctacctatttgcccatgctgttgattttgttcctagtgaagagaataacttggtgggcaccttgaaaatttcaggctatgttcgagggcagactctgaatgtcaataggttgctgcatatcgttggatatggtgatttccagatgaaacagatagatgcccccggagaccctttccctttaaatcctagaggaattaaaccccaaaaggacccagacatggcaatggagatttgtgctacggatgctgtagatgatatggaagaaggtcttaaagtcctaatgaaggcagaccctggtagacaggaatccttgcaagcagaggttatcccagatccaatggagggagagcaaacctggcccactgaggaggagctgagcgaggcaaaggatttcttgaaggaaagttctaaggtggtaaagaaggtccccaaaggaacatccagttaccaagctgaatggattttggatggtggcagccaaagtggtggggaaggagatgaatatgaatatgatgatatggaacatgaggattttatggaggaggaatctcaggatgagagtagtgaagaagaggaagaatatgaaactatgactattggggagtctgtgcatgatgatctgtatgataagaaagtagatgaagaagctgaggcaaaaatgttggagaaatataaacaagaaagactggaagagatgtttccagatgaagtggacacgccccgtgatgtggctgctcgaattcgatttcagaaatacagaggccttaagagcttccggacatctccatgggatcctaaggaaaaccttcctcaagattatgctcgaatatttcagtttcagaactttactaacactaggaaaagcatctttaaagaggttgaagaaaaagaggttgaaggagctgaggttggctggtatgtcacacttcatgtctctgaagtccccgtctcagtggtcgagtgcttcaggcaaggaacacccttgattgcattttctttactacctcatgaacagaagatgtcagtattgaatatggtggtgaggcgtgaccctggcaacactgaacctgtgaaagccaaggaagagctcatatttcactgtggattcaggcgcttccgagcctcacctttattctctcagcacactgcagcggacaaacataaattgcagagattcctgactgctgacatggccctggtggcgacagtctatgcgccaatcacttttcctcctgcatctgtgctgcttttcaagcaaaaaagcaatggaatgcacagcctcattgctacaggccatcttatgtcagtagatccagacagaatggtcatcaagagagttgttctgagtggtcatcctttcaaaatttttactaagatggcagtagtacgttacatgttcttcaacagagaggatgtgctgtggtttaaaccagtggaactgagaacgaagtggggccggagaggacatatcaaggaacctttaggtacccatggccacatgaaatgcagctttgatgggaagctaaaatctcaagacacagtactgatgaacctgtataaacgagtcttccccaaatggacttatgatccatatgtaccagaaccagtaccctggctgaaaagtgagatttcttcaacagtgcctcaagggggcatggagtaatggattcaaagagattctgtcttaccggtgccagtcagtactccagggatgggaggcacaagttgtgattgggcaaagtttattttctatgtcagcctgtcagtccactgccccattttgcaagacttttttttagccttgacaaaatgtctcagttaagtataaaagtttttccactacttagtccaaaaaaaactattaaatcttaatgaaatagccactctccattaagaatctgataactaagagttgacaatactaggaaacaaaatgtcttcagtatctaaagacactgaattcccaccatttccttttctgtaaattaaacagaaacagactgataagaagctggcctttcagcctgcttcacccaagttatggaggaggttaagtctacatttccaccactgagcacaatacaaatgttctttacttctggggaaacagtttgaaaatgttgagacagcacagcagccactccaacaccagctgtaggttcaatgagtagtttcatcctctcccacaccagctgggttgcacactgttgatatggaagggagtaggaattagtgaaaggggagtctagttggtttacctataaagttcagatgagaatacgtgtccagtttgaattttcttatcactgtgtacacacgcttcccaaagcttttctttaattctgactctgcttctgtcaagagggttgtcattaatacatctagggtaccctcccatgtcatgaagttacctagtcaggttcccgtgggtcacttgctactcctaagggaagtttcttctgcctaagaagttacaccatgctttgctatttcttttcttgctggagcctcaccttaatttcatcctctgtgacagtgaagatatcatccacaaggtccctgataataggccaggtgttcaagccaatgctggatttgacaccatctgctatggtttctggaggataaagattgggcatcagtttccccttcagcttggactggtagcagtcatctgcatttgagggttcagcagcatataccttcacactaggtttcagagcctgggaagaggaatattaagacatcttaacaacaaaccacaacattgcctgcatgtctaaaagaaaatatgggcctggtgtggtggctcacacctgtaatcccaacactttgggagcccgaggcgggtggatcagctgaggtcaggagttcaagaccagcctggccaacctggtgaaatgcagtgtcaactaaaaataggaaaatcagccaggcgtggtggcagacccctgtaatcccagctactcaagaggctgaggtaggagaatcacttgaacttgggaggggtaggttgcagtgagctgagatcacaccaaaatggggtggggcgcagtggctcacgcctgtaatcccagcactttgggaggccgaggtgggcggatcacgaggtagggagatcaagaccatcctggctaacacggtgaaaccccgtctctactaaaaatacaaaaaaaaaaaacaaaaaaaaactagccaggcatggtggcaggcacctgtagtcccagctactcgggaggcagaggcaggagaatggcgtgaacctgggaggtggagcttgcagtgagccaagatcgtgccactgcactccagcctgggtgacagagtgagactccgtctcaaaaaaaaaaaagaaaataggcacaataagtaatacatttctgcccaagtaagagccttcccttttgtggatgtaatgaaaatatcttcaagcactttataaataaattatatgtctgatactagccttccattgcctggatcacatctgattgtcctggtaatttgagaaaagggtagccccttggtatggatagtagcttgatgacatggaattcagggaaaagactatgatggtgtcacttgtaactgcttttgtgctgtaaaattgtcatggattaagaagagagttggctgggtgcggtggctcacacctgtaatcctagcac

SEQ ID NO: 422514 - DNA, 2509 bp, Homo sapiens
tcggagcgggcgggggcgatcggccggggggaccgcgagcgacgggcacgcgccgccgcccgacagcgcagcaggcggcgttctggcagagaagagacagctgggtggcaaggatggccctcctcatcaggtactggtggtgcccctgcacagcagaatttccctgccagaggccatgcagctgcttcaagatagggacactggaacagtacacttgaatgaattgggaaacacccagaactttatgctgctgtgcccccgcttgaaacatcggtggtttttcacctcagcaaggccaggggatctgcacgttgtgttagacatggctaaagtagctgataccatcctgttcctccttgatccactagaaggctgggacagcaccggtgattactgtctttcctgcctctttgctcagggccttccgacctatacactagctgtccaggggatttctggcctcccactgaagaaacaaatagataccaggaagaagctaagtaaagcagtggagaagcgctttccgcatgacaaactcctcttgttagacactcaacaggaggcagggatgctgcttaggcagttggctaaccagaagcaacagcatcttgcttttcgagatcggcgggcctacctatttgcccatgctgttgattttgttcctagtgaagagaataacttggtgggcaccttgaaaatttcaggctatgttcgagggcagactctgaatgtcaataggttgctgcatatcgttggatatggtgatttccagatgaaacagatagatgcccccggagaccctttccctttaaatcctagaggaattaaaccccaaaaggacccagacatggcaatggagatttgtgctacggatgctgtagatgatatggaagaaggtcttaaagtcctaatgaaggcagaccctggtagacaggaatccttgcaagcagaggttatcccagatccaatggagggagagcaaacctggcccactgaggaggagctgagcgaggcaaaggatttcttgaaggaaagttctaaggtggtaaagaaggtccccaaaggaacatccagttaccaagctgaatggattttggatggtggcagccaaagtggtggggaaggagatgaatatgaatatgatgatatggaacatgaggattttatggaggaggaatctcaggatgagagtagtgaagaagaggaagaatatgaaactatgactattggggagtctgtgcatgatgatctgtatgataagaaagtagatgaagaagctgaggcaaaaatgttggagaaatataaacaagaaagactggaagagatgtttccagatgaagtggacacgccccgtgatgtggctgctcgaattcgatttcagaaatacagaggccttaagagcttccggacatctccatgggatcctaaggaaaaccttcctcaagattatgctcgaatatttcagtttcagaactttactaacactaggaaaagcatctttaaagaggttgaagaaaaagaggttgaaggagctgaggttggctggtatgtcacacttcatgtctctgaagtccccgtctcagtggtcgagtgcttcaggcaaggaacacccttgattgcattttctttactacctcatgaacagaagatgtcagtattgaatatggtggtgaggcgtgaccctggcaacactgaacctgtgaaagccaaggaagagctcatatttcactgtggattcaggcgcttccgagcctcacctttattctctcagcacactgcagcggacaaacataaattgcagagattcctgactgctgacatggccctggtggcgacagtctatgcgccaatcacttttcctcctgcatctgtgctgcttttcaagcaaaaaagcaatggaatgcacagcctcattgctacaggccatcttatgtcagtagatccagacagaatggtcatcaagagagttgttctgagtggtcatcctttcaaaatttttactaagatggcagtagtacgttacatgttcttcaacagagaggatgtgctgtggtttaaaccagtggaactgagaacgaagtggggccggagaggacatatcaaggaacctttaggtacccatggccacatgaaatgcagctttgatgggaagctaaaatctcaagacacagtactgatgaacctgtataaacgagtcttccccaaatggacttatgatccatatgtaccagaaccagtaccctggctgaaaagtgagatttcttcaacagtgcctcaagggggcatggagtaatggattcaaagagattctgtcttaccggtgccagtcagtactccagggatgggaggcacaagttgtgattgggcaaagtttattttctatgtcagcctgtcagtccactgccccattttgcaagacttttttttagccttgacaaaatgtctcagttaagtataaaagtttttccactacttagtccaaaaaaaactattaaatcttaatgaaata

SEQ ID NO: 422515 - DNA, 5537 bp, Homo sapiens
cccgcacagacgtcaggcggcaggcccggccccttcccacagccggaggggggttgcgcacagcgacgggggatcggggcggggagaggccgtgcgcgcctaggggcggcagacccgggcgcgcgccacgggggtcgctgtcatggcaacgcacccgctcccgcatggagggcgcgaagccgcattgtgagcgctggccctggagcccgcggccccgcggctgagagcgagcctcggtcccgctgaagctcccctgacttctgcctgctccctctcccgacgggacggaaagggccggggctcgggcatggggtcccctgcggtccgagcctgcccacggcgaagccggtgcagcctggccccgtgacccctctgaatccccgtccggccgtcgccgtgcagttgtcaagtttctgggaagattagtgggagcgcagccgcccgagcccgacggccggagggtcgcggccagtcccccttgccgggtcgccacgtcccacaaggtccttcccggccgctccgtgggaggcggggcgcaggttggagtaacagggacgggcttgagctggtacggaaccgggcaaggtgagagaagtgtcttccacgcgattcccaagcctcgctagggaatcgagggagaagaaaggttgctcagagtgataaagaacatgccgttgcaaacggaagagcaacgtgcccgaatctaggtgacaggaagggcttaggccttttcggcacgaatggagccttccagtcaacatgcttctacgtgatgcagctttatagcgcaaaaaaatgacaatgcaaggggtacaaacagccctgctagaccaacagcccgagcctcgacagtctacatccggcgccttcaagcccccaaccacacactgcgaagtgggaaaagttcccagcgcggcttggcgaacccgctaacacggcgctctcacgagctgctggaaaagaccttcgcgagagggcgcagggagtcccgctccctggagggcccgcccccttggaggggaccggaagcgcttgtcctggcccggaagcagtgctgactccgtacacgcgcgctgcggcatggcggcccaccgccccggcccgctcaagcagcagaataaagctcataaaggcggacggcatcggggtcggggatctgcacagcgggacggcaagggccgtctggcactgaaaaccctaagcaagaaggtgagaaaagaactcagcagagtcgaccagaggcatcgcgccagccagctccgaaagcagaagaaggaggcggttctggcagagaagagacagctgggtggcaaggatggccctcctcatcaggtactggtggtgcccctgcacagcagaatttccctgccagaggccatgcagctgcttcaagatagggacactggaacagtacacttgaatgaattgggaaacacccagaactttatgctgctgtgcccccgcttgaaacatcggtggtttttcacctcagcaaggccaggggatctgcacgttgtgttagacatggctaaagtagctgataccatcctgttcctccttgatccactagaaggctgggacagcaccggtgattactgtctttcctgcctctttgctcagggccttccgacctatacactagctgtccaggggatttctggcctcccactgaagaaacaaatagataccaggaagaagctaagtaaagcagtggagaagcgctttccgcatgacaaactcctcttgttagacactcaacaggaggcagggatgctgcttaggcagttggctaaccagaagcaacagcatcttgcttttcgagatcggcgggcctacctatttgcccatgctgttgattttgttcctagtgaagagaataacttggtgggcaccttgaaaatttcaggctatgttcgagggcagactctgaatgtcaataggttgctgcatatcgttggatatggtgatttccagatgaaacagatagatgcccccggagaccctttccctttaaatcctagaggaattaaaccccaaaaggacccagacatggcaatggagatttgtgctacggatgctgtagatgatatggaagaaggtcttaaagtcctaatgaaggcagaccctggtagacaggaatccttgcaagcagaggttatcccagatccaatggagggagagcaaacctggcccactgaggaggagctgagcgaggcaaaggatttcttgaaggaaagttctaaggtggtaaagaaggtccccaaaggaacatccagttaccaagctgaatggattttggatggtggcagccaaagtggtggggaaggagatgaatatgaatatgatgatatggaacatgaggattttatggaggaggaatctcaggatgagagtagtgaagaagaggaagaatatgaaactatgactattggggagtctgtgcatgatgatctgtatgataagaaagtagatgaagaagctgaggcaaaaatgttggagaaatataaacaagaaagactggaagagatgtttccagatgaagtggacacgccccgtgatgtggctgctcgaattcgatttcagaaatacagaggccttaagagcttccggacatctccatgggatcctaaggaaaaccttcctcaagattatgctcgaatatttcagtttcagaactttactaacactaggaaaagcatctttaaagaggttgaagaaaaagaggttgaaggagctgaggttggctggtatgtcacacttcatgtctctgaagtccccgtctcagtggtcgagtgcttcaggcaaggaacacccttgattgcattttctttactacctcatgaacagaagatgtcagtattgaatatggtggtgaggcgtgaccctggcaacactgaacctgtgaaagccaaggaagagctcatatttcactgtggattcaggcgcttccgagcctcacctttattctctcagcacactgcagcggacaaacataaattgcagagattcctgactgctgacatggccctggtggcgacagtctatgcgccaatcacttttcctcctgcatctgtgctgcttttcaagcaaaaaagcaatggaatgcacagcctcattgctacaggccatcttatgtcagtagatccagacagaatggtcatcaagagagttgttctgagtggtcatcctttcaaaatttttactaagatggcagtagtacgttacatgttcttcaacagaggtgggtatgaaggaggaggatgggatctgattgcctttgtggtataaaggttgggtttacattttgtgggtaaatgtttcatcttggtctttaatgtgtttgattctaagaggatgtgctgtggtttaaaccagtggaactgagaacgaagtggggccggagaggacatatcaaggaacctttaggtaaggaaacacgggatttgagaccatgtctgcatttctgcagtgttgctaaatgactgttgggttggaagtcattgctttaaaattttctacttttaatttgaccgacttgttctgatgtctttctaggtacccatggccacatgaaatgcagctttgatgggaagctaaaatctcaagacacagtactgatgaacctgtataaacgagtcttccccaaatggacttatgatccatatgtaccagaaccagtaccctggctgaaaagtgagatttcttcaacagtgcctcaagggggcatggagtaatggattcaaagagattctgtcttaccggtgccagtcagtactccagggatgggaggcacaagttgtgattgggcaaagtttattttctatgtcagcctgtcagtccactgccccattttgcaagacttttttttagccttgacaaaatgtctcagttaagtataaaagtttttccactacttagtccaaaaaaaactattaaatcttaatgaaatagccactctccattaagaatctgataactaagagttgacaatactaggaaacaaaatgtcttcagtatctaaagacactgaattcccaccatttccttttctgtaaattaaacagaaacagactgataagaagctggcctttcagcctgcttcacccaagttatggaggaggttaagtctacatttccaccactgagcacaatacaaatgttctttacttctggggaaacagtttgaaaatgttgagacagcacagcagccactccaacaccagctgtaggttcaatgagtagtttcatcctctcccacaccagctgggttgcacactgttgatatggaagggagtaggaattagtgaaaggggagtctagttggtttacctataaagttcagatgagaatacgtgtccagtttgaattttcttatcactgtgtacacacgcttcccaaagcttttctttaattctgactctgcttctgtcaagagggttgtcattaatacatctagggtaccctcccatgtcatgaagttacctagtcaggttcccgtgggtcacttgctactcctaagggaagtttcttctgcctaagaagttacaccatgctttgctatttcttttcttgctggagcctcaccttaatttcatcctctgtgacagtgaagatatcatccacaaggtccctgataataggccaggtgttcaagccaatgctggatttgacaccatctgctatggtttctggaggataaagattgggcatcagtttccccttcagcttggactggtagcagtcatctgcatttgagggttcagcagcatataccttcacactaggtttcagagcctgggaagaggaatattaagacatcttaacaacaaaccacaacattgcctgcatgtctaaaagaaaatatgggcctggtgtggtggctcacacctgtaatcccaacactttgggagcccgaggcgggtggatcagctgaggtcaggagttcaagaccagcctggccaacctggtgaaatgcagtgtcaactaaaaataggaaaatcagccaggcgtggtggcagacccctgtaatcccagctactcaagaggctgaggtaggagaatcacttgaacttgggaggggtaggttgcagtgagctgagatcacaccaaaatggggtggggcgcagtggctcacgcctgtaatcccagcactttgggaggccgaggtgggcggatcacgaggtagggagatcaagaccatcctggctaacacggtgaaaccccgtctctactaaaaatacaaaaaaaaaaaacaaaaaaaaactagccaggcatggtggcaggcacctgtagtcccagctactcgggaggcagaggcaggagaatggcgtgaacctgggaggtggagcttgcagtgagccaagatcgtgccactgcactccagcctgggtgacagagtgagactccgtctcaaaaaaaaaaaagaaaataggcacaataagtaatacatttctgcccaagtaagagccttcccttttgtggatgtaatgaaaatatcttcaagcactttataaataaattatatgtctgatactagc

SEQ ID NO: 422516 - DNA, 2979 bp, Homo sapiens
tgtatgacagtgtgtaaaaagcaggctggtacggccggaatcccgggatatcgggaggaatctcaggatgagagtagtgaagaagaggaagaatatgaaactatgactattggggagtctgtgcatgatgatctgtatgataagaaagtagatgaagaagctgaggcaaaaatgttggagaaatataaacaagaaagactggaagagatgtttccagatgaagtggacacgccccgtgatgtggctgctcgaattcgatttcagaaatacagaggccttaagagcttccggacatctccatgggatcctaaggaaaaccttcctcaagattatgctcgaatatttcagtttcagaactttactaacactaggaaaagcatctttaaagaggttgaagaaaaagaggttgaaggagctgaggttggctggtatgtcacacttcatgtctctgaagtccccgtctcagtggtcgagtgcttcaggcaaggaacacccttgattgcattttctttactacctcatgaacagaagatgtcagtattgaatatggtggtgaggcgtgaccctggcaacactgaacctgtgaaagccaaggaagagctcatatttcactgtggattcaggcgcttccgagcctcacctttattctctcagcacactgcagcggacaaacataaattgcagagattcctgactgctgacatggccctggtggcgacagtctatgcgccaatcacttttcctcctgcatctgtgctgcttttcaagcaaaaaagcaatggaatgcacagcctcattgctacaggccatcttatgtcagtagatccagacagaatggtcatcaagagagttgttctgagtggtcatcctttcaaaatttttactaagatggcagtagtacgttacatgttcttcaacagagaggatgtgctgtggtttaaaccagtggaactgagaacgaagtggggccggagaggacatatcaaggaacctttaggtacccatggccacatgaaatgcagctttgatgggaagctaaaatctcaagacacagtactgatgaacctgtataaacgagtcttccccaaatggacttatgatccatatgtaccagaaccagtaccctggctgaaaagtgagatttcttcaacagtgcctcaagggggcatggagtaatggattcaaagagattctgtcttaccggtgccagtcagtactccagggatgggaggcacaagttgtgattgggcaaagtttattttctatgtcagcctgtcagtccactgccccattttgcaagacttttttttagccttgacaaaatgtctcagttaagtataaaagtttttccactacttagtccaaaaaaaactattaaatcttaatgaaatagccactctccattaagaatctgataactaagagttgacaatactaggaaacaaaatgtcttcagtatctaaagacactgaattcccaccatttccttttctgtaaattaaacagaaacagactgataagaagctggcctttcagcctgcttcacccaagttatggaggaggttaagtctacatttccaccactgagcacaatacaaatgttctttacttctggggaaacagtttgaaaatgttgagacagcacagcagccactccaacaccagctgtaggttcaatgagtagtttcatcctctcccacaccagctgggttgcacactgttgatatggaagggagtaggaattagtgaaaggggagtctagttggtttacctataaagttcagatgagaatacgtgtccagtttgaattttcttatcactgtgtacacacgcttcccaaagcttttctttaattctgactctgcttctgtcaagagggttgtcattaatacatctagggtaccctcccatgtcatgaagttacctagtcaggttcccgtgggtcacttgctactcctaagggaagtttcttctgcctaagaagttacaccatgctttgctatttcttttcttgctggagcctcaccttaatttcatcctctgtgacagtgaagatatcatccacaaggtccctgataataggccaggtgttcaagccaatgctggatttgacaccatctgctatggtttctggaggataaagattgggcatcagtttccccttcagcttggactggtagcagtcatctgcatttgagggttcagcagcatataccttcacactaggtttcagagcctgggaagaggaatattaagacatcttaacaacaaaccacaacattgcctgcatgtctaaaagaaaatatgggcctggtgtggtggctcacacctgtaatcccaacactttgggagcccgaggcgggtggatcagctgaggtcaggagttcaagaccagcctggccaacctggtgaaatgcagtgtcaactaaaaataggaaaatcagccaggcgtggtggcagacccctgtaatcccagctactcaagaggctgaggtaggagaatcacttgaacttgggaggggtaggttgcagtgagctgagatcacaccaaaatggggtggggcgcagtggctcacgcctgtaatcccagcactttgggaggccgaggtgggcggatcacgaggtagggagatcaagaccatcctggctaacacggtgaaaccccgtctctactaaaaatacaaaaaaaaaaaacaaaaaaaaactagccaggcatggtggcaggcacctgtagtcccagctactcgggaggcagaggcaggagaatggcgtgaacctgggaggtggagcttgcagtgagccaagatcgtgccactgcactccagcctgggtgacagagtgagactccgtctcaaaaaaaaaaaagaaaataggcacaataagtaatacatttctgcccaagtaagagccttcccttttgtggatgtaatgaaaatatcttcaagcactttataaataaattatatgtctgatactagc

SEQ ID NO: 422517 - DNA, 3487 bp, Homo sapiens
cccgcacagacgtcaggcggcaggcccggccccttcccacagccggaggggggttgcgcacagcgacgggggatcggggcggggagaggccgtgcgcgcctaggggcggcagacccgggcgcgcgccacgggggtcgctgtcatggcaacgcacccgctcccgcatggagggcgcgaagccgcattgtgagcgctggccctggagcccgcggccccgcggctgagagcgagcctcggtcccgctgaagctcccctgacttctgcctgctccctctcccgacgggacggaaagggccggggctcgggcatggggtcccctgcggtccgagcctgcccacggcgaagccggtgcagcctggccccgtgacccctctgaatccccgtccggccgtcgccgtgcagttgtcaagtttctgggaagattagtgggagcgcagccgcccgagcccgacggccggagggtcgcggccagtcccccttgccgggtcgccacgtcccacaaggtccttcccggccgctccgtgggaggcggggcgcaggttggagtaacagggacgggcttgagctggtacggaaccgggcaaggtgagagaagtgtcttccacgcgattcccaagcctcgctagggaatcgagggagaagaaaggttgctcagagtgataaagaacatgccgttgcaaacggaagagcaacgtgcccgaatctaggtgacaggaagggcttaggccttttcggcacgaatggagccttccagtcaacatgcttctacgtgatgcagctttatagcgcaaaaaaatgacaatgcaaggggtacaaacagccctgctagaccaacagcccgagcctcgacagtctacatccggcgccttcaagcccccaaccacacactgcgaagtgggaaaagttcccagcgcggcttggcgaacccgctaacacggcgctctcacgagctgctggaaaagaccttcgcgagagggcgcagggagtcccgctccctggagggcccgcccccttggaggggaccggaagcgcttgtcctggcccggaagcagtgctgactccgtacacgcgcgctgcggcatggcggcccaccgccccggcccgctcaagcagcagaataaagctcataaaggcggacggcatcggggtcggggatctgcacagcgggacggcaagggccgtctggcactgaaaaccctaagcaagaaggtgagaaaagaactcagcagagtcgaccagaggcatcgcgccagccagctccgaaagcagaagaaggaggcggttctggcagagaagagacagctgggtggcaaggatggccctcctcatcaggtactggtggtgcccctgcacagcagaatttccctgccagaggccatgcagctgcttcaagatagggacactggaacagtacacttgaatgaattgggaaacacccagaactttatgctgctgtgcccccgcttgaaacatcggtggtttttcacctcagcaaggccaggggatctgcacgttgtgttagacatggctaaagtagctgataccatcctgttcctccttgatccactagaaggctgggacagcaccggtgattactgtctttcctgcctctttgctcagggccttccgacctatacactagctgtccaggggatttctggcctcccactgaagaaacaaatagataccaggaagaagctaagtaaagcagtggagaagcgctttccgcatgacaaactcctcttgttagacactcaacaggaggcagggatgctgcttaggcagttggctaaccagaagcaacagcatcttgcttttcgagatcggcgggcctacctatttgcccatgctgttgattttgttcctagtgaagagaataacttggtgggcaccttgaaaatttcaggctatgttcgagggcagactctgaatgtcaataggttgctgcatatcgttggatatggtgatttccagatgaaacagatagatgcccccggagaccctttccctttaaatcctagaggaattaaaccccaaaaggacccagacatggcaatggagatttgtgctacggatgctgtagatgatatggaagaaggtcttaaagtcctaatgaaggcagaccctggtagacaggaatccttgcaagcagaggttatcccagatccaatggagggagagcaaacctggcccactgaggaggagctgagcgaggcaaaggatttcttgaaggaaagttctaaggtggtaaagaaggtccccaaaggaacatccagttaccaagctgaatggattttggatggtggcagccaaagtggtggggaaggagatgaatatgaatatgatgatatggaacatgaggattttatggaggaggaatctcaggatgagagtagtgaagaagaggaagaatatgaaactatgactattggggagtctgtgcatgatgatctgtatgataagaaagtagatgaagaagctgaggcaaaaatgttggagaaatataaacaagaaagactggaagagatgtttccagatgaagtggacacgccccgtgatgtggctgctcgaattcgatttcagaaatacagaggccttaagagcttccggacatctccatgggatcctaaggaaaaccttcctcaagattatgctcgaatatttcagtttcagaactttactaacactaggaaaagcatctttaaagaggttgaagaaaaagaggttgaaggagctgaggttggctggtatgtcacacttcatgtctctgaagtccccgtctcagtggtcgagtgcttcaggcaaggaacacccttgattgcattttctttactacctcatgaacagaagatgtcagtattgaatatggtggtgaggcgtgaccctggcaacactgaacctgtgaaagccaaggaagagctcatatttcactgtggattcaggcgcttccgagcctcacctttattctctcagcacactgcagcggacaaacataaattgcagagattcctgactgctgacatggccctggtggcgacagtctatgcgccaatcacttttcctcctgcatctgtgctgcttttcaagcaaaaaagcaatggtaagttgagccacagagatgaacagaccctgcaggtccttaatagatgaacaccgttttctcttgtttatttaaatttgggagccaaatggtatggagaaggtaatgatggttttcaaaatacagtaagtcttcatttaacattgttaatagaacaatgaaaactccaacttttacgtgaaacagtgtatagccagtcctcaaataactgccttttgttcaacatcctttccttgtaacaactgatgagaaaaagtatggttttgttatacatcatttctcttgaagtacaagttttcaagaacctattgacaaggttaagtgtgggcttacagtttaccaatcttagcctcagattgggctagggcagggatgacaaaccaggct

SEQ ID NO: 422518 - DNA, 4161 bp, Homo sapiens
cccgcacagacgtcaggcggcaggcccggccccttcccacagccggaggggggttgcgcacagcgacgggggatcggggcggggagaggccgtgcgcgcctaggggcggcagacccgggcgcgcgccacgggggtcgctgtcatggcaacgcacccgctcccgcatggagggcgcgaagccgcattgtgagcgctggccctggagcccgcggccccgcggctgagagcgagcctcggtcccgctgaagctcccctgacttctgcctgctccctctcccgacgggacggaaagggccggggctcgggcatggggtcccctgcggtccgagcctgcccacggcgaagccggtgcagcctggccccgtgacccctctgaatccccgtccggccgtcgccgtgcagttgtcaagtttctgggaagattagtgggagcgcagccgcccgagcccgacggccggagggtcgcggccagtcccccttgccgggtcgccacgtcccacaaggtccttcccggccgctccgtgggaggcggggcgcaggttggagtaacagggacgggcttgagctggtacggaaccgggcaaggtgagagaagtgtcttccacgcgattcccaagcctcgctagggaatcgagggagaagaaaggttgctcagagtgataaagaacatgccgttgcaaacggaagagcaacgtgcccgaatctaggtgacaggaagggcttaggccttttcggcacgaatggagccttccagtcaacatgcttctacgtgatgcagctttatagcgcaaaaaaatgacaatgcaaggggtacaaacagccctgctagaccaacagcccgagcctcgacagtctacatccggcgccttcaagcccccaaccacacactgcgaagtgggaaaagttcccagcgcggcttggcgaacccgctaacacggcgctctcacgagctgctggaaaagaccttcgcgagagggcgcagggagtcccgctccctggagggcccgcccccttggaggggaccggaagcgcttgtcctggcccggaagcagtgctgactccgtacacgcgcgctgcggcatggcggcccaccgccccggcccgctcaagcagcagaataaagctcataaaggcggacggcatcggggtcggggatctgcacagcgggacggcaagggccgtctggcactgaaaaccctaagcaagaaggtgagaaaagaactcagcagagtcgaccagaggcatcgcgccagccagctccgaaagcagaagaaggaggcggttctggcagagaagagacagctgggtggcaaggatggccctcctcatcaggtactggtggtgcccctgcacagcagaatttccctgccagaggccatgcagctgcttcaagatagggacactggaacagtacacttgaatgaattgggaaacacccagaactttatgctgctgtgcccccgcttgaaacatcggtggtttttcacctcagcaaggccaggggatctgcacgttgtgttagacatggctaaagtagctgataccatcctgttcctccttgatccactagaaggctgggacagcaccggtgattactgtctttcctgcctctttgctcagggccttccgacctatacactagctgtccaggggatttctggcctcccactgaagaaacaaatagataccaggaagaagctaagtaaagcagtggagaagcgctttccgcatgacaaactcctcttgttagacactcaacaggaggcagggatgctgcttaggcagttggctaaccagaagcaacagcatcttgcttttcgagatcggcgggcctacctatttgcccatgctgttgattttgttcctagtgaagagaataacttggtgggcaccttgaaaatttcaggctatgttcgagggcagactctgaatgtcaataggttgctgcatatcgttggatatggtgatttccagatgaaacagatagatgcccccggagaccctttccctttaaatcctagaggaattaaaccccaaaaggacccagacatggcaatggagatttgtgctacggatgctgtagatgatatggaagaaggtcttaaagtcctaatgaaggcagaccctggtagacaggaatccttgcaagcagaggttatcccagatccaatggagggagagcaaacctggcccactgaggaggagctgagcgaggcaaaggatttcttgaaggaaagttctaaggtggtaaagaaggtccccaaaggaacatccagttaccaagctgaatggattttggatggtggcagccaaagtggtggggaaggagatgaatatgaatatgatgatatggagtaatggattcaaagagattctgtcttaccggtgccagtcagtactccagggatgggaggcacaagttgtgattgggcaaagtttattttctatgtcagcctgtcagtccactgccccattttgcaagacttttttttagccttgacaaaatgtctcagttaagtataaaagtttttccactacttagtccaaaaaaaactattaaatcttaatgaaatagccactctccattaagaatctgataactaagagttgacaatactaggaaacaaaatgtcttcagtatctaaagacactgaattcccaccatttccttttctgtaaattaaacagaaacagactgataagaagctggcctttcagcctgcttcacccaagttatggaggaggttaagtctacatttccaccactgagcacaatacaaatgttctttacttctggggaaacagtttgaaaatgttgagacagcacagcagccactccaacaccagctgtaggttcaatgagtagtttcatcctctcccacaccagctgggttgcacactgttgatatggaagggagtaggaattagtgaaaggggagtctagttggtttacctataaagttcagatgagaatacgtgtccagtttgaattttcttatcactgtgtacacacgcttcccaaagcttttctttaattctgactctgcttctgtcaagagggttgtcattaatacatctagggtaccctcccatgtcatgaagttacctagtcaggttcccgtgggtcacttgctactcctaagggaagtttcttctgcctaagaagttacaccatgctttgctatttcttttcttgctggagcctcaccttaatttcatcctctgtgacagtgaagatatcatccacaaggtccctgataataggccaggtgttcaagccaatgctggatttgacaccatctgctatggtttctggaggataaagattgggcatcagtttccccttcagcttggactggtagcagtcatctgcatttgagggttcagcagcatataccttcacactaggtttcagagcctgggaagaggaatattaagacatcttaacaacaaaccacaacattgcctgcatgtctaaaagaaaatatgggcctggtgtggtggctcacacctgtaatcccaacactttgggagcccgaggcgggtggatcagctgaggtcaggagttcaagaccagcctggccaacctggtgaaatgcagtgtcaactaaaaataggaaaatcagccaggcgtggtggcagacccctgtaatcccagctactcaagaggctgaggtaggagaatcacttgaacttgggaggggtaggttgcagtgagctgagatcacaccaaaatggggtggggcgcagtggctcacgcctgtaatcccagcactttgggaggccgaggtgggcggatcacgaggtagggagatcaagaccatcctggctaacacggtgaaaccccgtctctactaaaaatacaaaaaaaaaaaacaaaaaaaaactagccaggcatggtggcaggcacctgtagtcccagctactcgggaggcagaggcaggagaatggcgtgaacctgggaggtggagcttgcagtgagccaagatcgtgccactgcactccagcctgggtgacagagtgagactccgtctcaaaaaaaaaaaagaaaataggcacaataagtaatacatttctgcccaagtaagagccttcccttttgtggatgtaatgaaaatatcttcaagcactttataaataaattatatgtctgatactagc

SEQ ID NO: 422519 - DNA, 675 bp, Homo sapiens
ctgataggactagatcgtatcttttaggtgcattgaggcagcgaaaatttttgagaactggtggtttagagaagtagaagctgccataggtttaagagttgcactaatacagcttttcacaggcctctatcacctctggtttctcaaaatggttttgcttttcattttttaacccttatggcagcggacaaacataaattgcagagattcctgactgctgacatggccctggtggcgacagtctatgcgccaatcacttttcctcctgcatctgtgctgcttttcaagcaaaaaagcaatggtaagttgagccacagagatgaacagaccctgcaggtccttaatagatgaacaccgttttctcttgtttatttaaatttgggagccaaatggtatggagaaggtaatgatggttttcaaaatacagtaagtcttcatttaacattgttaatagaacaatgaaaactccaacttttacgtgaaacagtgtatagccagtcctcaaataactgccttttgttcaacatcctttccttgtaacaactgatgagaaaaagtatggttttgttatacatcatttctcttgaagtacaagttttcaagaacctattgacaaggttaagtgtgggcttacagtttaccaatcttagcctcagattgggctagggcagggat

SEQ ID NO: 422520 - DNA, 3711 bp, Homo sapiens
cccgcacagacgtcaggcggcaggcccggccccttcccacagccggaggggggttgcgcacagcgacgggggatcggggcggggagaggccgtgcgcgcctaggggcggcagacccgggcgcgcgccacgggggtcgctgtcatggcaacgcacccgctcccgcatggagggcgcgaagccgcattgtgagcgctggccctggagcccgcggccccgcggctgagagcgagcctcggtcccgctgaagctcccctgacttctgcctgctccctctcccgacgggacggaaagggccggggctcgggcatggggtcccctgcggtccgagcctgcccacggcgaagccggtgcagcctggccccgtgacccctctgaatccccgtccggccgtcgccgtgcagttgtcaagtttctgggaagattagtgggagcgcagccgcccgagcccgacggccggagggtcgcggccagtcccccttgccgggtcgccacgtcccacaaggtccttcccggccgctccgtgggaggcggggcgcaggttggagtaacagggacgggcttgagctggtacggaaccgggcaaggtgagagaagtgtcttccacgcgattcccaagcctcgctagggaatcgagggagaagaaaggttgctcagagtgataaagaacatgccgttgcaaacggaagagcaacgtgcccgaatctaggtgacaggaagggcttaggccttttcggcacgaatggagccttccagtcaacatgcttctacgtgatgcagctttatagcgcaaaaaaatgacaatgcaaggggtacaaacagccctgctagaccaacagcccgagcctcgacagtctacatccggcgccttcaagcccccaaccacacactgcgaagtgggaaaagttcccagcgcggcttggcgaacccgctaacacggcgctctcacgagctgctggaaaagaccttcgcgagagggcgcagggagtcccgctccctggagggcccgcccccttggaggggaccggaagcgcttgtcctggcccggaagcagtgctgactccgtacacgcgcgctgcggcatggcggcccaccgccccggcccgctcaagcagcagaataaagctcataaaggcggacggcatcggggtcggggatctgcacagcgggacggcaagggccgtctggcactgaaaaccctaagcaagaaggtgagaaaagaactcagcagagtcgaccagaggcatcgcgccagccagctccgaaagcagaagaaggaggcggttctggcagagaagagacagctgggtggcaaggatggccctcctcatcaggtactggtggtgcccctgcacagcagaatttccctgccagaggccatgcagctgcttcaagatagggacactggaacagtacacttgaatgaattgggaaacacccagaactttatgctgctgtgcccccgcttgaaacatcggtggtttttcacctcagcaaggccaggggatctgcacgttgtgttagacatggctaaagtagctgataccatcctgttcctccttgatccactagaaggctgggacagcaccggtgattactgtctttcctgcctctttgctcagggccttccgacctatacactagctgtccaggggatttctggcctcccactgaagaaacaaatagataccaggaagaagctaagtaaagcagtggagaagcgctttccgcatgacaaactcctcttgttagacactcaacaggaggcagggatgctgcttaggcagttggctaaccagaagcaacagcatcttgcttttcgagatcggcgggcctacctatttgcccatgctgttgattttgttcctagtgaagagaataacttggtgggcaccttgaaaatttcaggctatgttcgagggcagactctgaatgtcaataggttgctgcatatcgttggatatggtgatttccagatgaaacagatagatgcccccggagaccctttccctttaaatcctagaggaattaaaccccaaaaggacccagacatggcaatggagatttgtgctacggatgctgtagatgatatggaagaaggtcttaaagtcctaatgaaggcagaccctggtagacaggaatccttgcaagcagaggttatcccagatccaatggagggagagcaaacctggcccactgaggaggagctgagcgaggcaaaggatttcttgaaggaaagttctaaggtggtaaagaaggtccccaaaggaacatccagttaccaagctgaatggattttggatggtggcagccaaagtggtggggaaggagatgaatatgaatatgatgatatggaacatgaggattttatggaggaggaatctcaggatgagagtagtgaagaagaggaagaatatgaaactatgactattggggagtctgtgcatgatgatctgtatgataagaaagtagatgaagaagctgaggcaaaaatgttggagaaatataaacaagaaagactggaagagatgtttccagatgaagtggacacgccccgtgatgtggctgctcgaattcgatttcagaaatacagaggccttaagagcttccggacatctccatgggatcctaaggaaaaccttcctcaagattatgctcgaatatttcagtttcagaactttactaacactaggaaaagcatctttaaagaggttgaagaaaaagaggttgaaggagctgaggttggctggtatgtcacacttcatgtctctgaagtccccgtctcagtggtcgagtgcttcaggcaaggaacacccttgattgcattttctttactacctcatgaacagaagatgtcagtattgaatatggtggtgaggcgtgaccctggcaacactgaacctgtgaaagccaaggaagagctcatatttcactgtggattcaggcgcttccgagcctcacctttattctctcagcacactgcagcggacaaacataaattgcagagattcctgactgctgacatggccctggtggcgacagtctatgcgccaatcacttttcctcctgcatctgtgctgcttttcaagcaaaaaagcaatggaatgcacagcctcattgctacaggccatcttatgtcagtagatccagacagaatggtcatcaagagagttgttctgagtggtcatcctttcaaaatttttactaagatggcagtagtacgttacatgttcttcaacagagaggatgtgctgtggtttaaaccagtggaactgagaacgaagtggggccggagaggacatatcaaggaacctttaggtacccatggccacatgaaatgcagctttgatgggaagctaaaatctcaagacacagtactgatgaacctgtataaacgagtcttccccaaatggacttatgatccatatgtaccagaaccagtaccctggctgaaaagtgagatttcttcaacagtgcctcaagggggcatggagtaatggattcaaagagattctgtcttaccggtgccagtcagtactccagggatgggaggcacaagttgtgattgggcaaagtttattttctatgtcagcctgtcagtccactgccccattttgcaagacttttttttagccttgacaaaatgtctcagttaagtataaaagtttttccactacttagtccaaaaaaaactattaaatcttaatgaaata

SEQ ID NO: 422521 - DNA, 4989 bp, Homo sapiens
cccgcacagacgtcaggcggcaggcccggccccttcccacagccggaggggggttgcgcacagcgacgggggatcggggcggggagaggccgtgcgcgcctaggggcggcagacccgggcgcgcgccacgggggtcgctgtcatggcaacgcacccgctcccgcatggagggcgcgaagccgcattgtgagcgctggccctggagcccgcggccccgcggctgagagcgagcctcggtcccgctgaagctcccctgacttctgcctgctccctctcccgacgggacggaaagggccggggctcgggcatggggtcccctgcggtccgagcctgcccacggcgaagccggtgcagcctggccccgtgacccctctgaatccccgtccggccgtcgccgtgcagttgtcaagtttctgggaagattagtgggagcgcagccgcccgagcccgacggccggagggtcgcggccagtcccccttgccgggtcgccacgtcccacaaggtccttcccggccgctccgtgggaggcggggcgcaggttggagtaacagggacgggcttgagctggtacggaaccgggcaaggtgagagaagtgtcttccacgcgattcccaagcctcgctagggaatcgagggagaagaaaggttgctcagagtgataaagaacatgccgttgcaaacggaagagcaacgtgcccgaatctaggtgacaggaagggcttaggccttttcggcacgaatggagccttccagtcaacatgcttctacgtgatgcagctttatagcgcaaaaaaatgacaatgcaaggggtacaaacagccctgctagaccaacagcccgagcctcgacagtctacatccggcgccttcaagcccccaaccacacactgcgaagtgggaaaagttcccagcgcggcttggcgaacccgctaacacggcgctctcacgagctgctggaaaagaccttcgcgagagggcgcagggagtcccgctccctggagggcccgcccccttggaggggaccggaagcgcttgtcctggcccggaagcagtgctgactccgtacacgcgcgctgcggcatggcggcccaccgccccggcccgctcaagcagcagaataaagctcataaaggcggacggcatcggggtcggggatctgcacagcgggacggcaagggccgtctggcactgaaaaccctaagcaagaaggtgagaaaagaactcagcagagtcgaccagaggcatcgcgccagccagctccgaaagcagaagaaggaggcggttctggcagagaagagacagctgggtggcaaggatggccctcctcatcaggtactggtggtgcccctgcacagcagaatttccctgccagaggccatgcagctgcttcaagatagggacactggaacagtacacttgaatgaattgggaaacacccagaactttatgctgctgtgcccccgcttgaaacatcggtggtttttcacctcagcaaggccaggggatctgcacgttgtgttagacatggctaaagtagctgataccatcctgttcctccttgatccactagaaggctgggacagcaccggtgattactgtctttcctgcctctttgctcagggccttccgacctatacactagctgtccaggggatttctggcctcccactgaagaaacaaatagataccaggaagaagctaagtaaagcagtggagaagcgctttccgcatgacaaactcctcttgttagacactcaacaggaggcagggatgctgcttaggcagttggctaaccagaagcaacagcatcttgcttttcgagatcggcgggcctacctatttgcccatgctgttgattttgttcctagtgaagagaataacttggtgggcaccttgaaaatttcaggctatgttcgagggcagactctgaatgtcaataggttgctgcatatcgttggatatggtgatttccagatgaaacagatagatgcccccggagaccctttccctttaaatcctagaggaattaaaccccaaaaggacccagacatggcaatggagatttgtgctacggatgctgtagatgatatggaagaaggtcttaaagtcctaatgaaggcagaccctggtagacaggaatccttgcaagcagaggttatcccagatccaatggagggagagcaaacctggcccactgaggaggagctgagcgaggcaaaggatttcttgaaggaaagttctaaggtggtaaagaaggtccccaaaggaacatccagttaccaagctgaatggattttggatggtggcagccaaagtggtggggaaggagatgaatatgaatatgatgatatggaacatgaggattttatggaggaggaatctcaggatgagagtagtgaagaagaggaagaatatgaaactatgactattggggagtctgtgcatgatgatctgtatgataagaaagtagatgaagaagctgaggcaaaaatgttggagaaatataaacaagaaagactggaagagatgtttccagatgaagtggacacgccccgtgatgtggctgctcgaattcgatttcagaaatacagaggccttaagagcttccggacatctccatgggatcctaaggaaaaccttcctcaagattatgctcgaatatttcagtttcagaactttactaacactaggaaaagcatctttaaagaggttgaagaaaaagaggttgaaggagctgaggttggctggtatgtcacacttcatgtctctgaagtccccgtctcagtggtcgagtgcttcaggcaaggaacacccttgattgcattttctttactacctcatgaacagaagatgtcagtattgaatatggtggtgaggcgtgaccctggcaacactgaacctgtgaaagccaaggaagagctcatatttcactgtggattcaggcgcttccgagcctcacctttattctctcagcacactgcagcggacaaacataaattgcagagattcctgactgctgacatggccctggtggcgacagtctatgcgccaatcacttttcctcctgcatctgtgctgcttttcaagcaaaaaagcaatggaatgcacagcctcattgctacaggccatcttatgtcagtagatccagacagaatggtcatcaagagagttgttctgagtggtcatcctttcaaaatttttactaagatggcagtagtacgttacatgttcttcaacagagaggatgtgctgtggtttaaaccagtggaactgagaacgaagtggggccggagaggacatatcaaggaacctttaggtacccatggccacatgaaatgcagctttgatgggaagctaaaatctcaagacacagtactgatgaacctgtataaacgagtcttccccaaatggacttatgatccatatgtaccagaaccagtaccctggctgaaaagtgagatttcttcaacagtgcctcaagggggcatggagtaatggattcaaagagattctgtcttaccggtgccagtcagtactccagggatgggaggcacaagttgtgattgggcaaagtttattttctatgtcagcctgtcagtccactgccccattttgcaagacttttttttagccttgacaaaatgtctcagttaagtataaaagtttttccactacttagtccaaaaaaaactattaaatcttaatgaaatagccactctccattaagaatctgataactaagagttgacaatactaggaaacaaaatgtcttcagtatctaaagacactgaattcccaccatttccttttctgtaaattaaacagaaacagactgataagaagctggcctttcagcctgcttcacccaagttatggaggaggttaagtctacatttccaccactgagcacaatacaaatgttctttacttctggggaaacagtttgaaaatgttgagacagcacagcagccactccaacaccagctgtaggttcaatgagtagtttcatcctctcccacaccagctgggttgcacacttaatttcatcctctgtgacagtgaagatatcatccacaaggtccctgataataggccaggtgttcaagccaatgctggatttgacaccatctgctatggtttctggaggataaagattgggcatcagtttccccttcagcttggactggtagcagtcatctgcatttgagggttcagcagcatataccttcacactaggtttcagagcctgggaagaggaatattaagacatcttaacaacaaaccacaacattgcctgcatgtctaaaagaaaatatgggcctggtgtggtggctcacacctgtaatcccaacactttgggagcccgaggcgggtggatcagctgaggtcaggagttcaagaccagcctggccaacctggtgaaatgcagtgtcaactaaaaataggaaaatcagccaggcgtggtggcagacccctgtaatcccagctactcaagaggctgaggtaggagaatcacttgaacttgggaggggtaggttgcagtgagctgagatcacaccaaaatggggtggggcgcagtggctcacgcctgtaatcccagcactttgggaggccgaggtgggcggatcacgaggtagggagatcaagaccatcctggctaacacggtgaaaccccgtctctactaaaaatacaaaaaaaaaaaacaaaaaaaaactagccaggcatggtggcaggcacctgtagtcccagctactcgggaggcagaggcaggagaatggcgtgaacctgggaggtggagcttgcagtgagccaagatcgtgccactgcactccagcctgggtgacagagtgagactccgtctcaaaaaaaaaaaagaaaataggcacaataagtaatacatttctgcccaagtaagagccttcccttttgtggatgtaatgaaaatatcttcaagcactttataaataaattatatgtctgatactagc

SEQ ID NO: 422522 - DNA, 5165 bp, Homo sapiens
cccgcacagacgtcaggcggcaggcccggccccttcccacagccggaggggggttgcgcacagcgacgggggatcggggcggggagaggccgtgcgcgcctaggggcggcagacccgggcgcgcgccacgggggtcgctgtcatggcaacgcacccgctcccgcatggagggcgcgaagccgcattgtgagcgctggccctggagcccgcggccccgcggctgagagcgagcctcggtcccgctgaagctcccctgacttctgcctgctccctctcccgacgggacggaaagggccggggctcgggcatggggtcccctgcggtccgagcctgcccacggcgaagccggtgcagcctggccccgtgacccctctgaatccccgtccggccgtcgccgtgcagttgtcaagtttctgggaagattagtgggagcgcagccgcccgagcccgacggccggagggtcgcggccagtcccccttgccgggtcgccacgtcccacaaggtccttcccggccgctccgtgggaggcggggcgcaggttggagtaacagggacgggcttgagctggtacggaaccgggcaaggtgagagaagtgtcttccacgcgattcccaagcctcgctagggaatcgagggagaagaaaggttgctcagagtgataaagaacatgccgttgcaaacggaagagcaacgtgcccgaatctaggtgacaggaagggcttaggccttttcggcacgaatggagccttccagtcaacatgcttctacgtgatgcagctttatagcgcaaaaaaatgacaatgcaaggggtacaaacagccctgctagaccaacagcccgagcctcgacagtctacatccggcgccttcaagcccccaaccacacactgcgaagtgggaaaagttcccagcgcggcttggcgaacccgctaacacggcgctctcacgagctgctggaaaagaccttcgcgagagggcgcagggagtcccgctccctggagggcccgcccccttggaggggaccggaagcgcttgtcctggcccggaagcagtgctgactccgtacacgcgcgctgcggcatggcggcccaccgccccggcccgctcaagcagcagaataaagctcataaaggcggacggcatcggggtcggggatctgcacagcgggacggcaagggccgtctggcactgaaaaccctaagcaagaaggtgagaaaagaactcagcagagtcgaccagaggcatcgcgccagccagctccgaaagcagaagaaggaggcggttctggcagagaagagacagctgggtggcaaggatggccctcctcatcaggtactggtggtgcccctgcacagcagaatttccctgccagaggccatgcagctgcttcaagatagggacactggaacagtacacttgaatgaattgggaaacacccagaactttatgctgctgtgcccccgcttgaaacatcggtggtttttcacctcagcaaggccaggggatctgcacgttgtgttagacatggctaaagtagctgataccatcctgttcctccttgatccactagaaggctgggacagcaccggtgattactgtctttcctgcctctttgctcagggccttccgacctatacactagctgtccaggggatttctggcctcccactgaagaaacaaatagataccaggaagaagctaagtaaagcagtggagaagcgctttccgcatgacaaactcctcttgttagacactcaacaggaggcagggatgctgcttaggcagttggctaaccagaagcaacagcatcttgcttttcgagatcggcgggcctacctatttgcccatgctgttgattttgttcctagtgaagagaataacttggtgggcaccttgaaaatttcaggctatgttcgagggcagactctgaatgtcaataggttgctgcatatcgttggatatggtgatttccagatgaaacagatagatgcccccggagaccctttccctttaaatcctagaggaattaaaccccaaaaggacccagacatggcaatggagatttgtgctacggatgctgtagatgatatggaagaaggtcttaaagtcctaatgaaggcagaccctggtagacaggaatccttgcaagcagaggttatcccagatccaatggagggagagcaaacctggcccactgaggaggagctgagcgaggcaaaggatttcttgaaggaaagttctaaggtggtaaagaaggtccccaaaggaacatccagttaccaagctgaatggattttggatggtggcagccaaagtggtggggaaggagatgaatatgaatatgatgatatggaacatgaggattttatggaggaggaatctcaggatgagagtagtgaagaagaggaagaatatgaaactatgactattggggagtctgtgcatgatgatctgtatgataagaaagtagatgaagaagctgaggcaaaaatgttggagaaatataaacaagaaagactggaagagatgtttccagatgaagtggacacgccccgtgatgtggctgctcgaattcgatttcagaaatacagaggccttaagagcttccggacatctccatgggatcctaaggaaaaccttcctcaagattatgctcgaatatttcagtttcagaactttactaacactaggaaaagcatctttaaagaggttgaagaaaaagaggttgaaggagctgaggttggctggtatgtcacacttcatgtctctgaagtccccgtctcagtggtcgagtgcttcaggcaaggaacacccttgattgcattttctttactacctcatgaacagaagcggacaaacataaattgcagagattcctgactgctgacatggccctggtggcgacagtctatgcgccaatcacttttcctcctgcatctgtgctgcttttcaagcaaaaaagcaatggaatgcacagcctcattgctacaggccatcttatgtcagtagatccagacagaatggtcatcaagagagttgttctgagtggtcatcctttcaaaatttttactaagatggcagtagtacgttacatgttcttcaacagagaggatgtgctgtggtttaaaccagtggaactgagaacgaagtggggccggagaggacatatcaaggaacctttaggtacccatggccacatgaaatgcagctttgatgggaagctaaaatctcaagacacagtactgatgaacctgtataaacgagtcttccccaaatggacttatgatccatatgtaccagaaccagtaccctggctgaaaagtgagatttcttcaacagtgcctcaagggggcatggagtaatggattcaaagagattctgtcttaccggtgccagtcagtactccagggatgggaggcacaagttgtgattgggcaaagtttattttctatgtcagcctgtcagtccactgccccattttgcaagacttttttttagccttgacaaaatgtctcagttaagtataaaagtttttccactacttagtccaaaaaaaactattaaatcttaatgaaatagccactctccattaagaatctgataactaagagttgacaatactaggaaacaaaatgtcttcagtatctaaagacactgaattcccaccatttccttttctgtaaattaaacagaaacagactgataagaagctggcctttcagcctgcttcacccaagttatggaggaggttaagtctacatttccaccactgagcacaatacaaatgttctttacttctggggaaacagtttgaaaatgttgagacagcacagcagccactccaacaccagctgtaggttcaatgagtagtttcatcctctcccacaccagctgggttgcacactgttgatatggaagggagtaggaattagtgaaaggggagtctagttggtttacctataaagttcagatgagaatacgtgtccagtttgaattttcttatcactgtgtacacacgcttcccaaagcttttctttaattctgactctgcttctgtcaagagggttgtcattaatacatctagggtaccctcccatgtcatgaagttacctagtcaggttcccgtgggtcacttgctactcctaagggaagtttcttctgcctaagaagttacaccatgctttgctatttcttttcttgctggagcctcaccttaatttcatcctctgtgacagtgaagatatcatccacaaggtccctgataataggccaggtgttcaagccaatgctggatttgacaccatctgctatggtttctggaggataaagattgggcatcagtttccccttcagcttggactggtagcagtcatctgcatttgagggttcagcagcatataccttcacactaggtttcagagcctgggaagaggaatattaagacatcttaacaacaaaccacaacattgcctgcatgtctaaaagaaaatatgggcctggtgtggtggctcacacctgtaatcccaacactttgggagcccgaggcgggtggatcagctgaggtcaggagttcaagaccagcctggccaacctggtgaaatgcagtgtcaactaaaaataggaaaatcagccaggcgtggtggcagacccctgtaatcccagctactcaagaggctgaggtaggagaatcacttgaacttgggaggggtaggttgcagtgagctgagatcacaccaaaatggggtggggcgcagtggctcacgcctgtaatcccagcactttgggaggccgaggtgggcggatcacgaggtagggagatcaagaccatcctggctaacacggtgaaaccccgtctctactaaaaatacaaaaaaaaaaaacaaaaaaaaactagccaggcatggtggcaggcacctgtagtcccagctactcgggaggcagaggcaggagaatggcgtgaacctgggaggtggagcttgcagtgagccaagatcgtgccactgcactccagcctgggtgacagagtgagactccgtctcaaaaaaaaaaaagaaaataggcacaataagtaatacatttctgcccaagtaagagccttcccttttgtggatgtaatgaaaatatcttcaagcactttataaataaattatatgtctgatactagc

SEQ ID NO: 422523 - DNA, 3634 bp, Homo sapiens
cccgcacagacgtcaggcggcaggcccggccccttcccacagccggaggggggttgcgcacagcgacgggggatcggggcggggagaggccgtgcgcgcctaggggcggcagacccgggcgcgcgccacgggggtcgctgtcatggcaacgcacccgctcccgcatggagggcgcgaagccgcattgtgagcgctggccctggagcccgcggccccgcggctgagagcgagcctcggtcccgctgaagctcccctgacttctgcctgctccctctcccgacgggacggaaagggccggggctcgggcatggggtcccctgcggtccgagcctgcccacggcgaagccggtgcagcctggccccgtgacccctctgaatccccgtccggccgtcgccgtgcagttgtcaagtttctgggaagattagtgggagcgcagccgcccgagcccgacggccggagggtcgcggccagtcccccttgccgggtcgccacgtcccacaaggtccttcccggccgctccgtgggaggcggggcgcaggttggagtaacagggacgggcttgagctggtacggaaccgggcaaggtgagagaagtgtcttccacgcgattcccaagcctcgctagggaatcgagggagaagaaaggttgctcagagtgataaagaacatgccgttgcaaacggaagagcaacgtgcccgaatctaggtgacaggaagggcttaggccttttcggcacgaatggagccttccagtcaacatgcttctacgtgatgcagctttatagcgcaaaaaaatgacaatgcaaggggtacaaacagccctgctagaccaacagcccgagcctcgacagtctacatccggcgccttcaagcccccaaccacacactgcgaagtgggaaaagttcccagcgcggcttggcgaacccgctaacacggcgctctcacgagctgctggaaaagaccttcgcgagagggcgcagggagtcccgctccctggagggcccgcccccttggaggggaccggaagcgcttgtcctggcccggaagcagtgctgactccgtacacgcgcgctgcggcatggcggcccaccgccccggcccgctcaagcagcagaataaagctcataaaggcggacggcatcggggtcggggatctgcacagcgggacggcaagggccgtctggcactgaaaaccctaagcaagaaggtgagaaaagaactcagcagagtcgaccagaggcatcgcgccagccagctccgaaagcagaagaaggaggcggttctggcagagaagagacagctgggtggcaaggatggccctcctcatcaggtactggtggtgcccctgcacagcagaatttccctgccagaggccatgcagctgcttcaagatagggacactggaacagtacacttgaatgaattgggaaacacccagaactttatgctgctgtgcccccgcttgaaacatcggtggtttttcacctcagcaaggccaggggatctgcacgttgtgttagacatggctaaagtagctgataccatcctgttcctccttgatccactagaaggctgggacagcaccggtgattactgtctttcctgcctctttgctcagggccttccgacctatacactagctgtccaggggatttctggcctcccactgaagaaacaaatagataccaggaagaagctaagtaaagcagtggagaagcgctttccgcatgacaaactcctcttgttagacactcaacaggaggcagggatgctgcttaggcagttggctaaccagaagcaacagcatcttgcttttcgagatcggcgggcctacctatttgcccatgctgttgattttgttcctagtgaagagaataacttggtgggcaccttgaaaatttcaggctatgttcgagggcagactctgaatgtcaataggttgctgcatatcgttggatatggtgatttccagatgaaacagatagatgcccccggagaccctttccctttaaatcctagaggaattaaaccccaaaaggacccagacatggcaatggagatttgtgctacggatgctgtagatgatatggaagaaggtcttaaagtcctaatgaaggcagaccctggtagacaggaatccttgcaagcagaggttatcccagatccaatggagggagagcaaacctggcccactgaggaggagctgagcgaggcaaaggatttcttgaaggaaagttctaaggtggtaaagaaggtccccaaaggaacatccagttaccaagctgaatggattttggatggtggcagccaaagtggtggggaaggagatgaatatgaatatgatgatatggaacatgaggattttatggaggaggaatctcaggatgagagtagtgaagaagaggaagaatatgaaactatgactattggggagtctgtgcatgatgatctgtatgataagaaagtagatgaagaagctgaggcaaaaatgttggagaaatataaacaagaaagactggaagagatgtttccagatgaagtggacacgccccgtgatgtggctgctcgaattcgatttcagaaatacagaggccttaagagcttccggacatctccatgggatcctaaggaaaaccttcctcaagattatgctcgaatatttcagtttcagaactttactaacactaggaaaagcatctttaaagaggttgaagaaaaagaggttgaaggagctgaggttggctggtatgtcacacttcatgtctctgaagtccccgtctcagtggtcgagtgcttcaggcaaggaacacccttgattgcattttctttactacctcatgaacagaagatgtcagtattgaatatggtggtgaggcgtgaccctggcaacactgaacctgtgaaagccaaggaagagctcatatttcactgtggattcaggcgcttccgagcctcacctttattctctcagcacactgcagcggacaaacataaattgcagagattcctgactgctgacatggccctggtggcgacagtctatgcgccaatcacttttcctcctgcatctgtgctgcttttcaagcaaaaaagcaatggaatgcacagtctctttgttacaggccctcttatagttacagattccgacacaatcggtatccctatacccgtcctgagaggccctcctctccaaaactattactaacatgccactctaaccacacacgatctcccattaacaagacgccattactcataacgccgatgaacctataactaacgtgtgctctcacagcacaacacaacgcaccattaacacattattggggtcatccacctcccctcccgcccacatactcacatatatataattgtgcactctcgcaaataatagcatcaacatcagcgcacgctacttatgatcccatagtcacctaacactgatgtcgcgacttttacaggctattctttttgctccgctcaccccctattcatcgccccgatccttccgaccttaactcgccttccagtttcaccccgtatgacccttacattggaccccttaagtgactctccgtttcctcacccaggttctacattttcatacacgttttatatttacccccctcatt

SEQ ID NO: 422524 - DNA, 677 bp, Homo sapiens
tttaatttaggcacttataaaatgttttccctctacctgctgctactctgccaagagccaccaagtgcttatatttttcattttttactcctttagtttggaaagccatatacgtttgagaaggtgttttaaaactctgtgttacacttacgatgcaaagccaaatcagaacttctgtaaggcagaactttcccaactttaaaaaaattattgtcccctctaaggagccttcttagacgttttttcctaatcacccccaaagacattttaataccacatatatattgtttatgtactatatgtatatacataaacaatacataagcaatacatctgtggtattaaaattaaaaagaatccaattatgtttacctcaaaagaacctgtttttgcttcttgggagcaatattgcccctgtgagactgcatgctataaggtaaggttgtgcttgttaaagacccaagacatgactgggttccacagtctccaaaggaagagggtgggctagtctgtttttattattattttaaaattgtataattggggtctttcttagagttcagaaaaggtatagcttactcttttttaattgtttatttagttgtaagcttggtgattgttttctgatccacattgtgtgtgttcttcaataaaatctttcatttctgcaattttac

SEQ ID NO: 422525 - DNA, 1950 bp, Homo sapiens
tcatagtcaggggctattgtggcctggacagaggcagaaagacacgacacagcaggcttccttcctgtcttgctcttatctgaagttgcagagagtgggtgggagtatgcctgaggtgcaggtgaggcacgtttagcctgagccggccacggactccacttcccctgctcttcccccagtggcaaatccgcgccacctcgcaaacccccaactcaggcacttgggccccttttgggccccctctcgctcctccctttaggcacctccctgggcccgcccacggtctccccccagtttgggactgcgtcataagtatcccagacctcggcttgcagtagtgttagactgaagataaagtaagtgctgtttgggctaacaggatctcctcttgcagtctgcagcccaggacgctgattccagcagcgccttaccgcgcagcccgaagattcactatggtgaaaatcgccttcaatacccctaccgccgtgcaaaaggaggaggcgcggcaagacgtggaggccctcctgagccgcacggtcagaactcagatactgaccggcaaggagctccgagttgccacccaggaaaaagagggctcctctgggagatgtatgcttactctcttaggcctttcattcatcttggcaggacttattgttggtggagcctgcatttacaagtacttcatgcccaagagcaccatttaccgtggagagatgtgcttttttgattctgaggatcctgcaaattcccttcgtggaggagagcctaacttcctgcctgtgactgaggaggctgacattcgtgaggatgacaacattgcaatcattgatgtgcctgtccccagtttctctgatagtgaccctgcagcaattattcatgactttgaaaagggaatgactgcttacctggacttgttgctggggaactgctatctgatgcccctcaatacttctattgttatgcctccaaaaaatctggtagagctctttggcaaactggcgagtggcagatatctgcctcaaacttatgtggttcgagaagacctagttgctgtggaggaaattcgtgatgttagtaaccttggcatctttatttaccaactttgcaataacagaaagtccttccgccttcgtcgcagagacctcttgctgggtttcaacaaacgtgccattgataaatgctggaagattagacacttccccaacgaatttattgttgagaccaagatctgtcaagagtaagaggcaacagatagagtgtccttggtaataagaagtcagagatttacaatatgactttaacattaaggtttatgggatactcaagatatttactcatgcatttactctattgcttatgctttaaaaaaaggaaaaaaaaaaaactactaaccactgcaagctcttgtcaaattttagtttaattggcattgcttgttttttgaaactgaaattacatgagtttcattttttctttgaatttatagggtttagatttctgaaagcagcatgaatatatcacctaacatcctgacaataaattccatccgttgttttttttgtttgtttgttttttcttttcctttaagtaagctctttattcatcttatggtgcagcaattttaaaatttgaaatattttaaattgtttttgaactttttgtgtaaaatatatcagatctcaacattgttggtttcttttgtttttcattttgtacaactttcttgaatttagaaattacatctttgcagttctgttaggtgctctgtaattaacctgacttatatgtgaacaattttcatgagacagtcatttttaactaatgcagtgattctttctcactactatctgtattgtggaatgcacaaaattgtgtaggtgctgaatgctgtaaggagtttaggttgtatgaattctacaaccctataataaattttactctatacaa

SEQ ID NO: 422526 - DNA, 1677 bp, Homo sapiens
tcatagtcaggggctattgtggcctggacagaggcagaaagacacgacacagcaggcttccttcctgtcttgctcttatctgaagttgcagagagtgggtgggagtatgcctgaggtgcagtctgcagcccaggacgctgattccagcagcgccttaccgcgcagcccgaagattcactatggtgaaaatcgccttcaatacccctaccgccgtgcaaaaggaggaggcgcggcaagacgtggaggccctcctgagccgcacggtcagaactcagatactgaccggcaaggagctccgagttgccacccaggaaaaagagggctcctctgggagatgtatgcttactctcttaggcctttcattcatcttggcaggacttattgttggtggagcctgcatttacaagtacttcatgcccaagagcaccatttaccgtggagagatgtgcttttttgattctgaggatcctgcaaattcccttcgtggaggagagcctaacttcctgcctgtgactgaggaggctgacattcgtgaggatgacaacattgcaatcattgatgtgcctgtccccagtttctctgatagtgaccctgcagcaattattcatgactttgaaaagggaatgactgcttacctggacttgttgctggggaactgctatctgatgcccctcaatacttctattgttatgcctccaaaaaatctggtagagctctttggcaaactggcgagtggcagatatctgcctcaaacttatgtggttcgagaagacctagttgctgtggaggaaattcgtgatgttagtaaccttggcatctttatttaccaactttgcaataacagaaagtccttccgccttcgtcgcagagacctcttgctgggtttcaacaaacgtgccattgataaatgctggaagattagacacttccccaacgaatttattgttgagaccaagatctgtcaagagtaagaggcaacagatagagtgtccttggtaataagaagtcagagatttacaatatgactttaacattaaggtttatgggatactcaagatatttactcatgcatttactctattgcttatgctttaaaaaaaggaaaaaaaaaaaactactaaccactgcaagctcttgtcaaattttagtttaattggcattgcttgttttttgaaactgaaattacatgagtttcattttttctttgaatttatagggtttagatttctgaaagcagcatgaatatatcacctaacatcctgacaataaattccatccgttgttttttttgtttgtttgttttttcttttcctttaagtaagctctttattcatcttatggtgcagcaattttaaaatttgaaatattttaaattgtttttgaactttttgtgtaaaatatatcagatctcaacattgttggtttcttttgtttttcattttgtacaactttcttgaatttagaaattacatctttgcagttctgttaggtgctctgtaattaacctgacttatatgtgaacaattttcatgagacagtcatttttaactaatgcagtgattctttctcactactatctgtattgtggaatgcacaaaattgtgtaggtgctgaatgctgtaaggagtttaggttgtatgaattctacaaccctataataaattttactctatacaa

SEQ ID NO: 422527 - DNA, 1458 bp, Homo sapiens
gtcactctgcattcccgcgtgtcgtgccatgttctgtctgttccagctcacaccagctgtcctggaaggaggagctccgagttgccacccaggaaaaagagggctcctctgggagatgtatgcttactctcttaggcctttcattcatcttggcaggacttattgttggtggagcctgcatttacaagtacttcatgcccaagagcaccatttaccgtggagagatgtgcttttttgattctgaggatcctgcaaattcccttcgtggaggagagcctaacttcctgcctgtgactgaggaggctgacattcgtgaggatgacaacattgcaatcattgatgtgcctgtccccagtttctctgatagtgaccctgcagcaattattcatgactttgaaaagggaatgactgcttacctggacttgttgctggggaactgctatctgatgcccctcaatacttctattgttatgcctccaaaaaatctggtagagctctttggcaaactggcgagtggcagatatctgcctcaaacttatgtggttcgagaagacctagttgctgtggaggaaattcgtgatgttagtaaccttggcatctttatttaccaactttgcaataacagaaagtccttccgccttcgtcgcagagacctcttgctgggtttcaacaaacgtgccattgataaatgctggaagattagacacttccccaacgaatttattgttgagaccaagatctgtcaagagtaagaggcaacagatagagtgtccttggtaataagaagtcagagatttacaatatgactttaacattaaggtttatgggatactcaagatatttactcatgcatttactctattgcttatgctttaaaaaaaggaaaaaaaaaaaactactaaccactgcaagctcttgtcaaattttagtttaattggcattgcttgttttttgaaactgaaattacatgagtttcattttttctttgaatttatagggtttagatttctgaaagcagcatgaatatatcacctaacatcctgacaataaattccatccgttgttttttttgtttgtttgttttttcttttcctttaagtaagctctttattcatcttatggtgcagcaattttaaaatttgaaatattttaaattgtttttgaactttttgtgtaaaatatatcagatctcaacattgttggtttcttttgtttttcattttgtacaactttcttgaatttagaaattacatctttgcagttctgttaggtgctctgtaattaacctgacttatatgtgaacaattttcatgagacagtcatttttaactaatgcagtgattctttctcactactatctgtattgtggaatgcacaaaattgtgtaggtgctgaatgctgtaaggagtttaggttgtatgaattctacaaccctataataaattttactctatacaa

SEQ ID NO: 422528 - DNA, 1818 bp, Homo sapiens
tcatagtcaggggctattgtggcctggacagaggcagaaagacacgacacagcaggcttccttcctgtcttgctcttatctgaagttgcagagagtgggtgggagtatgcctgaggtgcaggtgaggcacgtttagcctgagccggccacggactccacttcccctgctcttcccccagtggcaaatccgcgccacctcgcaaacccccaactcaggcacttgggccccttttgggccccctctcgctcctccctttaggcacctccctgggcccgcccacggtctccccccagtttgggactgcgtcataagtatcccagacctcggcttgcagtagtgttagactgaagataaagtaagtgctgtttgggctaacaggatctcctcttgcagtctgcagcccaggacgctgattccagcagcgccttaccgcgcagcccgaagattcactatggtgaaaatcgccttcaatacccctaccgccgtgcaaaaggaggaggcgcggcaagacgtggaggccctcctgagccgcacggtcagaactcagatactgaccggcaagagcaccatttaccgtggagagatgtgcttttttgattctgaggatcctgcaaattcccttcgtggaggagagcctaacttcctgcctgtgactgaggaggctgacattcgtgaggatgacaacattgcaatcattgatgtgcctgtccccagtttctctgatagtgaccctgcagcaattattcatgactttgaaaagggaatgactgcttacctggacttgttgctggggaactgctatctgatgcccctcaatacttctattgttatgcctccaaaaaatctggtagagctctttggcaaactggcgagtggcagatatctgcctcaaacttatgtggttcgagaagacctagttgctgtggaggaaattcgtgatgttagtaaccttggcatctttatttaccaactttgcaataacagaaagtccttccgccttcgtcgcagagacctcttgctgggtttcaacaaacgtgccattgataaatgctggaagattagacacttccccaacgaatttattgttgagaccaagatctgtcaagagtaagaggcaacagatagagtgtccttggtaataagaagtcagagatttacaatatgactttaacattaaggtttatgggatactcaagatatttactcatgcatttactctattgcttatgctttaaaaaaaggaaaaaaaaaaaactactaaccactgcaagctcttgtcaaattttagtttaattggcattgcttgttttttgaaactgaaattacatgagtttcattttttctttgaatttatagggtttagatttctgaaagcagcatgaatatatcacctaacatcctgacaataaattccatccgttgttttttttgtttgtttgttttttcttttcctttaagtaagctctttattcatcttatggtgcagcaattttaaaatttgaaatattttaaattgtttttgaactttttgtgtaaaatatatcagatctcaacattgttggtttcttttgtttttcattttgtacaactttcttgaatttagaaattacatctttgcagttctgttaggtgctctgtaattaacctgacttatatgtgaacaattttcatgagacagtcatttttaactaatgcagtgattctttctcactactatctgtattgtggaatgcacaaaattgtgtaggtgctgaatgctgtaaggagtttaggttgtatgaattctacaaccctataataaattttactctatacaa

SEQ ID NO: 422529 - DNA, 1978 bp, Homo sapiens
tcatagtcaggggctattgtggcctggacagaggcagaaagacacgacacagcaggcttccttcctgtcttgctcttatctgaagttgcagagagtgggtgggagtatgcctgaggtgcaggtgaggcacgtttagcctgagccggccacggactccacttcccctgctcttcccccagtggcaaatccgcgccacctcgcaaacccccaactcaggcacttgggccccttttgggccccctctcgctcctccctttaggcacctccctgggcccgcccacggtctccccccagtttgggactgcgtcataagtatcccagacctcggcttgcagtagtgttagactgaagataaagtaagtgctgtttgggctaacaggatctcctcttgcagtctgcagcccaggacgctgattccagcagcgccttaccgcgcagcccgaagattcactatggtgaaaatcgccttcaatacccctaccgccgtgcaaaaggaggaggcgcggcaagacgtggaggccctcctgagccgcacggtcagaactcagatactgaccggcaaggagctccgagttgccacccaggaaaaagagggctcctctgggagatgtatgcttactctcttaggcctttcattcatcttggcaggacttattgttggtggagcctgcatttacaagtacttcatgcccaaggttgtaattttccctttttgtcttttagagcaccatttaccgtggagagatgtgcttttttgattctgaggatcctgcaaattcccttcgtggaggagagcctaacttcctgcctgtgactgaggaggctgacattcgtgaggatgacaacattgcaatcattgatgtgcctgtccccagtttctctgatagtgaccctgcagcaattattcatgactttgaaaagggaatgactgcttacctggacttgttgctggggaactgctatctgatgcccctcaatacttctattgttatgcctccaaaaaatctggtagagctctttggcaaactggcgagtggcagatatctgcctcaaacttatgtggttcgagaagacctagttgctgtggaggaaattcgtgatgttagtaaccttggcatctttatttaccaactttgcaataacagaaagtccttccgccttcgtcgcagagacctcttgctgggtttcaacaaacgtgccattgataaatgctggaagattagacacttccccaacgaatttattgttgagaccaagatctgtcaagagtaagaggcaacagatagagtgtccttggtaataagaagtcagagatttacaatatgactttaacattaaggtttatgggatactcaagatatttactcatgcatttactctattgcttatgctttaaaaaaaggaaaaaaaaaaaactactaaccactgcaagctcttgtcaaattttagtttaattggcattgcttgttttttgaaactgaaattacatgagtttcattttttctttgaatttatagggtttagatttctgaaagcagcatgaatatatcacctaacatcctgacaataaattccatccgttgttttttttgtttgtttgttttttcttttcctttaagtaagctctttattcatcttatggtgcagcaattttaaaatttgaaatattttaaattgtttttgaactttttgtgtaaaatatatcagatctcaacattgttggtttcttttgtttttcattttgtacaactttcttgaatttagaaattacatctttgcagttctgttaggtgctctgtaattaacctgacttatatgtgaacaattttcatgagacagtcatttttaactaatgcagtgattctttctcactactatctgtattgtggaatgcacaaaattgtgtaggtgctgaatgctgtaaggagtttaggttgtatgaattctacaaccctataataaattttactctatacaa

SEQ ID NO: 422530 - DNA, 1897 bp, Homo sapiens
tcatagtcaggggctattgtggcctggacagaggcagaaagacacgacacagcaggcttccttcctgtcttgctcttatctgaagttgcagagagtgggtgggagtatgcctgaggtgcaggtgaggcacgtttagcctgagccggccacggactccacttcccctgctcttcccccagtggcaaatccgcgccacctcgcaaacccccaactcaggcacttgggccccttttgggccccctctcgctcctccctttaggcacctccctgggcccgcccacggtctccccccagtttgggactgcgtcataagtatcccagacctcggcttgcagtagtgttagactgaagataaagtaagtgctgtttgggctaacaggatctcctcttgcagtctgcagcccaggacgctgattccagcagcgccttaccgcgcagcccgaagattcactatggtgaaaatcgccttcaatacccctaccgccgtgcaaaaggaggaggcgcggcaagacgtggaggccctcctgagccgcacggtcagaactcagatactgaccggcaaggagctccgagttgccacccaggaaaaagagggctcctctgggagatgtatgcttactctcttaggcctttcattcatcttggcaggacttattgttggtggagcctgcatttacaagtacttcatgcccaagagcaccatttaccgtggagagatgtgcttttttgattctgaggatcctgcaaattcccttcgtggaggagagcctaacttcctgcctgtgactgaggaggctgacattcgtgaggatgacaacattgcaatcattgatgtgcctgtccccagtttctctgatagtgaccctgcagcaattattcatgactttgaaaagggaatgactgcttacctggacttgttgctggggaactgctatctgatgcccctcaatacttctattgttatgcctccaaaaaattgtggttcgagaagacctagttgctgtggaggaaattcgtgatgttagtaaccttggcatctttatttaccaactttgcaataacagaaagtccttccgccttcgtcgcagagacctcttgctgggtttcaacaaacgtgccattgataaatgctggaagattagacacttccccaacgaatttattgttgagaccaagatctgtcaagagtaagaggcaacagatagagtgtccttggtaataagaagtcagagatttacaatatgactttaacattaaggtttatgggatactcaagatatttactcatgcatttactctattgcttatgctttaaaaaaaggaaaaaaaaaaaactactaaccactgcaagctcttgtcaaattttagtttaattggcattgcttgttttttgaaactgaaattacatgagtttcattttttctttgaatttatagggtttagatttctgaaagcagcatgaatatatcacctaacatcctgacaataaattccatccgttgttttttttgtttgtttgttttttcttttcctttaagtaagctctttattcatcttatggtgcagcaattttaaaatttgaaatattttaaattgtttttgaactttttgtgtaaaatatatcagatctcaacattgttggtttcttttgtttttcattttgtacaactttcttgaatttagaaattacatctttgcagttctgttaggtgctctgtaattaacctgacttatatgtgaacaattttcatgagacagtcatttttaactaatgcagtgattctttctcactactatctgtattgtggaatgcacaaaattgtgtaggtgctgaatgctgtaaggagtttaggttgtatgaattctacaaccctataataaattttactctatacaa

SEQ ID NO: 422531 - DNA, 248 bp, Homo sapiens
gaatgactgcttacctggacttgttgctggggaactgctatctgatgcccctcaatacttctattgttatgcctccaaaaaatctggtagagctctttggcaaactggcggtatgtattttggaagtcaaatttttatataagcatttccaagtaattttacttccttgttttttaaaaaaataatgaatttgtccaaaacattttattttattgaaataattttgaaataaaaaacgttgtgaacct

SEQ ID NO: 422532 - DNA, 1865 bp, Homo sapiens
tcatagtcaggggctattgtggcctggacagaggcagaaagacacgacacagcaggcttccttcctgtcttgctcttatctgaagttgcagagagtgggtgggagtatgcctgaggtgcaggtgaggcacgtttagcctgagccggccacggactccacttcccctgctcttcccccagtggcaaatccgcgccacctcgcaaacccccaactcaggcacttgggccccttttgggccccctctcgctcctccctttaggcacctccctgggcccgcccacggtctccccccagtttgggactgcgtcataagtatcccagacctcggcttgcagtagtgttagactgaagataaagtaagtgctgtttgggctaacaggatctcctcttgcagtctgcagcccaggacgctgattccagcagcgccttaccgcgcagcccgaagattcactatggtgaaaatcgccttcaatacccctaccgccgtgcaaaaggaggaggcgcggcaagacgtggaggccctcctgagccgcacggtcagaactcagatactgaccggcaaggacttattgttggtggagcctgcatttacaagtacttcatgcccaagagcaccatttaccgtggagagatgtgcttttttgattctgaggatcctgcaaattcccttcgtggaggagagcctaacttcctgcctgtgactgaggaggctgacattcgtgaggatgacaacattgcaatcattgatgtgcctgtccccagtttctctgatagtgaccctgcagcaattattcatgactttgaaaagggaatgactgcttacctggacttgttgctggggaactgctatctgatgcccctcaatacttctattgttatgcctccaaaaaatctggtagagctctttggcaaactggcgagtggcagatatctgcctcaaacttatgtggttcgagaagacctagttgctgtggaggaaattcgtgatgttagtaaccttggcatctttatttaccaactttgcaataacagaaagtccttccgccttcgtcgcagagacctcttgctgggtttcaacaaacgtgccattgataaatgctggaagattagacacttccccaacgaatttattgttgagaccaagatctgtcaagagtaagaggcaacagatagagtgtccttggtaataagaagtcagagatttacaatatgactttaacattaaggtttatgggatactcaagatatttactcatgcatttactctattgcttatgctttaaaaaaaggaaaaaaaaaaaactactaaccactgcaagctcttgtcaaattttagtttaattggcattgcttgttttttgaaactgaaattacatgagtttcattttttctttgaatttatagggtttagatttctgaaagcagcatgaatatatcacctaacatcctgacaataaattccatccgttgttttttttgtttgtttgttttttcttttcctttaagtaagctctttattcatcttatggtgcagcaattttaaaatttgaaatattttaaattgtttttgaactttttgtgtaaaatatatcagatctcaacattgttggtttcttttgtttttcattttgtacaactttcttgaatttagaaattacatctttgcagttctgttaggtgctctgtaattaacctgacttatatgtgaacaattttcatgagacagtcatttttaactaatgcagtgattctttctcactactatctgtattgtggaatgcacaaaattgtgtaggtgctgaatgctgtaaggagtttaggttgtatgaattctacaaccctataataaattttactctatacaa

SEQ ID NO: 422533 - DNA, 1303 bp, Homo sapiens
tcatagtcaggggctattgtggcctggacagaggcagaaagacacgacacagcaggcttccttcctgtcttgctcttatctgaagttgcagagagtgggtgggagtatgcctgaggtgcaggtgaggcacgtttagcctgagccggccacggactccacttcccctgctcttcccccagtggcaaatccgcgccacctcgcaaacccccaactcaggcacttgggccccttttgggccccctctcgctcctccctttaggcacctccctgggcccgcccacggtctccccccagtttgggactgcgtcataagtatcccagacctcggcttgcagtagtgttagactgaagataaagtaagtgctgtttgggctaacaggatctcctcttgcagtctgcagcccaggacgctgattccagcagcgccttaccgcgcagcccgaagattcactatggtgaaaatcgccttcaatacccctaccgccgtgcaaaaggaggaggcgcggcaagacgtggaggccctcctgagccgcacggtcagaactcagatactgaccggcaaggagctccgagttgccacccaggaaaaagagggctcctctgggagatgtatgcttactctcttaggcctttcattcatcttggcaggacttattgttggtggagcctgcatttacaagtacttcatgcccaagagcaccatttaccgtggagagatgtgcttttttgattctgaggatcctgcaaattcccttcgtggaggagagcctaacttcctgcctgtgactgaggaggctgacattcgtgaggatgacaacattgcaatcattgatgtgcctgtccccagtttctctgatagtgaccctgcagcaattattcatgactttgaaaagggaatgactgcttacctggacttgttgctggggaactgctatctgatgcccctcaatacttctattgttatgcctccaaaaaatctggtagagctctttggcaaactggcgagtggcagatatctgcctcaaacttatgtggttcgagaagacctagttgctgtggaggaaattcgtgatgttagtaaccttggcatctttatttaccaactttgcaataacagaaagtccttccgccttcgtcgcagagacctcttgctgggtttcaacaaacgtgccattgataaatgctggaagattagacacttccccaacgaatttattgttgagaccaagatctgtcaagagtaagaggcaacagatagagtgtcccataaaccttaatgttaaagtcatattgtaaatgtcga

SEQ ID NO: 422534 - DNA, 1062 bp, Homo sapiens
  misc_feature (996)..(997): n is a, c, g, or t
tcatagtcaggggctattgtggcctggacagaggcagaaagacacgacacagcaggcttccttcctgtcttgctcttatctgaagttgcagagagtgggtgggagtatgcctgaggtgcaggtgaggcacgtttagcctgagccggccacggactccacttcccctgctcttcccccagtggcaaatccgcgccacctcgcaaacccccaactcaggcacttgggccccttttgggccccctctcgctcctccctttaggcacctccctgggcccgcccacggtctccccccagtttgggactgcgtcataagtatcccagacctcggcttgcagtagtgttagactgaagataaagtaagtgctgtttgggctaacaggatctcctcttgcagtctgcagcccaggacgctgattccagcagcgccttaccgcgcagcccgaagattcactatggtgaaaatcgccttcaatacccctaccgccgtgcaaaaggaggaggcgcggcaagacgtggaggccctcctgagccgcacggtcagaactcagatactgaccggcaaggagctccgagttgccacccaggaaaaagagggctcctctgggagatgtatgcttactctcttaggcctttcattcatcttggcaggacttattgttggtggagcctgcatttacaagtacttcatgcccaagagcaccatttaccgtggagagatgtgcttttttgattctgaggatcctgcaaattcccttcgtggaggagagcctaacttcctgcctgtgactgaggaggctgacattcgtgaggatgacaacattgcaatcattgatgtgcctgtccccagtttctctgatagtgaccctgcagcaattattcatgactttgaaaagggaatgactgcttacctggacttgttgctggggaactgctatctgatgcccctcaatacttctattgttatgcctccaaaaaatctggcagatatctgccacnngccagtttgccaaagagctctaccagtcgtccggccgcgaatttagcagtagtagtaggcgccgc

SEQ ID NO: 422535 - DNA, 1881 bp, Homo sapiens
  misc_feature (1879)..(1879): n is a, c, g, or t
tgaagagagaaaggaagctttttctctaaaaatggtgcagctatcctctgaaccaatttccttcggtttaatgtacctgtatcttggggtttttttccacttaatttatcctggagctctttccataacaacacttggaaagcactctcatccttttttcactgctgaacagaattccactgtgtggatggaacatactctatttcaccagtcccctgtagccagtcacttggtttgtttccaatcttttgctttttcagagtaataaccttgtatgtctatcattttgtatgcatacaggtttatatgtaggaaaaattcctagagtaggattgctggaccaatggataaaagtatattgtggacagacaatgccaaattgcctttcagagactgtggccctgtgcaccccatcaggcatgtgtgactaccaaagctcctgtcagctgttttattttatctcctttccagtctcaggctcaatgcagaactttgaggtaagcttttctaaaatgtaggctcctaaacgccacagccagctctgccacatgaaggagagctcaaatgagacagaaacagcctctgggcaggatttctatcctgcacagatatattttccacattctgggaaaccgtgaagcttccagagccacaattccccagaaacacatccccctgctggtacagccaagccccagaacaagctgtgcttgcctggcacctcaaagccaagcaccatggatgccacttgccatgggtgcctgcaatttcaaataatgagaaataagaaatttcagcttctcagtccctctagccaacatttcaggtgcatgacagcctcaggtggcaagcagctactctgccggacagggcagaagatggaacaccccatccctggggaagatcacgaggtcaggagatcaagaccatcctggctaacacagtgaaaccccgtctctactgaaaatacaaaacattagctgggtgtggtggcaggcacctgtagtcccagctactcaggaggctgaggcaggagaatggcgtgaacctgggaggtggaggttgcagtgagccaagattgcgccactgcactccagcctggcaacagagtaagactccatatcaaaaaaaagagaaaagaagaagaagaaagaaagaaagaagaagaagaggaagaagaagaagtggaagaagaaggaaagaggaagaggagaagcaggagaagaacaaggagaagaagaaggagagagaagaagagacaagaagaagaaggagaagaaggagagagaagagacaagagaagaaggaagaaggaggaggagaagaaggaagaagaaaagaaggagaagaaagaagaaggaagaagaaagaacaacaaaaagaaggagaagaacaaggaagaagaacaactaaggagaaggaagaaggagaagaagaaagaagaacaaaaagaaagaagaaagaaggagaaggaagaagaaggaggaggaggagaaggagaagaagaaggagaagaacaaggagaaggagagaagaagaagagacaagaagaaagaaggagaagaagaaggaagaagaagaaaaggaagaagaaaagaggaaggaggaggaagaaggagaagaaggaagaataaggaagaaggagaacaaggagaaggaagaagaaaagaaggagaaggaggaagaaggagaagaaagaggagaagaaggaagaaagaagaaaaaagaaacaatagaagaagaggaagaaagaaaagaaaaaagaaaaagagaagaaagagggaagaaagaaaagaggaagaagaataaggaagaagaagaaaaagaaaagaaaagaaggaagaagaggaagaaagaagaaggaagaagaaaggaaganct

SEQ ID NO: 422536 - DNA, 644 bp, Homo sapiens
  misc_feature (108)..(108): n is a, c, g, or t
ccagtctcatggtgtaatactctcgccacagcatttcaagtgatgccaccgaacagtgagtcagaaagatatggacagcagcaaaccattatacagtatttctaccanacaggttccatacacaaaagcaacatcaaaagcatagattatgaggccaggtgtggtggctcacacctgtaaccccagcacttccggaggctgaggtgggcgaatcctctgaggtccggagttcgagaccagcctggccaacatagtgaaatcccgtctctataaaaatacaaaaattagccagctgtgatggcatgcacctgtaatcccagctactcgggaggctgaggcacgagaatcatttgaacccgggaggcggaggttgccgtgagctgagatctcgccattgtactccagcctggagactgtggccctgtgcaccccatcaggcatgtgtgactaccaaagctcctgtcagctgttttattttatctcctttccagtctcaggctcaatgcagaactttgaggtaagcttttctaaaatgtaggctcctaaacgccacagcctgggcgacagagtgagaccctgtctccgaaaaataaattaattgattcaaaaaagaatatgacacacaagtatgggcgatcaagctt

SEQ ID NO: 422537 - DNA, 3102 bp, Homo sapiens
  misc_feature (3100)..(3100): n is a, c, g, or t
tactggatttgagagatatatttcaacatttcaattttattgtatttaagaacttttttttctcagaaaaaaattacaaaattcattttataaaattcatccagagaaatgatttcagtcccatatggtacaaaatacctttcccaaggaatagatgatttaatttaaagcctctgttttcttttccttttataactttacttttgttttttttcacagactttctattttagaacagttttaggtttagagaaaaattgagcagatagcacagagagctcccacgtactcttcagcacacacagtttccccgattattaacatctggcatcagtgtggtacatttgatacaactgatgaaccaatattgacacgttactattaactaaagtccatagctcacattagagcaaacgctttgtgctgtacatgctatgggttttgaccaatgcccaatgtcatgtacccaccatcacagtgtcatacagaacctttcactgccctaacatcccctgcactccacctcctcatccctcccttcctctcactgcccttgcagctcctggaaatcactgatctttttactgtctttgtagttttgcctgttccagcatgtcatatcctttcagttttcagtaagtaacactctcacacatttcaaaagttaaaactgtatagaaaggaaccactgagaactctttctcccacccggtcccagccccactgttccccattatcctactaccccagggaaaccacctgattagtttcttagcctttgtctagcttttatttatgcaaatatgttttctaatttcctttctttcttacacaattaacagcatactattagtaatatactatatgcactgatctgtatcgtgtttttttaattataattattcttttaataaaatgcttcactgagagcagggaagccaccttactttcccaaaagttacacaatacatggtagtaccaaagaaatatctgctgagagaaatactattttgggaagtagttaataattttacaatatgcaatagaagcagacacatgaacagctacaatgtggatacaagttttgtcaaataatcaggagaaaaaagaataaaaattacaatggcaaatggctgtccaaattttccaagtccaactttatagtgctgtgaagaaaagcatgaatatgagactctcaataaacatttgtgcatccatgaaattgaattatttaggtttaaagatgatagaattttggaaaactgaaaataatttttgtaatttcaaggtaaaataatctttactttcagaaaacacattgtaactgtgataagccatagcatttattcatgtgtataagataaaaacacagaaagtattctactcttattatttaaggtggaaaaaggaataattgtgaaattatgtttcaattttccagcctggccatcatggccaaccccatctctactaaaaatacaaaaattagccagctgtgatggcatgcacctgtaatcccagctactcgggaggctgaggcacgagaatcatttgaacccgggaggcggaggttgccgtgagctgagatctcgccattgtactccagcctggagactgtggccctgtgcaccccatcaggcatgtgtgactaccaaagctcctgtcagctgttttattttatctcctttccagtctcaggctcaatgcagaactttgaggtaagcttttctaaaatgtaggctcctaaacgccacagccagctctgccacatgaaggagagctcaaatgagacagaaacagcctctgggcaggatttctatcctgcacagatatattttccacattctgggaaaccgtgaagcttccagagccacaattccccagaaacacatccccctgctggtacagccaagccccagaacaagctgtgcttgcctggcacctcaaagccaagcaccatggatgccacttgccatgggtgcctgcaatttcaaataatgagaaataagaaatttcagcttctcagtccctctagccaacatttcaggtgcatgacagcctcaggtggcaagcagctactctgccggacagggcagaagatggaacaccccatccctggggaagatcacgaggtcaggagatcaagaccatcctggctaacacagtgaaaccccgtctctactgaaaatacaaaacattagctgggtgtggtggcaggcacctgtagtcccagctactcaggaggctgaggcaggagaatggcgtgaacctgggaggtggaggttgcagtgagccaagattgcgccactgcactccagcctggcaacagagtaagactccatatcaaaaaaaagagaaaagaagaagaagaaagaaagaaagaagaagaagaggaagaagaagaagtggaagaagaaggaaagaggaagaggagaagcaggagaagaacaaggagaagaagaaggagagagaagaagagacaagaagaagaaggagaagaaggagagagaagagacaagagaagaaggaagaaggaggaggagaagaaggaagaagaaaagaaggagaagaaagaagaaggaagaagaaagaacaacaaaaagaaggagaagaacaaggaagaagaacaactaaggagaaggaagaaggagaagaagaaagaagaacaaaaagaaagaagaaagaaggagaaggaagaagaaggaggaggaggagaaggagaagaagaaggagaagaacaaggagaaggagagaagaagaagagacaagaagaaagaaggagaagaagaaggaagaagaagaaaaggaagaagaaaagaggaaggaggaggaagaaggagaagaaggaagaataaggaagaaggagaacaaggagaaggaagaagaaaagaaggagaaggaggaagaaggagaagaaagaggagaagaaggaagaaagaagaaaaaagaaacaatagaagaagaggaagaaagaaaagaaaaaagaaaaagagaagaaagagggaagaaagaaaagaggaagaagaataaggaagaagaagaaaaagaaaagaaaagaaggaagaagaggaagaaagaagaaggaagaagaaaggaaganct

SEQ ID NO: 422538 - DNA, 2043 bp, Homo sapiens
tactggatttgagagatatatttcaacatttcaattttattgtatttaagaacttttttttctcagaaaaaaattacaaaattcattttataaaattcatccagagaaatgatttcagtcccatatggtacaaaatacctttcccaaggaatagatgatttaatttaaagcctctgttttcttttccttttataactttacttttgttttttttcacagactttctattttagaacagttttaggtttagagaaaaattgagcagatagcacagagagctcccacgtactcttcagcacacacagtttccccgattattaacatctggcatcagtgtggtacatttgatacaactgatgaaccaatattgacacgttactattaactaaagtccatagctcacattagagcaaacgctttgtgctgtacatgctatgggttttgaccaatgcccaatgtcatgtacccaccatcacagtgtcatacagaacctttcactgccctaacatcccctgcactccacctcctcatccctcccttcctctcactgcccttgcagctcctggaaatcactgatctttttactgtctttgtagttttgcctgttccagcatgtcatatcctttcagttttcagtaagtaacactctcacacatttcaaaagttaaaactgtatagaaaggaaccactgagaactctttctcccacccggtcccagccccactgttccccattatcctactaccccagggaaaccacctgattagtttcttagcctttgtctagcttttatttatgcaaatatgttttctaatttcctttctttcttacacaattaacagcatactattagtaatatactatatgcactgatctgtatcgtgtttttttaattataattattcttttaataaaatgcttcactgagagcagggaagccaccttactttcccaaaagttacacaatacatggtagtaccaaagaaatatctgctgagagaaatactattttgggaagtagttaataattttacaatatgcaatagaagcagacacatgaacagctacaatgtggatacaagttttgtcaaataatcaggagaaaaaagaataaaaattacaatggcaaatggctgtccaaattttccaagtccaactttatagtgctgtgaagaaaagcatgaatatgagactctcaataaacatttgtgcatccatgaaattgaattatttaggtttaaagatgatagaattttggaaaactgaaaataatttttgtaatttcaaggtaaaataatctttactttcagaaaacacattgtaactgtgataagccatagcatttattcatgtgtataagataaaaacacagaaagtattctactcttattatttaaggtggaaaaaggaataattgtgaaattatgtttcaattttccagcctggccatcatggccaaccccatctctactaaaaatacaaaaattagccagctgtgatggcatgcacctgtaatcccagctactcgggaggctgaggcacgagaatcatttgaacccgggaggcggaggttgccgtgagctgagatctcgccattgtactccagcctggagactgtggccctgtgcaccccatcaggcatgtgtgactaccaaagctcctgtcagctgttttattttatctcctttccagtctcaggctcaatgcagaactttgaggtaagcttttctaaaatgtaggctcctaaacgccacagccagctctgccacatgaaggagagctcaaatgagacagaaacagcctctgggcaggatttctatcctgcacagatatattttccacattctgggaaaccgtgaagcttccagagccacaattccccagaaacacatccccctgctggtacagccaagccccagaacaagctgtgcttgcctggcacctcaaagccaagcaccatggatgccacttgccatgggtgcctgcaatttcttatttctcattatttggtcgaccggccgcgaatttagtagtagtagccgc

SEQ ID NO: 422539 - DNA, 1819 bp, Homo sapiens
  misc_feature (1817)..(1817): n is a, c, g, or t
tggtggcatgtgcctgtaattccatctacttgggaggctgaagaggagaatcgcttgaaccagggagtcggaggctgcagtaagccgagatcgcaccactgcacgccagcctggcaacagaggaagactccgtctcaaagaaaagggagggagtaactcctggccatcatggccaaccccatctctactaaaaatacaaaaattagccagctgtgatggcatgcacctgtaatcccagctactcgggaggctgaggcacgagaatcatttgaacccgggaggcggaggttgccgtgagctgagatctcgccattgtactccagcctggagactgtggccctgtgcaccccatcaggcatgtgtgactaccaaagctcctgtcagctgttttattttatctcctttccagtctcaggctcaatgcagaactttgaggtaagcttttctaaaatgtaggctcctaaacgccacagccagctctgccacatgaaggagagctcaaatgagacagaaacagcctctgggcaggatttctatcctgcacagatatattttccacattctgggaaaccgtgaagcttccagagccacaattccccagaaacacatccccctgctggtacagccaagccccagaacaagctgtgcttgcctggcacctcaaagccaagcaccatggatgccacttgccatgggtgcctgcaatttcaaataatgagaaataagaaatttcagcttctcagtccctctagccaacatttcaggtgcatgacagcctcaggtggcaagcagctactctgccggacagggcagaagatggaacaccccatccctggggaagatcacgaggtcaggagatcaagaccatcctggctaacacagtgaaaccccgtctctactgaaaatacaaaacattagctgggtgtggtggcaggcacctgtagtcccagctactcaggaggctgaggcaggagaatggcgtgaacctgggaggtggaggttgcagtgagccaagattgcgccactgcactccagcctggcaacagagtaagactccatatcaaaaaaaagagaaaagaagaagaagaaagaaagaaagaagaagaagaggaagaagaagaagtggaagaagaaggaaagaggaagaggagaagcaggagaagaacaaggagaagaagaaggagagagaagaagagacaagaagaagaaggagaagaaggagagagaagagacaagagaagaaggaagaaggaggaggagaagaaggaagaagaaaagaaggagaagaaagaagaaggaagaagaaagaacaacaaaaagaaggagaagaacaaggaagaagaacaactaaggagaaggaagaaggagaagaagaaagaagaacaaaaagaaagaagaaagaaggagaaggaagaagaaggaggaggaggagaaggagaagaagaaggagaagaacaaggagaaggagagaagaagaagagacaagaagaaagaaggagaagaagaaggaagaagaagaaaaggaagaagaaaagaggaaggaggaggaagaaggagaagaaggaagaataaggaagaaggagaacaaggagaaggaagaagaaaagaaggagaaggaggaagaaggagaagaaagaggagaagaaggaagaaagaagaaaaaagaaacaatagaagaagaggaagaaagaaaagaaaaaagaaaaagagaagaaagagggaagaaagaaaagaggaagaagaataaggaagaagaagaaaaagaaaagaaaagaaggaagaagaggaagaaagaagaaggaagaagaaaggaaganct

SEQ ID NO: 422540 - DNA, 440 bp, Homo sapiens
ctcccctctgaaaaccctatggatgaagggagcacttgaagggaacaccaagtacacaaggagaaaatgacaaaatgctgctttcctggcctctgctgctgggcagctgggtgattcagctgcaggggctgccctcctggaacctgtcgcaggagatgccccggctgcatgccaagctaggagggcccagcagctggcatgggactcgcttccatcctggggaggcaactatgtatttatcttattttcagagactgagtctccttgtgttgccccggctggtctcgaactcctgggttccagtgattctcctacctcggcctcccaaagtgctgggattacaggcatgagccactgtgtacagcccaattctccatttttaaatttactggtttatgaaatttgaaatgttgggcaccactaatttaggtctacgactt

SEQ ID NO: 422541 - DNA, 6019 bp, Homo sapiens
  misc_feature (1351)..(1351): n is a, c, g, or t
gtggaacacttctgaacctgcatttttatctggaactccagaagcagaatcctttgctaaataaatcgcagccatgagtgcgagctcagacgctgagatggctgtttttggcgaagctgctccctaccttcgaaaatcagaaaaggagcggattgaggcccaaaacaagccgtttgatgctaaaacatctgtctttgtggcggagcccaaggaatcctatgtgaagagcactatacaaagcaaagaaggagggaaagtaaccgtaaagactgaaggtggagcaactctaactgtcagggaagaccaagtcttccctatgaaccctccgaaatatgacaaaattgaggacatggccatgatgactcatctacacgagcctggagtgctgtacaacctcaaagagcgctatgcagcctggatgatctacacctactcaggcctcttctgtgtcaccgtcaacccctacaagtggctgccggtgtacaagcccgaggtggtggctgcctacagaggcaaaaagcgccaggaggccccgccccacatcttctccatctctgacaatgcctatcagttcatgttgactgatcgagagaatcagtccatcctgatcaccggagaatctggtgccggaaagactgtgaacaccaagcgtgtcatccaatactttgcaacaattgcagttactggagagaagaagaaggatgaatctggcaaaatgcaggggactctggaagatcaaatcatcagcgccaatcccctactggaggcctttggcaatgccaaaaccgtgaggaatgacaactcctctcgctttggtaaattcattagaatccactttggtactacagggaagctggcatctgctgatatagaaacatatcttttagaaaagtccagagttactttccagctaaaggcggaaagaagctaccatattttttatcagatcacttccaataagaagccagatctaattgaaatgctcctgatcaccaccaacccatatgactatgccttcgtcagtcagggggagatcacagttcccagtattgatgaccaagaagagttgatggccactgatagtgccattgacatcctgggcttcactcctgaagagaaagtgtccatctataaactcacaggggctgtgatgcattatgggaacatgaaattcaagcaaaagcagcgtgaggagcaagctgagccagatggcacagaagtcgctgacaaggcagcctatctccagagtctgaactctgcagacctactcaaagccctctgctaccctagggtcaaggttggcaatgagtatgtcaccaaaggccagactgtgcagcaggtgtacaatgcngtgggtgctctggccaaagccgtctacgagaagatgttcctgtggatggtcacccgcatcaaccagcagctggacaccaagcagcccaggcagtacttcatcggggtcttggacattgctggctttgaaatctttgattttaacagcctggagcagctgtgcatcaacttcaccaacgagaaactgcaacagtttttcaaccaccacatgtttgtgctagagcaggaggagtacaagaaggaaggcatcgagtggacgttcattgactttgggatggacctggctgcctgcattgagctcattgagaagccactgggcatcttctccatcctggaagaggagtgcatgttccctaaggcaacggacacctccttcaagaacaagctgtatgaccagcacctgggcaagtctgccaacttccagaagcccaaggtggtcaaaggcaaggctgaggcccacttctctctgattcactatgctggcactgtggactacaacattactggctggctggacaaaaataaggaccccctgaatgatactgtggttgggctgtaccagaagtctgcaatgaagactctagccagtctcttttccacgtatgctagtgctgaagcagatagcagcgcgaagaaaggtgctaagaaaaagggctcttctttccagactgtgtctgcccttttcagggaaaatttaaataaattgatgacgaatctgaggagcacacaccctcacttcgtacggtgtatcattcccaatgaaaccaaaactcctggggcaatggaacatgaacttgtgttgcaccagctgaggtgtaatggtgtgctggaaggcatccgcatctgtaggaaaggattcccaagcagaatcttatatggtgatttcaaacaaagatacaaggttttaaatgcaagtgctattccagagggacagttcattgacagcaagaaggcttctgagaaacttcttgcatctattgatattgatcatactcaatataaatttggacataccaaggttttcttcaaagctggacttctgggtcttctggaagaaatgagagatgaaaaattagcccaaattataacaagaacacaagctgtctgtaggggattcctaatgagggtagaatatcagaagatgttgcaaaggagagaagcacttttctgcatccagtataatgtccgtgccttcatgaacgtcaagcactggccctggatgaaactctttttcaagattaagcccctcctcaagagtgcagagaccgagaaagagatggccaccatgaaggaagaattccagaaaaccaaagatgaactcgccaagtcagaggcaaaacggaaggagctagaggaaaaaatggtcactctcttaaaagagaaaaatgacctgcaactccaggttcaatctgaagcagatagcttggctgatgcagaggaaaggtgtgagcaactgattaaaaacaaaatccaacttgaggccaaaatcaaagaggtgactgaaagagctgaggaggaggaagagatcaatgctgagctgacagccaagaagagaaaactggaggatgaatgttcagaactcaagaaagacattgatgaccttgagctgacactggccaaggttgagaaggagaaacatgccacggagaacaaggtgaaaaatcttacagaagagatggcaggcctggatgaaaccattgcaaaactgtccaaggagaagaaggctctccaagagacccaccagcagaccctggatgacctgcaggcagaggaggacaaagtcaacatcctgaccaaagctaaaaccaagctagaacagcaagtggatgatcttgaagggtctctggaacaagaaaagaagcttcgaatggatctagaaagagcaaagcggaaactggagggtgacctcaaattggcccaagaatccacaatggatatggaaaatgacaaacagcaacttgatgaaaagcttgaaaagaaagaatttgaaatcagcaatttgataagcaaaattgaagatgagcaagctgtagaaattcaactacagaagaagatcaaagagttgcaggcccgcattgaggagctgggggaagaaatcgaggcagagagggcgtcccgagccaaagcggagaagcagcgctctgacctctcccgggaactggaggagatcagcgagaggctggaagaagccggtggggcaacttctgctcaggtggaattgaacaagaagcgggaggctgagtttcagaaactgcgcagggacctggaggaggccaccctgcagcatgaagctatggtggctgctcttcggaagaagcacgcagacagtatggctgagcttggggagcagattgacaacttgcagcgggtcaaacagaagctggagaaggagaagagtgagctgaagatggagactgatgacctcagcagtaacgcagaggccatttccaaagccaagggaaaccttgaaaagatgtgccgctctctagaagatcaagtgagtgagcttaagaccaaggaagaggagcagcagcggctgatcaatgacctcacagcacagagagcgcgcctgcagacagaagcgggtgaatattctcgacaattagatgagaaagatgctttagtctctcagctttcaaggagcaagcaagcatctactcagcagattgaagagctgaaacatcaactagaggaagaaactaaagccaagaacgccctggcacacgccctgcagtcctcccgccatgactgcgacctgctgcgggaacagtatgaggaagagcaggaaggcaaagctgagctgcagagggcgctgtccaaggccaacagtgaggttgcccagtggagaaccaaatacgagacggatgccatccagcgcacagaggagctggaggaggccaagaaaaagttggcccagcgcctgcaagaagctgaggaacatgtagaagctgtgaacgccaaatgtgcttcccttgagaagacgaagcagcggctccagaatgaagttgaagacctcatgcttgatgtggaaaggtctaatgcagcctgtgcagcccttgataagaagcaaaggaactttgacaaggtcctatcagaatggaagcagaagtatgaggaaactcaggctgaacttgaggcctcccagaaggagtcacgttctcttagcactgagctgttcaaggtgaagaatgtctatgaggaatccctggatcaactcgaaacgctaagaagagaaaataagaacttgcaacaggagatttctgacctcactgagcagattgcagagggaggaaagcaaattcatgaattggagaaaataaagaagcaagtagaacaagagaaatgtgaaattcaggctgctttagaggaagcagaggcatctcttgaacatgaagaaggaaagattctgcgtatccagcttgagttaaaccaagtcaagtctgaagttgatagaaaaatcgcagaaaaggatgaggaaattgaccagctgaagagaaaccacactagagtcgtggagacaatgcagagcacgctggatgcagagattagaagcagaaatgatgctctgagagtcaagaagaaaatggaaggagatctgaatgaaatggaaatccagctgaaccatgccaatcgcttagctgcagagagtttaaggaactacaggaacacccaaggaatcctgaaggaaacccagctccacctggatgatgctctccggggccaggaggacctcaaggaacagctggcaattgtggagcgcagagccaacctgctgcaggctgagatcgaggagctgtgggccactctggaacagacagagagaagcaggaaaatcgccgaacaggagctcctggatgccagtgagcgtgtccagctcctccacacccagaataccagtctcattaacaccaagaagaaattagaaaatgacgtttcccaactccaaagtgaagtggaagaagtaatccaagaatcacgcaatgcagaagagaaagccaagaaggccatcactgatgctgccatgatggctgaggagctgaagaaggaacaggacaccagcgcccacctggagcggatgaagaagaacctggagcagacggtgaaggacctgcagcatcgtctagatgaggccgagcagctggcgctgaagggtgggaagaagcagatccagaaactggaggccagggtacgtgagcttgaaggagaggttgaaaatgaacagaaacgtaatgcagaggctgttaaaggtttacggaaacatgagcgacgagtaaaagaactcacctaccagactgaagaagatcgcaagaatgttctcaggctgcaggacttggtagataaattacaggcgaaggtgaaatcatacaagagacaagctgaggaggctgaggaacaatccaatgctaatctatctaaattccgcaaactccagcatgagctggaggaggccgaggaacgggctgacattgctgagtcccaggtcaacaaattgcgagtgaagagccgagaggttcacacaaaaatcagtgcagagtaaacacacctgcctgatgctatcaagaggctgaagaaaggcacaaaatgtgctatttttggtcacttgctttatgacgtttattttcctgttaaagctgaataaataaaaactacagtaaatgtatacattaaa

SEQ ID NO: 422542 - DNA, 5843 bp, Homo sapiens
  misc_feature (1351)..(1351): n is a, c, g, or t
gtggaacacttctgaacctgcatttttatctggaactccagaagcagaatcctttgctaaataaatcgcagccatgagtgcgagctcagacgctgagatggctgtttttggcgaagctgctccctaccttcgaaaatcagaaaaggagcggattgaggcccaaaacaagccgtttgatgctaaaacatctgtctttgtggcggagcccaaggaatcctatgtgaagagcactatacaaagcaaagaaggagggaaagtaaccgtaaagactgaaggtggagcaactctaactgtcagggaagaccaagtcttccctatgaaccctccgaaatatgacaaaattgaggacatggccatgatgactcatctacacgagcctggagtgctgtacaacctcaaagagcgctatgcagcctggatgatctacacctactcaggcctcttctgtgtcaccgtcaacccctacaagtggctgccggtgtacaagcccgaggtggtggctgcctacagaggcaaaaagcgccaggaggccccgccccacatcttctccatctctgacaatgcctatcagttcatgttgactgatcgagagaatcagtccatcctgatcaccggagaatctggtgccggaaagactgtgaacaccaagcgtgtcatccaatactttgcaacaattgcagttactggagagaagaagaaggatgaatctggcaaaatgcaggggactctggaagatcaaatcatcagcgccaatcccctactggaggcctttggcaatgccaaaaccgtgaggaatgacaactcctctcgctttggtaaattcattagaatccactttggtactacagggaagctggcatctgctgatatagaaacatatcttttagaaaagtccagagttactttccagctaaaggcggaaagaagctaccatattttttatcagatcacttccaataagaagccagatctaattgaaatgctcctgatcaccaccaacccatatgactatgccttcgtcagtcagggggagatcacagttcccagtattgatgaccaagaagagttgatggccactgatagtgccattgacatcctgggcttcactcctgaagagaaagtgtccatctataaactcacaggggctgtgatgcattatgggaacatgaaattcaagcaaaagcagcgtgaggagcaagctgagccagatggcacagaagtcgctgacaaggcagcctatctccagagtctgaactctgcagacctactcaaagccctctgctaccctagggtcaaggttggcaatgagtatgtcaccaaaggccagactgtgcagcaggtgtacaatgcngtgggtgctctggccaaagccgtctacgagaagatgttcctgtggatggtcacccgcatcaaccagcagctggacaccaagcagcccaggcagtacttcatcggggtcttggacattgctggctttgaaatctttgattttaacagcctggagcagctgtgcatcaacttcaccaacgagaaactgcaacagtttttcaaccaccacatgtttgtgctagagcaggaggagtacaagaaggaaggcatcgagtggacgttcattgactttgggatggacctggctgcctgcattgagctcattgagaagccactgggcatcttctccatcctggaagaggagtgcatgttccctaaggcaacggacacctccttcaagaacaagctgtatgaccagcacctgggcaagtctgccaacttccagaagcccaaggtggtcaaaggcaaggctgaggcccacttctctctgattcactatgctggcactgtggactacaacattactggctggctggacaaaaataaggaccccctgaatgatactgtggttgggctgtaccagaagtctgcaatgaagactctagccagtctcttttccacgtatgctagtgctgaagcagatagcagcgcgaagaaaggtgctaagaaaaagggctcttctttccagactgtgtctgcccttttcagggaaaatttaaataaattgatgacgaatctgaggagcacacaccctcacttcgtacggtgtatcattcccaatgaaaccaaaactcctggggcaatggaacatgaacttgtgttgcaccagctgaggtgtaatggtgtgctggaaggcatccgcatctgtaggaaaggattcccaagcagaatcttatatggtgatttcaaacaaagatacaaggttttaaatgcaagtgctattccagagggacagttcattgacagcaagaaggcttctgagaaacttcttgcatctattgatattgatcatactcaatataaatttggacataccaaggttttcttcaaagctggacttctgggtcttctggaagaaatgagagatgaaaaattagcccaaattataacaagaacacaagctgtctgtaggggattcctaatgagggtagaatatcagaagatgttgcaaaggagagaagcacttttctgcatccagtataatgtccgtgccttcatgaacgtcaagcactggccctggatgaaactctttttcaagattaagcccctcctcaagagtgcagagaccgagaaagagatggccaccatgaaggaagaattccagaaaaccaaagatgaactcgccaagtcagaggcaaaacggaaggagctagaggaaaaaatggtcactctcttaaaagagaaaaatgacctgcaactccaggttcaatctgaagcagatagcttggctgatgcagaggaaaggtgtgagcaactgattaaaaacaaaatccaacttgaggccaaaatcaaagaggtgactgaaagagctgaggaggaggaagagatcaatgctgagctgacagccaagaagagaaaactggaggatgaatgttcagaactcaagaaagacattgatgaccttgagctgacactggccaaggttgagaaggagaaacatgccacggagaacaaggtgaaaaatcttacagaagagatggcaggcctggatgaaaccattgcaaaactgtccaaggagaagaaggctctccaagagacccaccagcagaccctggatgacctgcaggcagaggaggacaaagtcaacatcctgaccaaagctaaaaccaagctagaacagcaagtggatgatcttgaagggtctctggaacaagaaaagaagcttcgaatggatctagaaagagcaaagcggaaactggagggtgacctcaaattggcccaagaatccacaatggatatggaaaatgacaaacagcaacttgatgaaaagcttgaaaagaaagaatttgaaatcagcaatttgataagcaaaattgaagatgagcaagctgtagaaattcaactacagaagaagatcaaagagttgcaggcccgcattgaggagctgggggaagaaatcgaggcagagagggcgtcccgagccaaagcggagaagcagcgctctgacctctcccgggaactggaggagatcagcgagaggctggaagaagccggtggggcaacttctgctcaggtggaattgaacaagaagcgggaggctgagtttcagaaactgcgcagggacctggaggaggccaccctgcagcatgaagctatggtggctgctcttcggaagaagcacgcagacagtatggctgagcttggggagcagattgacaacttgcagcgggtcaaacagaagctggagaaggagaagagtgagctgaagatggagactgatgacctcagcagtaacgcagaggccatttccaaagccaagggaaaccttgaaaagatgtgccgctctctagaagatcaagtgagtgagcttaagaccaaggaagaggagcagcagcggctgatcaatgacctcacagcacagagagcgcgcctgcagacagaagcgggtgaatattctcgacaattagatgagaaagatgctttagtctctcagctttcaaggagcaagcaagcatctactcagcagattgaagagctgaaacatcaactagaggaagaaactaaagccaagaacgccctggcacacgccctgcagtcctcccgccatgactgcgacctgctgcgggaacagtatgaggaagagcaggaaggcaaagctgagctgcagagggcgctgtccaaggccaacagtgaggttgcccagtggagaaccaaatacgagacggatgccatccagcgcacagaggagctggaggaggccaagaaaaagttggcccagcgcctgcaagaagctgaggaacatgtagaagctgtgaacgccaaatgtgcttcccttgagaagacgaagcagcggctccagaatgaagttgaagacctcatgcttgatgtggaaaggtctaatgcagcctgtgcagcccttgataagaagcaaaggaactttgacaaggtcctatcagaatggaagcagaagtatgaggaaactcaggctgaacttgaggcctcccagaaggagtcacgttctcttagcactgagctgttcaaggtgaagaatgtctatgaggaatccctggatcaactcgaaacgctaagaagagaaaataagaacttgcaacaggagatttctgacctcactgagcagattgcagagggaggaaagcaaattcatgaattggagaaaataaagaagcaagtagaacaagagaaatgtgaaattcaggctgctttagaggaagcagaggcatctcttgaacatgaagaaggaaagattctgcgtatccagcttgagttaaaccaagtcaagtctgaagttgatagaaaaatcgcagaaaaggatgaggaaattgaccagctgaagagaaaccacactagagtcgtggagacaatgcagagcacgctggatgcagagattagaagcagaaatgatgctctgagagtcaagaagaaaatggaaggagatctgaatgaaatggaaatccagctgaaccatgccaatcgcttagctgcagagagtttaaggaactacaggaacacccaaggaatcctgaaggaaacccagctccacctggatgatgctctccggggccaggaggacctcaaggaacagctggcaattgtggagcgcagagccaacctgctgcaggctgagatcgaggagctgtgggccactctggaacagacagagagaagcaggaaaatcgccgaacaggagctcctggatgccagtgagcgtgtccagctcctccacacccagaataccagtctcattaacaccaagaagaaattagaaaatgacgtttcccaactccaaagtgaagtggaagaagtaatccaagaatcacgcaatgcagaagagaaagccaagaaggccatcactgatgctgccatgatggctgaggagctgaagaaggaacaggacaccagcgcccacctggagcggatgaagaagaacctggagcagacggtgaaggacctgcagcatcgtctagatgaggccgagcagctggcgctgaagggtgggaagaagcagatccagaaactggaggccagggtacgtgagcttgaaggagaggttgaaaatgaacagaaacgtaatgcagaggctgttaaaggtttacggaaacatgagcgacgagtaaaagaactcacctaccagactgaagaagatcgcaagaatgttctcaggctgcaggacttggtagataaattacaggcgaaggtgaaatcatacaagagacaagctgaggaggctgagggaacaatcccaatgcctaatttaattctaaatttccgcaaaacttccaagcatggagcctgggaggtagtgcccttggtaacctggttctgacaatttggtt

SEQ ID NO: 422543 - DNA, 609 bp, Homo sapiens
cagccatgagtgcgagctcagacgctgagatggctgtttttggcgaagctgctccctaccttcgaaaatcagaaaaggagcggattgaggcccaaaacaagccgtttgatgctaaaacatctgtctttgtggcggagcccaaggaatcctatgtgaagagcactatacaaagcaaagaaggagggaaagtaaccgtaaagactgaaggtggagcagtaagtgaaaacagggagaaaatactccccattttatttcttggttcaaaagttgaagcctaacttactgggaatctccaagcctgttgccaatgcaaacacccttctagtcagtgttgagacattagatgtggaaggcaaaagaaattcacagcagtaccttcatgtcttcccttcccaacttcgcacaggacctcaccccactatgtatggccttcaccatttcccttcaattccccacttcctagtctgaatgtccaaacttgagggaaatgaaaacaagctcctcctatcagaagttaaatatttacttagttaaataatgtattaatatccccattacttccaaaaacatgaagtttcttaatgaatgaaagaaaaaaataaaaattta

SEQ ID NO: 422544 - DNA, 3997 bp, Homo sapiens
ggcctgggcgggtggcgccttggcctccgcctccgctcgcctgcgcgcggccctgcgtgagggggcagaggcgaggtggaggcgttggcgctgccacgtctgggccgcggttcccaactgtggcgcgggcggtggaggaggaggtggggctggcgctgaagccggatccggatccggtgctgtgcacactggtgggggagagtccgacgcgcctggctaggagcgccgaccgcagggcctctacggttcctgtaaccagcacagtgcctgattcatgaattaaagaccttactagaaaaatgaaacctgatgaaactcctatgtttgacccaagtctactcaaagaagtggactggagtcagaatacagctacattttctccagccatttccccaacacatcctggagaaggcttggttttgaggcctctttgtactgctgacttaaatagaggtttttttaaggtattgggtcagctaacagagactggagttgtcagccctgaacaatttatgaaatcttttgagcatatgaagaaatctggggattattatgttacagttgtagaagatgtgactctaggacagattgttgctacggcaactctgattatagaacataaattcatccattcctgtgctaagagaggaagagtagaagatgttgttgttagtgatgaatgcagaggaaagcagcttggcaaattgttattatcaacccttactttgctaagcaagaaactgaactgttacaagattacccttgaatgtctaccacaaaatgttggtttctataaaaagtttggatatactgtatctgaagaaaactacatgtgtcggaggtttctaaagtaaaaatcttgtaagaaaattgtcaaaggggctaatgctacaaggctacactcttcctagagttgaaatattttgttgctgcagccgagtgacctccataaatactggactgaaaaaacattgtaatactacaagtataatgacatttagaagattactttgggctggtgggacatgctgtgaatttagattacaaatgaatattataaaggggatgatttttaaccaaaggaatatatttttaacttgaatcttttcttgcattgtatttttctaaaagtttggcttcctttcttggtagtcaagagtatgggtaataaggagttatatgtctgctatctgtgttgctcatttaaaaaaagtatacattgaataaggctgtttatcacatgcataaaattaaatatttttgtttcaaagaaacatctcaatacacttaggggtgtattgtttcccacatattaagtcagggtggataaattagttattataactaaacatagtatagtccaacattcgttgatcccaatacaggcaaacaacctggtcaaccttttgaagtagaagaaatgaaaattacttgacaagattaaaagtaaaacaatttaaatgttttactgaaagtttatatagtatagtctatgtagataaaaagtaccacttgtcttttctgtgaattatgactattcatttgttaaaaatacctaagagcaattatagtgggacatctaaggtcctctgtaaacagtgaattagcaaacctcagcctatgtgtttctaccctgatttttttcttttcatgggtatctgaagcctctaagttttttcaaaaatggagtatcacaaaattgagtgaaacacaatacttaatgtattgtactagattgccaaattcataaaatgttaatggaagctttttgatgtgattataatggcactattctggtcattatcctattttgattttatttaattttttaaagttgaagaattaaatattttaatggttctaatcttttgcattccatgttgcattaaacctgtttatatgagtagtcttctgttagaatcacatctgtgcttttcttgagtctgctgttgaactattagattaagtcataattcataaaattttagtttaatgtgctctttgtaaaatgaaattgtaaagaaaataccagtgtttctcatcccattgactcacaccacgtcatctggattttggatttccctccatgcagccagctatagttggctttccaaaacaacagaaatccttcaccaatagagtgcactacttacctgcttatagcctatacagacgaactgatctgtccttcgtgaaacgcaacaaagctagttctgtcttttcagaagtcctacaaccttgacaaagagtagttttatcaggtaaatcctggtaattaaaaacgcatgtttttaaaaattagcctggtaaggccgggtgcagtggctcacgcctgtaatcccagcactttgggaggctgaggtgggcagatcacaaggtcaggagtttgagaccagcctgaccaaaatggtgaaaccctgtctctactaaaaaaaagaaaaattagccagacgtggtggcatgcgcctgtaatcccagctactcaggaagctgaggcgagagaatcgcttgaacccgggaggcaaaggttgcagtgagctgagatcacaccactgcactccagcctggcgacagagagagactccatctcaaaacaaaacaaaaaaaattagcctacttaaaggcacaactaaatgctttattacctttcttaccactgaacaatttgaggtaaaatcattcacaaggttggcacttcagtaaatccctttaaatagtgttcctaagatatctcttaaatcctcccataggaaatagaattacaggtaaggtacaccatacaaaaattgtgtcattgaggacaatggtgatctgtaattttagttgagtatgtttatgatttttgaagccatatggtgagtaaatgtaaatatgaaaaaagtgctacataaaacacttcttaaactttttttttttaaaaactgctccttgtggagcaggactaccccataggcagtgtacccacaatagatagccttttgttgttgttgttgttgagacaaggtctcgctgttgcccaggctagagcgcaggagcacaatcaccacacactgccgcttcaatctcctgggctcaaatgatccttccacctcagcctcccatgtggctgggactataggtgcatgccaccacacccagctaattaaaaaaattttttgtgtggagtctatgttgcccaggctggtctcttaactcctaggctcaagtgatcctcccacctcagcctcccaaagtgcttggatgacaggtgcgagccactgcacctggcccacattttttaaagagacactgtcccactccatcacccaggctggagtccagtggtgtgatcatagctcactgcatcctccagttcctgggttcaagccatccctcctgcctcagcctccccagtagctggaactacaggtgtgtgccatcacacctggctttacatttttctgtggggtcttactatattgcccaagccggtctcaaactcctgagctcaagtgatcctctgcctcagcctccagagtatctgggattacatatgtcggctaccgtgtctggccgttcacatctttggccactatttgcttgtgaaaaggtataatgaggtggtacttatcatttttactgtgtctcatgttttgtatatttttgtttcatcaactaagatgcactgtaacatctctgaaatctggatatattatcaatggtttatcatagttttgttagcaatacactgtcttttagtggtgcctaaaataatggtatagttgtgaggtgatcttagatttgatgaagcacagtatgcaggtaggcctaatgggggaagatggtaatataaaagcaagaagtattttttttttgtaatgactgaaagctgttctgtggatgacctaccctttcctttaaacacgattctctcacttccaactccaaacttgctcaactaatccttaaaaataaacttgagctggaatttgaaggcttgcctggactacagaccata

SEQ ID NO: 422545 - DNA, 3872 bp, Homo sapiens
  misc_feature (3215)..(3215): n is a, c, g, or t
ggcctgggcgggtggcgccttggcctccgcctccgctcgcctgcgcgcggccctgcgtgagggggcagaggcgaggtggaggcgttggcgctgccacgtctgggccgcggttcccaactgtggcgcgggcggtggaggaggaggtggggctggcgctgaagccggatccggatccggtgctgtgcacactggtgggggagagtccgacgcgcctggctaggagcgccgaccgcagggcctctacggaccttactagaaaaatgaaacctgatgaaactcctatgtttgacccaagtctactcaaagaagtggactggagtcagaatacagctacattttctccagccatttccccaacacatcctggagaaggcttggttttgaggcctctttgtactgctgacttaaatagaggtttttttaaggtattgggtcagctaacagagactggagttgtcagccctgaacaatttatgaaatcttttgagcatatgaagaaatctggggattattatgttacagttgtagaagatgtgactctaggacagattgttgctacggcaactctgattatagaacataaattcatccattcctgtgctaagagaggaagagtagaagatgttgttgttagtgatgaatgcagaggaaagcagcttggcaaattgttattatcaacccttactttgctaagcaagaaactgaactgttacaagattacccttgaatgtctaccacaaaatgttggtttctataaaaagtttggatatactgtatctgaagaaaactacatgtgtcggaggtttctaaagtaaaaatcttgtaagaaaattgtcaaaggggctaatgctacaaggctacactcttcctagagttgaaatattttgttgctgcagccgagtgacctccataaatactggactgaaaaaacattgtaatactacaagtataatgacatttagaagattactttgggctggtgggacatgctgtgaatttagattacaaatgaatattataaaggggatgatttttaaccaaaggaatatatttttaacttgaatcttttcttgcattgtatttttctaaaagtttggcttcctttcttggtagtcaagagtatgggtaataaggagttatatgtctgctatctgtgttgctcatttaaaaaaagtatacattgaataaggctgtttatcacatgcataaaattaaatatttttgtttcaaagaaacatctcaatacacttaggggtgtattgtttcccacatattaagtcagggtggataaattagttattataactaaacatagtatagtccaacattcgttgatcccaatacaggcaaacaacctggtcaaccttttgaagtagaagaaatgaaaattacttgacaagattaaaagtaaaacaatttaaatgttttactgaaagtttatatagtatagtctatgtagataaaaagtaccacttgtcttttctgtgaattatgactattcatttgttaaaaatacctaagagcaattatagtgggacatctaaggtcctctgtaaacagtgaattagcaaacctcagcctatgtgtttctaccctgatttttttcttttcatgggtatctgaagcctctaagttttttcaaaaatggagtatcacaaaattgagtgaaacacaatacttaatgtattgtactagattgccaaattcataaaatgttaatggaagctttttgatgtgattataatggcactattctggtcattatcctattttgattttatttaattttttaaagttgaagaattaaatattttaatggttctaatcttttgcattccatgttgcattaaacctgtttatatgagtagtcttctgttagaatcacatctgtgcttttcttgagtctgctgttgaactattagattaagtcataattcataaaattttagtttaatgtgctctttgtaaaatgaaattgtaaagaaaataccagtgtttctcatcccattgactcacaccacgtcatctggattttggatttccctccatgcagccagctatagttggctttccaaaacaacagaaatccttcaccaatagagtgcactacttacctgcttatagcctatacagacgaactgatctgtccttcgtgaaacgcaacaaagctagttctgtcttttcagaagtcctacaaccttgacaaagagtagttttatcaggtaaatcctggtaattaaaaacgcatgtttttaaaaattagcctggtaaggccgggtgcagtggctcacgcctgtaatcccagcactttgggaggctgaggtgggcagatcacaaggtcaggagtttgagaccagcctgaccaaaatggtgaaaccctgtctctactaaaaaaaagaaaaattagccagacgtggtggcatgcgcctgtaatcccagctactcaggaagctgaggcgagagaatcgcttgaacccgggaggcaaaggttgcagtgagctgagatcacaccactgcactccagcctggcgacagagagagactccatctcaaaacaaaacaaaaaaaattagcctacttaaaggcacaactaaatgctttattacctttcttaccactgaacaatttgaggtaaaatcattcacaaggttggcacttcagtaaatccctttaaatagtgttcctaagatatctcttaaatcctcccataggaaatagaattacaggtaaggtacaccatacaaaaattgtgtcattgaggacaatggtgatctgtaattttagttgagtatgtttatgatttttgaagccatatggtgagtaaatgtaaatatgaaaaaagtgctacataaaacacttcttaaactttttttttttaaaaactgctccttgtggagcaggactaccccataggcagtgtacccacaatagatagccttttgttgttgttgttgttgagacaaggtctcgctgttgcccaggctagagcgcaggagcacaatcaccacacactgccgcttcaatctcctgggctcaaatgatccttccacctcagcctcccatgtggctgggactataggtgcatgccaccacacccagctaattaaaaaaattttttgtgtggagtctatgttgcccaggctggtctcttaactcctaggctcaagtgatgaggtgggcagatcacaaggtcaggagtttgagaccagcctgancaaaatggtgaaaccctgtctctactaaaaaaaagaaaaatcagcctccccagtagctggaactacaggtgtgtgccatcacacctggctttacatttttctgtggggtcttactatattgcccaagccggtctcaaactcctgagctcaagtgatcctctgcctcagcctccagagtatctgggattacatatgtcggctaccgtgtctggccgttcacatctttggccactatttgcttgtgaaaaggtataatgaggtggtacttatcatttttactgtgtctcatgttttgtatatttttgtttcatcaactaagatgcactgtaacatctctgaaatctggatatattatcaatggtttatcatagttttgttagcaatacactgtcttttagtggtgcctaaaataatggtatagttgtgaggtgatcttagatttgatgaagcacagtatgcaggtaggcctaatgggggaagatggtaatataaaagcaagaagtattttttttttgtaatgactgaaagctgttctgtggatgacctaccctttcctttaaacacgattctctcacttccaactccaaacttgctcaactaatccttaaaaataaacttgagctggaatttgaaggcttgcctggactacagaccata

SEQ ID NO: 422546 - DNA, 3648 bp, Homo sapiens
  misc_feature (3215)..(3215): n is a, c, g, or t
ggcctgggcgggtggcgccttggcctccgcctccgctcgcctgcgcgcggccctgcgtgagggggcagaggcgaggtggaggcgttggcgctgccacgtctgggccgcggttcccaactgtggcgcgggcggtggaggaggaggtggggctggcgctgaagccggatccggatccggtgctgtgcacactggtgggggagagtccgacgcgcctggctaggagcgccgaccgcagggcctctacggaccttactagaaaaatgaaacctgatgaaactcctatgtttgacccaagtctactcaaagaagtggactggagtcagaatacagctacattttctccagccatttccccaacacatcctggagaaggcttggttttgaggcctctttgtactgctgacttaaatagaggtttttttaaggtattgggtcagctaacagagactggagttgtcagccctgaacaatttatgaaatcttttgagcatatgaagaaatctggggattattatgttacagttgtagaagatgtgactctaggacagattgttgctacggcaactctgattatagaacataaattcatccattcctgtgctaagagaggaagagtagaagatgttgttgttagtgatgaatgcagaggaaagcagcttggcaaattgttattatcaacccttactttgctaagcaagaaactgaactgttacaagattacccttgaatgtctaccacaaaatgttggtttctataaaaagtttggatatactgtatctgaagaaaactacatgtgtcggaggtttctaaagtaaaaatcttgtaagaaaattgtcaaaggggctaatgctacaaggctacactcttcctagagttgaaatattttgttgctgcagccgagtgacctccataaatactggactgaaaaaacattgtaatactacaagtataatgacatttagaagattactttgggctggtgggacatgctgtgaatttagattacaaatgaatattataaaggggatgatttttaaccaaaggaatatatttttaacttgaatcttttcttgcattgtatttttctaaaagtttggcttcctttcttggtagtcaagagtatgggtaataaggagttatatgtctgctatctgtgttgctcatttaaaaaaagtatacattgaataaggctgtttatcacatgcataaaattaaatatttttgtttcaaagaaacatctcaatacacttaggggtgtattgtttcccacatattaagtcagggtggataaattagttattataactaaacatagtatagtccaacattcgttgatcccaatacaggcaaacaacctggtcaaccttttgaagtagaagaaatgaaaattacttgacaagattaaaagtaaaacaatttaaatgttttactgaaagtttatatagtatagtctatgtagataaaaagtaccacttgtcttttctgtgaattatgactattcatttgttaaaaatacctaagagcaattatagtgggacatctaaggtcctctgtaaacagtgaattagcaaacctcagcctatgtgtttctaccctgatttttttcttttcatgggtatctgaagcctctaagttttttcaaaaatggagtatcacaaaattgagtgaaacacaatacttaatgtattgtactagattgccaaattcataaaatgttaatggaagctttttgatgtgattataatggcactattctggtcattatcctattttgattttatttaattttttaaagttgaagaattaaatattttaatggttctaatcttttgcattccatgttgcattaaacctgtttatatgagtagtcttctgttagaatcacatctgtgcttttcttgagtctgctgttgaactattagattaagtcataattcataaaattttagtttaatgtgctctttgtaaaatgaaattgtaaagaaaataccagtgtttctcatcccattgactcacaccacgtcatctggattttggatttccctccatgcagccagctatagttggctttccaaaacaacagaaatccttcaccaatagagtgcactacttacctgcttatagcctatacagacgaactgatctgtccttcgtgaaacgcaacaaagctagttctgtcttttcagaagtcctacaaccttgacaaagagtagttttatcaggtaaatcctggtaattaaaaacgcatgtttttaaaaattagcctggtaaggccgggtgcagtggctcacgcctgtaatcccagcactttgggaggctgaggtgggcagatcacaaggtcaggagtttgagaccagcctgaccaaaatggtgaaaccctgtctctactaaaaaaaagaaaaattagccagacgtggtggcatgcgcctgtaatcccagctactcaggaagctgaggcgagagaatcgcttgaacccgggaggcaaaggttgcagtgagctgagatcacaccactgcactccagcctggcgacagagagagactccatctcaaaacaaaacaaaaaaaattagcctacttaaaggcacaactaaatgctttattacctttcttaccactgaacaatttgaggtaaaatcattcacaaggttggcacttcagtaaatccctttaaatagtgttcctaagatatctcttaaatcctcccataggaaatagaattacaggtaaggtacaccatacaaaaattgtgtcattgaggacaatggtgatctgtaattttagttgagtatgtttatgatttttgaagccatatggtgagtaaatgtaaatatgaaaaaagtgctacataaaacacttcttaaactttttttttttaaaaactgctccttgtggagcaggactaccccataggcagtgtacccacaatagatagccttttgttgttgttgttgttgagacaaggtctcgctgttgcccaggctagagcgcaggagcacaatcaccacacactgccgcttcaatctcctgggctcaaatgatccttccacctcagcctcccatgtggctgggactataggtgcatgccaccacacccagctaattaaaaaaattttttgtgtggagtctatgttgcccaggctggtctcttaactcctaggctcaagtgatgaggtgggcagatcacaaggtcaggagtttgagaccagcctgancaaaatggtgaaaccctgtctctactaaaaaaaagaaaaatcaggccgacgtggtggcgatgcgcctggtgaaccccagctactccaggaagctgaggcgagagaatcggttgaacccggaggcaacggtgcagggacgtgagatccaacaatgcactccagcctggcgacagagagagactccatctcaaacaatacacaagaaagaggggcgacaaaaactatccccgaggggccacgtaagcggacccattcctgtgccaaggggcgcaaaaaaagagagacatatacaccaagacagccgccagttacaacgatgtacgggcgaaagcacacgcgactatgagagagccacacgggggggcaaagccgcaaccaagcgaagaacacgagacaaccgagaagaggtcacgccacgcagcgagtcaggtaa

SEQ ID NO: 422547 - DNA, 3208 bp, Homo sapiens
ggcctgggcgggtggcgccttggcctccgcctccgctcgcctgcgcgcggccctgcgtgagggggcagaggcgaggtggaggcgttggcgctgccacgtctgggccgcggttcccaactgtggcgcgggcggtggaggaggaggtggggctggcgctgaagccggatccggatccggtgctgtgcacactggtgggggagagtccgacgcgcctggctaggagcgccgaccgcagggcctctacggaccttactagaaaaatgaaacctgatgaaactcctatgtttgacccaagtctactcaaagaagtggactggagtcagaatacagctacattttctccagccatttccccaacacatcctggagaaggcttggttttgaggcctctttgtactgctgacttaaatagaggtttttttaaggtattgggtcagctaacagagactggagttgtcagccctgaacaatttatgaaatcttttgagcatatgaagaaatctggggattattatgttacagttgtagaagatgtgactctaggacagattgttgctacggcaactctgattatagaacataaattcatccattcctgtgctaagagaggaagagtagaagatgttgttgttagtgatgaatgcagaggaaagcagcttggcaaattgttattatcaacccttactttgctaagcaagaaactgaactgttacaagattacccttgaatgtctaccacaaaatgttggtttctataaaaagtttggatatactgtatctgaagaaaactacatgtgtcggaggtttctaaagtaaaaatcttgtaagaaaattgtcaaaggggctaatgctacaaggctacactcttcctagagttgaaatattttgttgctgcagccgagtgacctccataaatactggactgaaaaaacattgtaatactacaagtataatgacatttagaagattactttgggctggtgggacatgctgtgaatttagattacaaatgaatattataaaggggatgatttttaaccaaaggaatatatttttaacttgaatcttttcttgcattgtatttttctaaaagtttggcttcctttcttggtagtcaagagtatgggtaataaggagttatatgtctgctatctgtgttgctcatttaaaaaaagtatacattgaataaggctgtttatcacatgcataaaattaaatatttttgtttcaaagaaacatctcaatacacttaggggtgtattgtttcccacatattaagtcagggtggataaattagttattataactaaacatagtatagtccaacattcgttgatcccaatacaggcaaacaacctggtcaaccttttgaagtagaagaaatgaaaattacttgacaagattaaaagtaaaacaatttaaatgttttactgaaagtttatatagtatagtctatgtagataaaaagtaccacttgtcttttctgtgaattatgactattcatttgttaaaaatacctaagagcaattatagtgggacatctaaggtcctctgtaaacagtgaattagcaaacctcagcctatgtgtttctaccctgatttttttcttttcatgggtatctgaagcctctaagttttttcaaaaatggagtatcacaaaattgagtgaaacacaatacttaatgtattgtactagattgccaaattcataaaatgttaatggaagctttttgatgtgattataatggcactattctggtcattatcctattttgattttatttaattttttaaagttgaagaattaaatattttaatggttctaatcttttgcattccatgttgcattaaacctgtttatatgagtagtcttctgttagaatcacatctgtgcttttcttgagtctgctgttgaactattagattaagtcataattcataaaattttagtttaatgtgctctttgtaaaatgaaattgtaaagaaaataccagtgtttctcatcccattgactcacaccacgtcatctggattttggatttccctccatgcagccagctatagttggctttccaaaacaacagaaatccttcaccaatagagtgcactacttacctgcttatagcctatacagacgaactgatctgtccttcgtgaaacgcaacaaagctagttctgtcttttcagaagtcctacaaccttgacaaagagtagttttatcaggtaaatcctggtaattaaaaacgcatgtttttaaaaattagcctggtaaggccgggtgcagtggctcacgcctgtaatctcagcctcccatgtggctgggactataggtgcatgccaccacacccagctaattaaaaaaattttttgtgtggagtctatgttgcccaggctggtctcttaactcctaggctcaagtgatcctcccacctcagcctcccaaagtgcttggatgacaggtgcgagccactgcacctggcccacattttttaaagagacactgtcccactccatcacccaggctggagtccagtggtgtgatcatagctcactgcatcctccagttcctgggttcaagccatccctcctgcctcagcctccccagtagctggaactacaggtgtgtgccatcacacctggctttacatttttctgtggggtcttactatattgcccaagccggtctcaaactcctgagctcaagtgatcctctgcctcagcctccagagtatctgggattacatatgtcggctaccgtgtctggccgttcacatctttggccactatttgcttgtgaaaaggtataatgaggtggtacttatcatttttactgtgtctcatgttttgtatatttttgtttcatcaactaagatgcactgtaacatctctgaaatctggatatattatcaatggtttatcatagttttgttagcaatacactgtcttttagtggtgcctaaaataatggtatagttgtgaggtgatcttagatttgatgaagcacagtatgcaggtaggcctaatgggggaagatggtaatataaaagcaagaagtattttttttttgtaatgactgaaagctgttctgtggatgacctaccctttcctttaaacacgattctctcacttccaactccaaacttgctcaactaatccttaaaaataaacttgagctggaatttgaaggcttgcctggactacagaccata

SEQ ID NO: 422548 - DNA, 2729 bp, Homo sapiens
ggcctgggcgggtggcgccttggcctccgcctccgctcgcctgcgcgcggccctgcgtgagggggcagaggcgaggtggaggcgttggcgctgccacgtctgggccgcggttcccaactgtggcgcgggcggtggaggaggaggtggggctggcgctgaagccggatccggatccggtgctgtgcacactggtgggggagagtccgacgcgcctggctaggagcgccgaccgcagggcctctacggaccttactagaaaaatgaaacctgatgaaactcctatgtttgacccaagtctactcaaagaagtggactggagtcagaatacagctacattttctccagccatttccccaacacatcctggagaaggcttggttttgaggcctctttgtactgctgacttaaatagaggtttttttaaggtattgggtcagctaacagagactggagttgtcagccctgaacaatttatgaaatcttttgagcatatgaagaaatctggggattattatgttacagttgtagaagatgtgactctaggacagattgttgctacggcaactctgattatagaacataaattcatccattcctgtgctaagagaggaagagtagaagatgttgttgttagtgatgaatgcagaggaaagcagcttggcaaattgttattatcaacccttactttgctaagcaagaaactgaactgttacaagattacccttgaatgtctaccacaaaatgttggtttctataaaaagtttggatatactgtatctgaagaaaactacatgtgtcggaggtttctaaagtaaaaatcttgtaagaaaattgtcaaaggggctaatgctacaaggctacactcttcctagagttgaaatattttgttgctgcagccgagtgacctccataaatactggactgaaaaaacattgtaatactacaagtataatgacatttagaagattactttgggctggtgggacatgctgtgaatttagattacaaatgaatattataaaggggatgatttttaaccaaaggaatatatttttaacttgaatcttttcttgcattgtatttttctaaaagtttggcttcctttcttggtagtcaagagtatgggtaataaggagttatatgtctgctatctgtgttgctcatttaaaaaaagtatacattgaataaggctgtttatcacatgcataaaattaaatatttttgtttcaaagaaacatctcaatacacttaggggtgtattgtttcccacatattaagtcagggtggataaattagttattataactaaacatagtatagtccaacattcgttgatcccaatacaggcaaacaacctggtcaaccttttgaagtagaagaaatgaaaattacttgacaagattaaaagtaaaacaatttaaatgttttactgaaagtttatatagtatagtctatgtagataaaaagtaccacttgtcttttctgtgaattatgactattcatttgttaaaaatacctaagagcaattatagtgggacatctaaggtcctctgtaaacagtgaattagcaaacctcagcctatgtgtttctaccctgatttttttcttttcatgggtatctgaagcctctaagttttttcaaaaatggagtatcacaaaattgagtgaaacacaatacttaatgtattgtactagattgccaaattcataaaatgttaatggaagctttttgatgtgattataatggcactattctggtcattatcctattttgattttatttaattttttaaagttgaagaattaaatattttaatggttctaatcttttgcattccatgttgcattaaacctgtttatatgagtagtcttctgttagaatcacatctgtgcttttcttgagtctgctgttgaactattagattaagtcataattcataaaattttagtttaatgtgctctttgtaaaatgaaattgtaaagaaaataccagtgtttctcatcccattgactcacaccacgtcatctggattttggatttccctccatgcagccagctatagttggctttccaaaacaacagaaatccttcaccaatagagtgcactacttacctgcttatagcctatacagacgaactgatctgtccttcgtgaaacgcaacaaagctagttctgtcttttcagaagtcctacaaccttgacaaagagtagttttatcaggtaaatcctggtaattaaaaacgcatgtttttaaaaattagcctggtaaggccgggtgcatgccaccacacccagctaattaaaaaaattttttgtgtggagtctatgttgcccaggctggtctcttaactcctaggctcaagtgatcctcccacctcagcctcccaaagtgcttggatgacaggtgcgagccactgcacctggcccacattttttaaagagacactgcactccagcctggcgacagagagagactccatctcaaacaatacacaagaaagaggggcgacaaaaactatccccgaggggccacgtaagcggacccattcctgtgccaaggggcgcaaaaaaagagagacatatacaccaagacagccgccagttacaacgatgtacgggcgaaagcacacgcgactatgagagagccacacgggggggcaaagccgcaaccaagcgaagaacacgagacaaccgagaagaggtcacgccacgcagcgagtcaggtaa

SEQ ID NO: 422549 - DNA, 650 bp, Homo sapiens
ggcctgggcgggtggcgccttggcctccgcctccgctcgcctgcgcgcggccctgcgtgagggggcagaggcgaggtggaggcgttggcgctgccacgtctgggccgcggttcccaactgtggcgcgggcggtggaggaggaggtggggctggcgctgaagccggatccggatccggtgctgtgcacactggtgggggagagtccgacgcgcctggctaggagcgccgaccgcagggcctctacggaccttactagaaaaatgaaacctgatgaaactcctatgtttgacccaagtctactcaaagaagtggactggagtcagaatacagctacattttctccagccatttccccaacacatcctggagaaggcttggttttgaggcctctttgtactgctgacttaaatagaggtttttttaaggtattgggtcagctaacagagactggagttgtcagccctgaacaatttatgaaatcttttgagcatatgaagaaatctggggattattatgttacagttgtagaagatgtgactctaggacagattgttgctacggcaactctgattatagaacataaattcatccattcctgtgctaaggtatgtgctgcttataaataaaatggacagctgttttctagcaca

SEQ ID NO: 422550 - DNA, 684 bp, Homo sapiens
ggcctgggcgggtggcgccttggcctccgcctccgctcgcctgcgcgcggccctgcgtgagggggcagaggcgaggtggaggcgttggcgctgccacgtctgggccgcggttcccaactgtggcgcgggcggtggaggaggaggtggggctggcgctgaagccggatccggatccggtgctgtgcacactggtgggggagagtccgacgcgcctggctaggagcgccgaccgcagggcctctacggaccttactagaaaaatgaaacctgatgaaactcctatgtttgacccaagtctactcaaagaagtggactggagtcagaatacagctacattttctccagccatttccccaacacatcctggagaaggcttggttttgaggcctctttgtactgctgacttaaatagaggtttttttaaggtattgggtcagctaacagagactggagttgtcagccctgaacaatttatgaaatcttttgagcatatgaagaaatctggggattattatgttacagttgtagaagatgtgactctaggacagattgttgctacggcaactctgattatagaacataaattcatccattcctgtgctaagtatacagctggtataataatgcagtgtttacggtgcgctcggccggccggcgggggtgggggatggtggggtggtggtg

SEQ ID NO: 422551 - DNA, 576 bp, Homo sapiens
gtccttttcacaattatctctttgctagacagcctgaagggcctaattttggcctaattattgagtgtaggaaagttaagattttcaaaattccaggtgcactgttcacatcaatttccggtaacactaatgaaattcactagaaattacaattttaaagagtgtaatctcaacagtgttacttatactttaatttacgaatattgtatttagccatgttgcacctttaagtaaaaccaaatcacatatttgggaaaatctggcaccctttgcattgaacttaatgtaaaatataatacattgaagaatgtatgttctgggtctataaatactggatattaaggtcagcactatttaaaacatcttatgcaggcagaagcactggtaaaacctgttatttttgttatatgtagtgattatagaagaatagggttcactttattctaataattaaaagattatagaaagttctgaaaaaataattgcctgtaagcccacctgcttaatatattgcttattttcatactgtcttccttttgctattctcgtaatttgaaatctgtttttcaaaactag

SEQ ID NO: 422552 - DNA, 815 bp, Homo sapiens
ctagccttaaatttcatttttaaagagggcttagggtgagttttgtatttgtcctgtttattagtgagctggagattactagataaaagtatatttgactctaagtaaaaatgctttggtgatttaaatgcttatcaacttacatgaatgcagtgggaaaagccataatctaaacctgtttctaaggaaacttaagttttataacattaattcatattgttactagaatcaatttttattaataaatgctatctcctcaccctaccccctttttaaatttcaggttattatcaacccttactttgctaagcaagaaactgaactgttacaagattacccttgaatgtctaccacaaaatgttggtttctataaaaagtttggatatactgtatctgaagaaaactacatgtgtcggaggtttctaaagtaaaaatcttgtaagaaaattgtcaaaggggctaatgctacaaggctacactcttcctagagttgaaatattttgttgctgcagccgagtgacctccataaatactggactgaaaaaacattgtaatactacaagtataatgacatttagaagattactttgggctggtgggacatgctgtgaatttagattacaaatgaatattataaaggggatgatttttaaccaaaggaatatatttttaacttgaatcttttcttgcattgtatttttctaaaagtttggcttcctttcttggtagtcaagagtatgggtaataaggagttatatgtctgctatctgtgttgctcatttaaaaaaagtatacattgaataaggctgtttatc

SEQ ID NO: 422553 - DNA, 3958 bp, Homo sapiens
ggcctgggcgggtggcgccttggcctccgcctccgctcgcctgcgcgcggccctgcgtgagggggcagaggcgaggtggaggcgttggcgctgccacgtctgggccgcggttcccaactgtggcgcgggcggtggaggaggaggtggggctggcgctgaagccggatccggatccggtgctgtgcacactggtgggggagagtccgacgcgcctggctaggagcgccgaccgcagggcctctacggaccttactagaaaaatgaaacctgatgaaactcctatgtttgacccaagtctactcaaagaagtggactggagtcagaatacagctacattttctccagccatttccccaacacatcctggagaaggcttggttttgaggcctctttgtactgctgacttaaatagaggtttttttaaggtattgggtcagctaacagagactggagttgtcagccctgaacaatttatgaaatcttttgagcatatgaagaaatctggggattattatgttacagttgtagaagatgtgactctaggacagattgttgctacggcaactctgattatagaacataaattcatccattcctgtgctaagagaggaagagtagaagatgttgttgttagtgatgaatgcagaggaaagcagcttggcaaattgttattatcaacccttactttgctaagcaagaaactgaactgttacaagattacccttgaatgtctaccacaaaatgttggtttctataaaaagtttggatatactgtatctgaagaaaactacatgtgtcggaggtttctaaagtaaaaatcttgtaagaaaattgtcaaaggggctaatgctacaaggctacactcttcctagagttgaaatattttgttgctgcagccgagtgacctccataaatactggactgaaaaaacattgtaatactacaagtataatgacatttagaagattactttgggctggtgggacatgctgtgaatttagattacaaatgaatattataaaggggatgatttttaaccaaaggaatatatttttaacttgaatcttttcttgcattgtatttttctaaaagtttggcttcctttcttggtagtcaagagtatgggtaataaggagttatatgtctgctatctgtgttgctcatttaaaaaaagtatacattgaataaggctgtttatcacatgcataaaattaaatatttttgtttcaaagaaacatctcaatacacttaggggtgtattgtttcccacatattaagtcagggtggataaattagttattataactaaacatagtatagtccaacattcgttgatcccaatacaggcaaacaacctggtcaaccttttgaagtagaagaaatgaaaattacttgacaagattaaaagtaaaacaatttaaatgttttactgaaagtttatatagtatagtctatgtagataaaaagtaccacttgtcttttctgtgaattatgactattcatttgttaaaaatacctaagagcaattatagtgggacatctaaggtcctctgtaaacagtgaattagcaaacctcagcctatgtgtttctaccctgatttttttcttttcatgggtatctgaagcctctaagttttttcaaaaatggagtatcacaaaattgagtgaaacacaatacttaatgtattgtactagattgccaaattcataaaatgttaatggaagctttttgatgtgattataatggcactattctggtcattatcctattttgattttatttaattttttaaagttgaagaattaaatattttaatggttctaatcttttgcattccatgttgcattaaacctgtttatatgagtagtcttctgttagaatcacatctgtgcttttcttgagtctgctgttgaactattagattaagtcataattcataaaattttagtttaatgtgctctttgtaaaatgaaattgtaaagaaaataccagtgtttctcatcccattgactcacaccacgtcatctggattttggatttccctccatgcagccagctatagttggctttccaaaacaacagaaatccttcaccaatagagtgcactacttacctgcttatagcctatacagacgaactgatctgtccttcgtgaaacgcaacaaagctagttctgtcttttcagaagtcctacaaccttgacaaagagtagttttatcaggtaaatcctggtaattaaaaacgcatgtttttaaaaattagcctggtaaggccgggtgcagtggctcacgcctgtaatcccagcactttgggaggctgaggtgggcagatcacaaggtcaggagtttgagaccagcctgaccaaaatggtgaaaccctgtctctactaaaaaaaagaaaaattagccagacgtggtggcatgcgcctgtaatcccagctactcaggaagctgaggcgagagaatcgcttgaacccgggaggcaaaggttgcagtgagctgagatcacaccactgcactccagcctggcgacagagagagactccatctcaaaacaaaacaaaaaaaattagcctacttaaaggcacaactaaatgctttattacctttcttaccactgaacaatttgaggtaaaatcattcacaaggttggcacttcagtaaatccctttaaatagtgttcctaagatatctcttaaatcctcccataggaaatagaattacaggtaaggtacaccatacaaaaattgtgtcattgaggacaatggtgatctgtaattttagttgagtatgtttatgatttttgaagccatatggtgagtaaatgtaaatatgaaaaaagtgctacataaaacacttcttaaactttttttttttaaaaactgctccttgtggagcaggactaccccataggcagtgtacccacaatagatagccttttgttgttgttgttgttgagacaaggtctcgctgttgcccaggctagagcgcaggagcacaatcaccacacactgccgcttcaatctcctgggctcaaatgatccttccacctcagcctcccatgtggctgggactataggtgcatgccaccacacccagctaattaaaaaaattttttgtgtggagtctatgttgcccaggctggtctcttaactcctaggctcaagtgatcctcccacctcagcctcccaaagtgcttggatgacaggtgcgagccactgcacctggcccacattttttaaagagacactgtcccactccatcacccaggctggagtccagtggtgtgatcatagctcactgcatcctccagttcctgggttcaagccatccctcctgcctcagcctccccagtagctggaactacaggtgtgtgccatcacacctggctttacatttttctgtggggtcttactatattgcccaagccggtctcaaactcctgagctcaagtgatcctctgcctcagcctccagagtatctgggattacatatgtcggctaccgtgtctggccgttcacatctttggccactatttgcttgtgaaaaggtataatgaggtggtacttatcatttttactgtgtctcatgttttgtatatttttgtttcatcaactaagatgcactgtaacatctctgaaatctggatatattatcaatggtttatcatagttttgttagcaatacactgtcttttagtggtgcctaaaataatggtatagttgtgaggtgatcttagatttgatgaagcacagtatgcaggtaggcctaatgggggaagatggtaatataaaagcaagaagtattttttttttgtaatgactgaaagctgttctgtggatgacctaccctttcctttaaacacgattctctcacttccaactccaaacttgctcaactaatccttaaaaataaacttgagctggaatttgaaggcttgcctggactacagaccata

SEQ ID NO: 422554 - DNA, 3945 bp, Homo sapiens
  misc_feature (3288)..(3288): n is a, c, g, or t
ggcctgggcgggtggcgccttggcctccgcctccgctcgcctgcgcgcggccctgcgtgagggggcagaggcgaggtggaggcgttggcgctgccacgtctgggccgcggttcccaactgtggcgcgggcggtggaggaggaggtggggctggcgctgaagccggatccggatccggtgctgtgcacactggtgggggagagtccgacgcgcctggctaggagcgccgaccgcagggcctctacggaccttactagaaaaatgaaacctgatgaaactcctatgtttgacccaagtctactcaaagaagtggactggagtcagaatacagctacattttctccagccatttccccaacacatcctggagaaggcttggttttgaggcctctttgtactgctgacttaaatagaggtttttttaaggtattgggtcagctaacagagactggagttgtcagccctgaacaatttatgaaatcttttgagcatatgaagaaatctggggattattatgttacagttgtagaagatgtgactctaggacagattgttgctacggcaactctgattatagaacataaattcatccattcctgtgctaagagaggaagagtagaagatgttgttgttagtgatgaatgcagaggaaagcagcttggcaaattgttattatcaacccttactttgctaagcaagaaactgaactgttacaagattacccttgaatgtctaccacaaaatgttggtttctataaaaagtttggatatactgtatctgaagaaaactacatgtgtcggaggtttctaaagtaaaaatcttgtaagaaaattgtcaaaggggctaatgctacaaggctacactcttcctagagttgaaatattttgttgctgcagccgagtgacctccataaatactggactgaaaaaacattgtaatactacaagtataatgacatttagaagattactttgggctggtgggacatgctgtgaatttagattacaaatgaatattataaaggggatgatttttaaccaaaggaatatatttttaacttgaatcttttcttgcattgtatttttctaaaagtttggcttcctttcttggtagtcaagagtatgggtaataaggagttatatgtctgctatctgtgttgctcatttaaaaaaagtatacattgaataaggctgtttatcacatgcataaaattaaatatttttgtttcaaagaaacatctcaatacacttaggggtgtattgtttcccacatattaagtcagggtggataaattagttattataactaaacatagtatagtccaacattcgttgatcccaatacaggcaaacaacctggtcaaccttttgaagtagaagaaatgaaaattacttgacaagattaaaagtaaaacaatttaaatgttttactgaaagtttatatagtatagtctatgtagataaaaagtaccacttgtcttttctgtgaattatgactattcatttgttaaaaatacctaagagcaattatagtgggacatctaaggtcctctgtaaacagtgaattagcaaacctcagcctatgtgtttctaccctgatttttttcttttcatgggtatctgaagcctctaagttttttcaaaaatggagtatcacaaaattgagtgaaacacaatacttaatgtattgtactagattgccaaattcataaaatgttaatggaagctttttgatgtgattataatggcactattctggtcattatcctattttgattttatttaattttttaaagttgaagaattaaatattttaatggttctaatcttttgcattccatgttgcattaaacctgtttatatgagtagtcttctgttagaatcacatctgtgcttttcttgagtctgctgttgaactattagattaagtcataattcataaaattttagtttaatgtgctctttgtaaaatgaaattgtaaagaaaataccagtgtttctcatcccattgactcacaccacgtcatctggattttggatttccctccatgcagccagctatagttggctttccaaaacaacagaaatccttcaccaatagagtgcactacttacctgcttatagcctatacagacgaactgatctgtccttcgtgaaacgcaacaaagctagttctgtcttttcagaagtcctacaaccttgacaaagagtagttttatcaggtaaatcctggtaattaaaaacgcatgtttttaaaaattagcctggtaaggccgggtgcagtggctcacgcctgtaatcccagcactttgggaggctgaggtgggcagatcacaaggtcaggagtttgagaccagcctgaccaaaatggtgaaaccctgtctctactaaaaaaaagaaaaattagccagacgtggtggcatgcgcctgtaatcccagctactcaggaagctgaggcgagagaatcgcttgaacccgggaggcaaaggttgcagtgagctgagatcacaccactgcactccagcctggcgacagagagagactccatctcaaaacaaaacaaaaaaaattagcctacttaaaggcacaactaaatgctttattacctttcttaccactgaacaatttgaggtaaaatcattcacaaggttggcacttcagtaaatccctttaaatagtgttcctaagatatctcttaaatcctcccataggaaatagaattacaggtaaggtacaccatacaaaaattgtgtcattgaggacaatggtgatctgtaattttagttgagtatgtttatgatttttgaagccatatggtgagtaaatgtaaatatgaaaaaagtgctacataaaacacttcttaaactttttttttttaaaaactgctccttgtggagcaggactaccccataggcagtgtacccacaatagatagccttttgttgttgttgttgttgagacaaggtctcgctgttgcccaggctagagcgcaggagcacaatcaccacacactgccgcttcaatctcctgggctcaaatgatccttccacctcagcctcccatgtggctgggactataggtgcatgccaccacacccagctaattaaaaaaattttttgtgtggagtctatgttgcccaggctggtctcttaactcctaggctcaagtgatcctcccacctcagcctcccaaagtgcttggatgacagtggctcacgcctgtaatcccagcactttgggaggctgaggtgggcagatcacaaggtcaggagtttgagaccagcctgancaaaatggtgaaaccctgtctctactaaaaaaaagaaaaatcagcctccccagtagctggaactacaggtgtgtgccatcacacctggctttacatttttctgtggggtcttactatattgcccaagccggtctcaaactcctgagctcaagtgatcctctgcctcagcctccagagtatctgggattacatatgtcggctaccgtgtctggccgttcacatctttggccactatttgcttgtgaaaaggtataatgaggtggtacttatcatttttactgtgtctcatgttttgtatatttttgtttcatcaactaagatgcactgtaacatctctgaaatctggatatattatcaatggtttatcatagttttgttagcaatacactgtcttttagtggtgcctaaaataatggtatagttgtgaggtgatcttagatttgatgaagcacagtatgcaggtaggcctaatgggggaagatggtaatataaaagcaagaagtattttttttttgtaatgactgaaagctgttctgtggatgacctaccctttcctttaaacacgattctctcacttccaactccaaacttgctcaactaatccttaaaaataaacttgagctggaatttgaaggcttgcctggactacagaccata

SEQ ID NO: 422555 - DNA, 3087 bp, Homo sapiens
ggcctgggcgggtggcgccttggcctccgcctccgctcgcctgcgcgcggccctgcgtgagggggcagaggcgaggtggaggcgttggcgctgccacgtctgggccgcggttcccaactgtggcgcgggcggtggaggaggaggtggggctggcgctgaagccggatccggatccggtgctgtgcacactggtgggggagagtccgacgcgcctggctaggagcgccgaccgcagggcctctacggaccttactagaaaaatgaaacctgatgaaactcctatgtttgacccaagtctactcaaagaagtggactggagtcagaatacagctacattttctccagccatttccccaacacatcctggagaaggcttggttttgaggcctctttgtactgctgacttaaatagaggtttttttaaggtattgggtcagctaacagagactggagttgtcagccctgaacaatttatgaaatcttttgagcatatgaagaaatctggggattattatgttacagttgtagaagatgtgactctaggacagattgttgctacggcaactctgattatagaacataaattcatccattcctgtgctaagagaggaagagtagaagatgttgttgttagtgatgaatgcagaggaaagcagcttggcaaattgttattatcaacccttactttgctaagcaagaaactgaactgttacaagattacccttgaatgtctaccacaaaatgttggtttctataaaaagtttggatatactgtatctgaagaaaactacatgtgtcggaggtttctaaagtaaaaatcttgtaagaaaattgtcaaaggggctaatgctacaaggctacactcttcctagagttgaaatattttgttgctgcagccgagtgacctccataaatactggactgaaaaaacattgtaatactacaagtataatgacatttagaagattactttgggctggtgggacatgctgtgaatttagattacaaatgaatattataaaggggatgatttttaaccaaaggaatatatttttaacttgaatcttttcttgcattgtatttttctaaaagtttggcttcctttcttggtagtcaagagtatgggtaataaggagttatatgtctgctatctgtgttgctcatttaaaaaaagtatacattgaataaggctgtttatcacatgcataaaattaaatatttttgtttcaaagaaacatctcaatacacttaggggtgtattgtttcccacatattaagtcagggtggataaattagttattataactaaacatagtatagtccaacattcgttgatcccaatacaggcaaacaacctggtcaaccttttgaagtagaagaaatgaaaattacttgacaagattaaaagtaaaacaatttaaatgttttactgaaagtttatatagtatagtctatgtagataaaaagtaccacttgtcttttctgtgaattatgactattcatttgttaaaaatacctaagagcaattatagtgggacatctaaggtcctctgtaaacagtgaattagcaaacctcagcctatgtgtttctaccctgatttttttcttttcatgggtatctgaagcctctaagttttttcaaaaatggagtatcacaaaattgagtgaaacacaatacttaatgtattgtactagattgccaaattcataaaatgttaatggaagctttttgatgtgattataatggcactattctggtcattatcctattttgattttatttaattttttaaagttgaagaattaaatattttaatggttctaatcttttgcattccatgttgcattaaacctgtttatatgagtagtcttctgttagaatcacatctgtgcttttcttgagtctgctgttgaactattagattaagtcataattcataaaattttagtttaatgtgctctttgtaaaatgaaattgtaaagaaaataccagtgtttctcatcccattgactcacaccacgtcatctggattttggatttccctccatgcagccagctatagttggctttccaaaacaacagaaatccttcaccaatagagtgcactacttacctgcttatagcctatacagacgaactgatctgtccttcgtgaaacgcaacaaagctagttctgtcttttcagaagtcctacaaccttgacaaagagtagttttatcaggtaaatcctggtaattaaaaacgcatgtttttaaaaattagcctggtaaggccgggtgcagtggctcacgcctgtaatcctcccacctcagcctcccaaagtgcttggatgacaggtgcgagccactgcacctggcccacattttttaaagagacactgtcccactccatcacccaggctggagtccagtggtgtgatcatagctcactgcatcctccagttcctgggttcaagccatccctcctgcctcagcctccccagtagctggaactacaggtgtgtgccatcacacctggctttacatttttctgtggggtcttactatattgcccaagccggtctcaaactcctgagctcaagtgatcctctgcctcagcctccagagtatctgggattacatatgtcggctaccgtgtctggccgttcacatctttggccactatttgcttgtgaaaaggtataatgaggtggtacttatcatttttactgtgtctcatgttttgtatatttttgtttcatcaactaagatgcactgtaacatctctgaaatctggatatattatcaatggtttatcatagttttgttagcaatacactgtcttttagtggtgcctaaaataatggtatagttgtgaggtgatcttagatttgatgaagcacagtatgcaggtaggcctaatgggggaagatggtaatataaaagcaagaagtattttttttttgtaatgactgaaagctgttctgtggatgacctaccctttcctttaaacacgattctctcacttccaactccaaacttgctcaactaatccttaaaaataaacttgagctggaatttgaaggcttgcctggactacagaccata

SEQ ID NO: 422556 - DNA, 2173 bp, Homo sapiens
gtcttcgtgtatgctgtctgcgtctggtttctgttttgttctagcgttatttaattgctggtgtgcttgcgtctttgctgcgcgctgctctgtgcggttatatttgggttgtcgtgtggagcgtcgtagctagtgtctgtgtgtgtttgttttttgcgtcgatttgtctgtgggtgtgcggatgatggtgttggtttctttatctgttggacctgtagatggggtgtgcgagggggtgggcgactgctgcggtgacgatgaggatggcctggctggttcgcgcgtctgatggtcggtgcgttgtgccggtgtggttggtcgtaagatgggggtctctagcgttcgcgaggtgcttgaggtggcgggtgtgtatgtgagttgtgcgtgctgtgccgcggtggtgcgagcttgtgttctgcgtctggaggttttatgacctggttgggcgatgtgggtgtgagcgccggcaggggtgtatgtgtgagccaggtgtgtggcacaactgcggcaggttgccaggttaactggggaggctgagtcaggagggatggcttgaacccatggaactggaggatgcagtgaggctatgatcacaccactggactccagcctgggtgatggagtgggacagtgtctcgtttaaagagatgtggggccaggtgcagtggctcacgcctgtaatcccagcactttgggaggctgaggtgggcagatcacaaggtcaggagtttgagaccagcctggcgacagagagagactccatctcaaaacaaaacaaaaaaaattagcctacttaaaggcacaactaaatgctttattacctttcttaccactgaacaatttgaggtaaaatcattcacaaggttggcacttcagtaaatccctttaaatagtgttcctaagatatctcttaaatcctcccataggaaatagaattacaggtaaggtacaccatacaaaaattgtgtcattgaggacaatggtgatctgtaattttagttgagtatgtttatgatttttgaagccatatggtgagtaaatgtaaatatgaaaaaagtgctacataaaacacttcttaaactttttttttttaaaaactgctccttgtggagcaggactaccccataggcagtgtacccacaatagatagccttttgttgttgttgttgttgagacaaggtctcgctgttgcccaggctagagcgcaggagcacaatcaccacacactgccgcttcaatctcctgggctcaaatgatccttccacctcagcctcccatgtggctgggactataggtgcatgccaccacacccagctaattaaaaaaattttttgtgtggagtctatgttgcccaggctggtctcttaactcctaggctcaagtgatcctcccacctcagcctcccaaagtgcttggatgacaggtgcgagccactgcacctggcccacattttttaaagagacactgtcccactccatcacccaggctggagtccagtggtgtgatcatagctcactgcatcctccagttcctgggttcaagccatccctcctgcctcagcctccccagtagctggaactacaggtgtgtgccatcacacctggctttacatttttctgtggggtcttactatattgcccaagccggtctcaaactcctgagctcaagtgatcctctgcctcagcctccagagtatctgggattacatatgtcggctaccgtgtctggccgttcacatctttggccactatttgcttgtgaaaaggtataatgaggtggtacttatcatttttactgtgtctcatgttttgtatatttttgtttcatcaactaagatgcactgtaacatctctgaaatctggatatattatcaatggtttatcatagttttgttagcaatacactgtcttttagtggtgcctaaaataatggtatagttgtgaggtgatcttagatttgatgaagcacagtatgcaggtaggcctaatgggggaagatggtaatataaaagcaagaagtattttttttttgtaatgactgaaagctgttctgtggatgacctaccctttcctttaaacacgattctctcacttccaactccaaacttgctcaactaatccttaaaaataaacttgagctggaatttgaaggcttgcctggactacagaccata

SEQ ID NO: 422557 - DNA, 1183 bp, Homo sapiens
ggcctgggcgggtggcgccttggcctccgcctccgctcgcctgcgcgcggccctgcgtgagggggcagaggcgaggtggaggcgttggcgctgccacgtctgggccgcggttcccaactgtggcgcgggcggtggaggaggaggtggggctggcgctgaagccggatccggatccggtgctgtgcacactggtgggggagagtccgacgcgcctggctaggagcgccgaccgcagggcctctacggaccttactagaaaaatgaaacctgatgaaactcctatgtttgacccaagtctactcaaagaagtggactggagtcagaatacagctacattttctccagccatttccccaacacatcctggagaaggcttggttttgaggcctctttgtactgctgacttaaatagaggtttttttaaggtattgggtcagctaacagagactggagttgtcagccctgaacaatttatgaaatcttttgagcatatgaagaaatctggggattattatgttacagttgtagaagatgtgactctaggacagattgttgctacggcaactctgattatagaacataaattcatccattcctgtgctaagagaggaagagtagaagatgttgttgttagtgatgaatgcagaggaaagcagcttggcaaattgttattatcaacccttactttgctaagcaagaaactgaactgttacaagattacccttgaatgtctaccacaaaatgttggtttctataaaaagtttggatatactgtatctgaagaaaactacatgtgtcggaggtttctaaagtaaaaatcttgtaagaaaattgtcaaaggggctaatgctacaaggctacactcttcctagagttgaaatattttgttgctgcagccgagtgacctccataaatactggactgaaaaaacattgtaatactacaagtataatgacatttagaagattactttgggctggtgggacatgctgtgaatttagattacaaatgaatattataaaggggatgatttttaaccaaaggaatatatttttaacttgaatcttttcttgcattgtatttttctaaaagtttggcttcctttcttggtagtcaagagtatgggtataggagaatggcggcatcggttggcctttagtactgggggggtttccgcgtgctt

SEQ ID NO: 422558 - DNA, 552 bp, Homo sapiens
  misc_feature (55)..(55): n is a, c, g, or t
gacatagtcaatgaatagtcagtagaattagaatggtgaacggattggcgacatntcaagagaagattgtcatgcagttcgtgggacgggaacctgcgtctgtggcagtaccgccaggctgagtacttccaggatgacatgccagaatctgaggaatgtgccagcgcccctgccccagtgccccaatcctctacacccttttcctcaccccagtagatccaacctccagccccatatagggtgaacctcttgataagctctctgcctcctcctccctttctcccttgtggggaatgtttggaggaatcactggcatttgatggggaataacataagcctgggctctgagcctcagctgagccctggaagattctccccatggggcagagtggtctccttacgtgctcacacccagtcagcttgggtccctatctctggccagagtttggcaggactgccattatctggggtgtggcctctgccagcaagagaagtgtcctgggtgtttttaatcatgtttgaaatggtcgccaatccggggaacctctagag

SEQ ID NO: 422559 - DNA, 3291 bp, Homo sapiens
gattgtcttaaaaaattgtcagaccggataaagggaggtctaaaaggggaccgtcccaagagcaaggcttccaaaagctaagcccggaaggacggcacctcgcgcattctcccgcctacctatcaatcatcgtgctccgctgtccagttggctggccaagggggcggggccgtcgtgtgacgtttgcagcccgccggccaggaagccgcgagatgcgtgacgagcgaagcgcgtgacggaggagcggttggccaacgcagtggcggcagtcggtgtaaacaaggcctcgcgccgctgcgggtcctgcgaccgctcctggctggtgggtggtctcgcgtggggcggttaccgccggcttcagtgggaggtgcttctcggcttcctccccctcatggcgtacacacccccggcgcaccacgtgggcgtgaggcgaggaaggaggggtgttaggccaaattctattttcattggctgtcactgctgccggcctttgtaagggggcgctctgattggtcgataaggtgggggcgtcgagggtctttgagtcctaaggcttctaattggttagatgagataagctagtgaagcgctttcttccgagagggatttcgattggtcggtcagagaggttacctggaaatccaacaccgcccaacacccctcccgctccccagtccggggacttcgataggattggagaaggtttgtgttcccgacgccttggtagttggcataggctaaagaaaagggatctcagccccgaggaagggtcaccctcctagagatagctactaccccgtctcaggagaccctggtatttctagagcacgctttgctttcaccaaacccaaggaggtgacaggaggagcccccgcacaggacctaagaatgctgtgaccagaagatgggatcgcggaacagcagcagtgcaggatccgggtccggagacccctccgagggcttgccccgaagaggggctggcctgcgtcggagtgaggaagaggaagaagaggatgaagatgtggatctggcccaggtactggcctatctcctccgcagaggccaagtgaggttggtgcagggaggaggtgcagcaaatttacaattcattcaggccctcttggactcagaggaagagaatgacagagcttgggatggtcgtcttggggatcgatacaacccacctgtggatgctacccctgacacccgggagctggaattcaatgagatcaagacacaagtggaactggccacagggcagctggggcttaggcgggccgcccagaagcacagctttcctcgaatgttgcaccagagagaacggggcctctgccatcggggaagcttctcccttggagaacagtctcgagtgatatctcacttcttgcccaatgatctgggcttcactgatagctactctcagaaggctttctgtggcatctacagcaaagatggtcaaatattcatgtctgcttgccaagaccagacaatccgactctatgactgccgatatggccgtttccgtaaattcaagagcatcaaggcccgcgacgtaggctggagcgtcttggatgtggccttcacccctgatgggaaccacttcctctactctagctggtctgattacattcatatctgcaatatctatggtgagggagatacacacactgccctggatctcaggccagatgagcgtcgctttgctgtcttctccattgctgtctcctcagatggacgagaagtactaggaggggccaatgatggctgcctgtatgtctttgaccgagaacagaaccggcgcacccttcagattgagtcccatgaggatgatgtgaatgcagtggcctttgctgatataagctcccaaatcctgttctctgggggagatgatgccatctgcaaagtgtgggatcgacgcaccatgcgggaggatgaccccaagcctgtgggtgcactggctggacaccaggatggcatcaccttcattgacagcaagggtgatgcccggtatctgatctccaactctaaagaccagaccatcaaactctgggatatccgacgcttttccagccgggaaggcatggaagcttcacgccaggctgccacacagcaaaactgggactatcggtggcagcaagtgcccaaaaaagcctggcggaagctgaagctcccaggggacagctccttgatgacctaccggggccacggagtgctgcacaccctcatccgctgccggttctcccccattcatagcactggccagcagttcatctacagtggctgctccactggcaaagtggttgtgtacgaccttctaagtggccacattgtgaagaagctgaccaaccacaaggcctgtgtgcgtgacgtcagttggcacccctttgaagagaagattgtcagcagttcgtgggacgggaacctgcgtctgtggcagtaccgccaggctgagtacttccaggatgacatgccagaatctgaggaatgtgccagcgcccctgccccagtgccccaatcctctacacccttttcctcaccccagtagatccaacctccagccccatatagggtgaacctcttgataagctctctgcctcctcctccctttctcccttgtggggaatgtttggaggaatcactggcatttgatggggaataacataagcctgggctctgagcctcagctgagccctggaagattctccccatggggcagagtggtctccttacgtgctcacacccagtcagcttgggtccctatctctggccagagtttggcaggactgccattatctggggtgtggcctctgccagcaagagaagtgtcctgggtgtttttaatcatgtttgaatgttaggggttggatcctagagtagatgcctgaggccacatctgaacagacctgtcagccaggcctgccaggtcttcacgttgaggattcaactggccaatcacaggacaggtgtcctggcctttcttcctgaggtctctaggggaggggcatgggtaagggtgtttcctcagcaccctcctggggtggggattatgtctgctgtcatgtctgggtctttagggtaggacaggctgtggtatgagaggcaggagtctccacaaggcttcatgtggccccttatagggcaggccctgccctctgggaaggtcccttcatgctggaggcacacagctttaaggaagtaggttgaagtaggactccttcgtcctctcactggctttggctccctcaataaactgtgtgggaacctggctcagtgtctgtctctctctctcac

SEQ ID NO: 422560 - DNA, 3133 bp, Homo sapiens
gattgtcttaaaaaattgtcagaccggataaagggaggtctaaaaggggaccgtcccaagagcaaggcttccaaaagctaagcccggaaggacggcacctcgcgcattctcccgcctacctatcaatcatcgtgctccgctgtccagttggctggccaagggggcggggccgtcgtgtgacgtttgcagcccgccggccaggaagccgcgagatgcgtgacgagcgaagcgcgtgacggaggagcggttggccaacgcagtggcggcagtcggtgtaaacaaggcctcgcgccgctgcgggtcctgcgaccgctcctggctggtgggtggtctcgcgtggggcggttaccgccggcttcagtgggaggtgcttctcggcttcctccccctcatggcgtacacacccccggcgcaccacgtgggcgtgaggcgaggaaggaggggtgttaggccaaattctattttcattggctgtcactgctgccggcctttgtaagggggcgctctgattggtcgataaggtgggggcgtcgagggtctttgagtcctaaggcttctaattggttagatgagataagctagtgaagcgctttcttccgagagggatttcgattggtcggtcagagaggttacctggaaatccaacaccgcccaacacccctcccgctccccagtccggggacttcgatagaaggaggtgacaggaggagcccccgcacaggacctaagaatgctgtgaccagaagatgggatcgcggaacagcagcagtgcaggatccgggtccggagacccctccgagggcttgccccgaagaggggctggcctgcgtcggagtgaggaagaggaagaagaggatgaagatgtggatctggcccaggtactggcctatctcctccgcagaggccaagtgaggttggtgcagggaggaggtgcagcaaatttacaattcattcaggccctcttggactcagaggaagagaatgacagagcttgggatggtcgtcttggggatcgatacaacccacctgtggatgctacccctgacacccgggagctggaattcaatgagatcaagacacaagtggaactggccacagggcagctggggcttaggcgggccgcccagaagcacagctttcctcgaatgttgcaccagagagaacggggcctctgccatcggggaagcttctcccttggagaacagtctcgagtgatatctcacttcttgcccaatgatctgggcttcactgatagctactctcagaaggctttctgtggcatctacagcaaagatggtcaaatattcatgtctgcttgccaagaccagacaatccgactctatgactgccgatatggccgtttccgtaaattcaagagcatcaaggcccgcgacgtaggctggagcgtcttggatgtggccttcacccctgatgggaaccacttcctctactctagctggtctgattacattcatatctgcaatatctatggtgagggagatacacacactgccctggatctcaggccagatgagcgtcgctttgctgtcttctccattgctgtctcctcagatggacgagaagtactaggaggggccaatgatggctgcctgtatgtctttgaccgagaacagaaccggcgcacccttcagattgagtcccatgaggatgatgtgaatgcagtggcctttgctgatataagctcccaaatcctgttctctgggggagatgatgccatctgcaaagtgtgggatcgacgcaccatgcgggaggatgaccccaagcctgtgggtgcactggctggacaccaggatggcatcaccttcattgacagcaagggtgatgcccggtatctgatctccaactctaaagaccagaccatcaaactctgggatatccgacgcttttccagccgggaaggcatggaagcttcacgccaggctgccacacagcaaaactgggactatcggtggcagcaagtgcccaaaaaagcctggcggaagctgaagctcccaggggacagctccttgatgacctaccggggccacggagtgctgcacaccctcatccgctgccggttctcccccattcatagcactggccagcagttcatctacagtggctgctccactggcaaagtggttgtgtacgaccttctaagtggccacattgtgaagaagctgaccaaccacaaggcctgtgtgcgtgacgtcagttggcacccctttgaagagaagattgtcagcagttcgtgggacgggaacctgcgtctgtggcagtaccgccaggctgagtacttccaggatgacatgccagaatctgaggaatgtgccagcgcccctgccccagtgccccaatcctctacacccttttcctcaccccagtagatccaacctccagccccatatagggtgaacctcttgataagctctctgcctcctcctccctttctcccttgtggggaatgtttggaggaatcactggcatttgatggggaataacataagcctgggctctgagcctcagctgagccctggaagattctccccatggggcagagtggtctccttacgtgctcacacccagtcagcttgggtccctatctctggccagagtttggcaggactgccattatctggggtgtggcctctgccagcaagagaagtgtcctgggtgtttttaatcatgtttgaatgttaggggttggatcctagagtagatgcctgaggccacatctgaacagacctgtcagccaggcctgccaggtcttcacgttgaggattcaactggccaatcacaggacaggtgtcctggcctttcttcctgaggtctctaggggaggggcatgggtaagggtgtttcctcagcaccctcctggggtggggattatgtctgctgtcatgtctgggtctttagggtaggacaggctgtggtatgagaggcaggagtctccacaaggcttcatgtggccccttatagggcaggccctgccctctgggaaggtcccttcatgctggaggcacacagctttaaggaagtaggttgaagtaggactccttcgtcctctcactggctttggctccctcaataaactgtgtgggaacctggctcagtgtctgtctctctctctcac

SEQ ID NO: 422561 - DNA, 3158 bp, Homo sapiens
gattgtcttaaaaaattgtcagaccggataaagggaggtctaaaaggggaccgtcccaagagcaaggcttccaaaagctaagcccggaaggacggcacctcgcgcattctcccgcctacctatcaatcatcgtgctccgctgtccagttggctggccaagggggcggggccgtcgtgtgacgtttgcagcccgccggccaggaagccgcgagatgcgtgacgagcgaagcgcgtgacggaggagcggttggccaacgcagtggcggcagtcggtgtaaacaaggcctcgcgccgctgcgggtcctgcgaccgctcctggctggtgggtggtctcgcgtggggcggttaccgccggcttcagtgggaggtgcttctcggcttcctccccctcatggcgtacacacccccggcgcaccacgtgggcgtgaggcgaggaaggaggggtgttaggccaaattctattttcattggctgtcactgctgccggcctttgtaagggggcgctctgattggtcgataaggtgggggcgtcgagggtctttgagtcctaaggcttctaattggttagatgagataagctagtgaagcgctttcttccgagagggatttcgattggtcggtcagagaggttacctggaaatccaacaccgcccaacacccctcccgctccccagtccggggacttcgatagagcacgctttgctttcaccaaacccaaggaggtgacaggaggagcccccgcacaggacctaagaatgctgtgaccagaagatgggatcgcggaacagcagcagtgcaggatccgggtccggagacccctccgagggcttgccccgaagaggggctggcctgcgtcggagtgaggaagaggaagaagaggatgaagatgtggatctggcccaggtactggcctatctcctccgcagaggccaagtgaggttggtgcagggaggaggtgcagcaaatttacaattcattcaggccctcttggactcagaggaagagaatgacagagcttgggatggtcgtcttggggatcgatacaacccacctgtggatgctacccctgacacccgggagctggaattcaatgagatcaagacacaagtggaactggccacagggcagctggggcttaggcgggccgcccagaagcacagctttcctcgaatgttgcaccagagagaacggggcctctgccatcggggaagcttctcccttggagaacagtctcgagtgatatctcacttcttgcccaatgatctgggcttcactgatagctactctcagaaggctttctgtggcatctacagcaaagatggtcaaatattcatgtctgcttgccaagaccagacaatccgactctatgactgccgatatggccgtttccgtaaattcaagagcatcaaggcccgcgacgtaggctggagcgtcttggatgtggccttcacccctgatgggaaccacttcctctactctagctggtctgattacattcatatctgcaatatctatggtgagggagatacacacactgccctggatctcaggccagatgagcgtcgctttgctgtcttctccattgctgtctcctcagatggacgagaagtactaggaggggccaatgatggctgcctgtatgtctttgaccgagaacagaaccggcgcacccttcagattgagtcccatgaggatgatgtgaatgcagtggcctttgctgatataagctcccaaatcctgttctctgggggagatgatgccatctgcaaagtgtgggatcgacgcaccatgcgggaggatgaccccaagcctgtgggtgcactggctggacaccaggatggcatcaccttcattgacagcaagggtgatgcccggtatctgatctccaactctaaagaccagaccatcaaactctgggatatccgacgcttttccagccgggaaggcatggaagcttcacgccaggctgccacacagcaaaactgggactatcggtggcagcaagtgcccaaaaaagcctggcggaagctgaagctcccaggggacagctccttgatgacctaccggggccacggagtgctgcacaccctcatccgctgccggttctcccccattcatagcactggccagcagttcatctacagtggctgctccactggcaaagtggttgtgtacgaccttctaagtggccacattgtgaagaagctgaccaaccacaaggcctgtgtgcgtgacgtcagttggcacccctttgaagagaagattgtcagcagttcgtgggacgggaacctgcgtctgtggcagtaccgccaggctgagtacttccaggatgacatgccagaatctgaggaatgtgccagcgcccctgccccagtgccccaatcctctacacccttttcctcaccccagtagatccaacctccagccccatatagggtgaacctcttgataagctctctgcctcctcctccctttctcccttgtggggaatgtttggaggaatcactggcatttgatggggaataacataagcctgggctctgagcctcagctgagccctggaagattctccccatggggcagagtggtctccttacgtgctcacacccagtcagcttgggtccctatctctggccagagtttggcaggactgccattatctggggtgtggcctctgccagcaagagaagtgtcctgggtgtttttaatcatgtttgaatgttaggggttggatcctagagtagatgcctgaggccacatctgaacagacctgtcagccaggcctgccaggtcttcacgttgaggattcaactggccaatcacaggacaggtgtcctggcctttcttcctgaggtctctaggggaggggcatgggtaagggtgtttcctcagcaccctcctggggtggggattatgtctgctgtcatgtctgggtctttagggtaggacaggctgtggtatgagaggcaggagtctccacaaggcttcatgtggccccttatagggcaggccctgccctctgggaaggtcccttcatgctggaggcacacagctttaaggaagtaggttgaagtaggactccttcgtcctctcactggctttggctccctcaataaactgtgtgggaacctggctcagtgtctgtctctctctctcac

SEQ ID NO: 422562 - DNA, 4475 bp, Homo sapiens
gattgtcttaaaaaattgtcagaccggataaagggaggtctaaaaggggaccgtcccaagagcaaggcttccaaaagctaagcccggaaggacggcacctcgcgcattctcccgcctacctatcaatcatcgtgctccgctgtccagttggctggccaagggggcggggccgtcgtgtgacgtttgcagcccgccggccaggaagccgcgagatgcgtgacgagcgaagcgcgtgacggaggagcggttggccaacgcagtggcggcagtcggtgtaaacaaggcctcgcgccgctgcgggtcctgcgaccgctcctggctggtgggtggtctcgcgtggggcggttaccgccggcttcagtgggaggtgcttctcggcttcctccccctcatggcgtacacacccccggcgcaccacgtgggcgtgaggcgaggaaggaggggtgttaggccaaattctattttcattggctgtcactgctgccggcctttgtaagggggcgctctgattggtcgataaggtgggggcgtcgagggtctttgagtcctaaggcttctaattggttagatgagataagctagtgaagcgctttcttccgagagggatttcgattggtcggtcagagaggttacctggaaatccaacaccgcccaacacccctcccgctccccagtccggggacttcgataggattggagaaggtttgtgttcccgacgccttggtagttggcataggctaaagaaaagggatctcagccccgaggaagggtcaccctcctagagatagctactaccccgtctcaggagaccctggtatttctagagcacgctttgctttcaccaaacccaaggaggtgacaggaggagcccccgcacaggacctaagaatgctgtgaccagaagatgggatcgcggaacagcagcagtgcaggatccgggtccggagacccctccgagggcttgccccgaagaggggctggcctgcgtcggagtgaggaagaggaagaagaggatgaagatgtggatctggcccaggtactggcctatctcctccgcagaggccaagtgaggttggtgcagggaggaggtgcagcaaatttacaattcattcaggccctcttggactcagaggaagagaatgacagagcttgggatggtcgtcttggggatcgatacaacccacctgtggatgctacccctgacacccgggagctggaattcaatgagatcaagacacaagtggaactggccacagggcagctggggcttaggcgggccgcccagaagcacagctttcctcgaatgttgcaccagagagaacggggcctctgccatcggggaagcttctcccttggagaacagtctcgagtgatatctcacttcttgcccaatgatctgggcttcactgatagctactctcagaaggctttctgtggcatctacagcaaagatggtcaaatattcatgtctgcttgccaagaccagacaatccgactctatgactgccgatatggccgtttccgtaaattcaagagcatcaaggcccgcgacgtaggctggagcgtcttggatgtggccttcacccctgatgggaaccacttcctctactctagctggtctgattacattcatatctgcaatatctatggtgagggagatacacacactgccctggatctcaggccagatgagcgtcgctttgctgtcttctccattgctgtctcctcagatggacgagaagtactaggaggggccaatgatggctgcctgtatgtctttgaccgagaacagaaccggcgcacccttcagattgagtcccatgaggatgatgtgaatgcagtggcctttgctgatataagctcccaaatcctgttctctgggggagatgatgccatctgcaaagtgtgggatcgacgcaccatgcgggaggatgaccccaagcctgtgggtgcactggctggacaccaggatggcatcaccttcattgacagcaagggtgatgcccggtatctgatctccaactctaaagaccagaccatcaaactctgggatatccgacgcttttccagccgggaaggcatggaagcttcacgccaggctgccacacagcaaaactgggactatcggtggcagcaagtgcccaaaaaagcctggcggaagctgaagctcccaggggacagctccttgatgacctaccggggccacggagtgctgcacaccctcatccgctgccggttctcccccattcatagcactggccagcagttcatctacagtggctgctccactggcaaagtggttgtgtacgaccttctaagtggccacattgtgaagaagctgaccaaccacaaggcctgtgtgcgtgacgtcagttggcacccctttgaagagaagattgtcagcagttcgtgggacgggaacctgcgtctgtggcagtaccgccaggctgagtacttccaggatgacatgccagaatctgaggaatgtgccagcgcccctgccccagtgccccaatcctctacacccttttcctcaccccagtagatccaacctccagccccatatagggtgaacctcttgataagctctctgcctcctcctccctttctcccttgtggggaatgtttggaggaatcactggcatttgatggggaataacataagcctgggctctgagcctcagctgagccctggaagattctccccatggggcagagtggtctccttacgtgctcacacccagtcagcttgggtccctatctctggccagagtttggcaggactgccattatctggggtgtggcctctgccagcaagagaagtgtcctgggtgtttttaatcatgtttgaatgttaggggttggatcctagagtagatgcctgaggccacatctgaacagacctgtcagccaggcctgccaggtcttcacgttgaggattcaactggccaatcacaggacaggtgtcctggcctttcttcctgaggtctctaggggaggggcatgggtaagggtgtttcctcagcaccctcctggggtggggattatgtctgctgtcatgtctgggtctttagggtaggacaggctgtggtatgagaggcaggagtctccacaaggcttcatgtggccccttatagggcaggccctgccctctgggaaggtcccttcatgctggaggcacacagctttaaggaagtaggttgaagtaggactccttcgtcctctcactggctttggctccctcaataaactgtgtgggaacctggctcagtgtctgtctctctctctcactctctgtttttcctatctgaggtctttcatctcctcacttcaggaaaacacagttcagcaaagtcttcagatgcgatcctgtgtaggagaaaatacccttctggtgccccatgaaaaagggaaataccaaaaccatttgttcactgagccttgcaataggtgctcccttaccaatttcagaagcttccctgcaagtagatatcgagagagcacactttccattagagcctggtaatacccatatcacctctgctctgaggctgggcctgcagctgtgtagtctttggaagaggtagcccctgaacgcagagcctaagagaagcaagtcggccctgacgccaggccccagtgggcgcctcacactcagaacctcataccccagagcaaaccgatggtcagggagagggctagagctcacacccagctcggaatagatcttccctgatgacatttcatgccctctaaggcagtttttaaatgaaggtacacacatccaggggtgttcacaggctttcacagcaagggtacctatttcatggcaaaataggcagttttaaaagaataaacaagctaggtgtggtggctcatgcctgtaatcctagcactttgggaagccaaagctgatggatcgcttgagcccaggagtttgagaccagcctgggcaacatggcaaaaccccatctctacaaaaaatacaaaaagtaggccgggcacggtggttcacacctgtaatcccggcattttgggaggccgagataggtggatcacctgaagtcaggtgtttgagaccagcctggccaacatggtggaacccaatctctactaaaaatacaaaaaaactagccggatatggtggcgggtgcctgtaatctcagctacttgagaggctgaggcaggagaatcgcttgaacttgggagcagaggtgagctgagtgcagtgagccaagaccatgccattacactcaagcttgggcaacgagagcaaaactctgtctcaaaaaaaaaattagccagatgtggtgacgcatgcctgtagtcctagctactcaggaggctgaggtgggaggatcacctaaggccaggaggtcaaggctgcggtgagccgtgattgtgccaatgtactccagcctaggtgacagagtgagaccctgtctcaaaaataaataataaataaataaatgttc

SEQ ID NO: 422563 - DNA, 3110 bp, Homo sapiens
gattgtcttaaaaaattgtcagaccggataaagggaggtctaaaaggggaccgtcccaagagcaaggcttccaaaagctaagcccggaaggacggcacctcgcgcattctcccgcctacctatcaatcatcgtgctccgctgtccagttggctggccaagggggcggggccgtcgtgtgacgtttgcagcccgccggccaggaagccgcgagatgcgtgacgagcgaagcgcgtgacggaggagcggttggccaacgcagtggcggcagtcggtgtaaacaaggcctcgcgccgctgcgggtcctgcgaccgctcctggctggtgggtggtctcgcgtggggcggttaccgccggcttcagtgggaggtgcttctcggcttcctccccctcatggcgtacacacccccggcgcaccacgtgggcgtgaggcgaggaaggaggggtgttaggccaaattctattttcattggctgtcactgctgccggcctttgtaagggggcgctctgattggtcgataaggtgggggcgtcgagggtctttgagtcctaaggcttctaattggttagatgagataagctagtgaagcgctttcttccgagagggatttcgattggtcggtcagagaggttacctggaaatccaacaccgcccaacacccctcccgctccccagtccggggacttcgatagaaggaggtgacaggaggagcccccgcacaggacctaagaatgctgtgaccagaagatgggatcgcggaacagcagcagtgcaggatccgggtccggagacccctccgagggcttgccccgaagaggggctggcctgcgtcggagtgaggaagaggaagaagaggatgaagatgtggatctggcccagaggccaagtgaggttggtgcagggaggaggtgcagcaaatttacaattcattcaggccctcttggactcagaggaagagaatgacagagcttgggatggtcgtcttggggatcgatacaacccacctgtggatgctacccctgacacccgggagctggaattcaatgagatcaagacacaagtggaactggccacagggcagctggggcttaggcgggccgcccagaagcacagctttcctcgaatgttgcaccagagagaacggggcctctgccatcggggaagcttctcccttggagaacagtctcgagtgatatctcacttcttgcccaatgatctgggcttcactgatagctactctcagaaggctttctgtggcatctacagcaaagatggtcaaatattcatgtctgcttgccaagaccagacaatccgactctatgactgccgatatggccgtttccgtaaattcaagagcatcaaggcccgcgacgtaggctggagcgtcttggatgtggccttcacccctgatgggaaccacttcctctactctagctggtctgattacattcatatctgcaatatctatggtgagggagatacacacactgccctggatctcaggccagatgagcgtcgctttgctgtcttctccattgctgtctcctcagatggacgagaagtactaggaggggccaatgatggctgcctgtatgtctttgaccgagaacagaaccggcgcacccttcagattgagtcccatgaggatgatgtgaatgcagtggcctttgctgatataagctcccaaatcctgttctctgggggagatgatgccatctgcaaagtgtgggatcgacgcaccatgcgggaggatgaccccaagcctgtgggtgcactggctggacaccaggatggcatcaccttcattgacagcaagggtgatgcccggtatctgatctccaactctaaagaccagaccatcaaactctgggatatccgacgcttttccagccgggaaggcatggaagcttcacgccaggctgccacacagcaaaactgggactatcggtggcagcaagtgcccaaaaaagcctggcggaagctgaagctcccaggggacagctccttgatgacctaccggggccacggagtgctgcacaccctcatccgctgccggttctcccccattcatagcactggccagcagttcatctacagtggctgctccactggcaaagtggttgtgtacgaccttctaagtggccacattgtgaagaagctgaccaaccacaaggcctgtgtgcgtgacgtcagttggcacccctttgaagagaagattgtcagcagttcgtgggacgggaacctgcgtctgtggcagtaccgccaggctgagtacttccaggatgacatgccagaatctgaggaatgtgccagcgcccctgccccagtgccccaatcctctacacccttttcctcaccccagtagatccaacctccagccccatatagggtgaacctcttgataagctctctgcctcctcctccctttctcccttgtggggaatgtttggaggaatcactggcatttgatggggaataacataagcctgggctctgagcctcagctgagccctggaagattctccccatggggcagagtggtctccttacgtgctcacacccagtcagcttgggtccctatctctggccagagtttggcaggactgccattatctggggtgtggcctctgccagcaagagaagtgtcctgggtgtttttaatcatgtttgaatgttaggggttggatcctagagtagatgcctgaggccacatctgaacagacctgtcagccaggcctgccaggtcttcacgttgaggattcaactggccaatcacaggacaggtgtcctggcctttcttcctgaggtctctaggggaggggcatgggtaagggtgtttcctcagcaccctcctggggtggggattatgtctgctgtcatgtctgggtctttagggtaggacaggctgtggtatgagaggcaggagtctccacaaggcttcatgtggccccttatagggcaggccctgccctctgggaaggtcccttcatgctggaggcacacagctttaaggaagtaggttgaagtaggactccttcgtcctctcactggctttggctccctcaataaactgtgtgggaacctggctcagtgtctgtctctctctctcac

SEQ ID NO: 422564 - DNA, 2555 bp, Homo sapiens
ctgtggtggacttctcaggcagaggctcagaaggaaatgctgtgaggatgtttagcttgttgggaggtcaacttagtaggtcatgtccacagcgtattggtcttgctcttgttctaaggaaatgatgttagaatgtttagctcgctgggaggtcaacttagtaggtcacgtccacagcatgttggtcttgctcttgctgtaagagtaaaactctctttcctactgtgttttataggagaccataacagccaaggtctagtcagcctcaaacctctggtttgggggaagaagtcccctcctttataatgggggtctctccacagaggccaagtgaggttggtgcagggaggaggtgcagcaaatttacaattcattcaggccctcttggactcagaggaagagaatgacagagcttgggatggtcgtcttggggatcgatacaacccacctgtggatgctacccctgacacccgggagctggaattcaatgagatcaagacacaagtggaactggccacagggcagctggggcttaggcgggccgcccagaagcacagctttcctcgaatgttgcaccagagagaacggggcctctgccatcggggaagcttctcccttggagaacagtctcgagtgatatctcacttcttgcccaatgatctgggcttcactgatagctactctcagaaggctttctgtggcatctacagcaaagatggtcaaatattcatgtctgcttgccaagaccagacaatccgactctatgactgccgatatggccgtttccgtaaattcaagagcatcaaggcccgcgacgtaggctggagcgtcttggatgtggccttcacccctgatgggaaccacttcctctactctagctggtctgattacattcatatctgcaatatctatggtgagggagatacacacactgccctggatctcaggccagatgagcgtcgctttgctgtcttctccattgctgtctcctcagatggacgagaagtactaggaggggccaatgatggctgcctgtatgtctttgaccgagaacagaaccggcgcacccttcagattgagtcccatgaggatgatgtgaatgcagtggcctttgctgatataagctcccaaatcctgttctctgggggagatgatgccatctgcaaagtgtgggatcgacgcaccatgcgggaggatgaccccaagcctgtgggtgcactggctggacaccaggatggcatcaccttcattgacagcaagggtgatgcccggtatctgatctccaactctaaagaccagaccatcaaactctgggatatccgacgcttttccagccgggaaggcatggaagcttcacgccaggctgccacacagcaaaactgggactatcggtggcagcaagtgcccaaaaaagcctggcggaagctgaagctcccaggggacagctccttgatgacctaccggggccacggagtgctgcacaccctcatccgctgccggttctcccccattcatagcactggccagcagttcatctacagtggctgctccactggcaaagtggttgtgtacgaccttctaagtggccacattgtgaagaagctgaccaaccacaaggcctgtgtgcgtgacgtcagttggcacccctttgaagagaagattgtcagcagttcgtgggacgggaacctgcgtctgtggcagtaccgccaggctgagtacttccaggatgacatgccagaatctgaggaatgtgccagcgcccctgccccagtgccccaatcctctacacccttttcctcaccccagtagatccaacctccagccccatatagggtgaacctcttgataagctctctgcctcctcctccctttctcccttgtggggaatgtttggaggaatcactggcatttgatggggaataacataagcctgggctctgagcctcagctgagccctggaagattctccccatggggcagagtggtctccttacgtgctcacacccagtcagcttgggtccctatctctggccagagtttggcaggactgccattatctggggtgtggcctctgccagcaagagaagtgtcctgggtgtttttaatcatgtttgaatgttaggggttggatcctagagtagatgcctgaggccacatctgaacagacctgtcagccaggcctgccaggtcttcacgttgaggattcaactggccaatcacaggacaggtgtcctggcctttcttcctgaggtctctaggggaggggcatgggtaagggtgtttcctcagcaccctcctggggtggggattatgtctgctgtcatgtctgggtctttagggtaggacaggctgtggtatgagaggcaggagtctccacaaggcttcatgtggccccttatagggcaggccctgccctctgggaaggtcccttcatgctggaggcacacagctttaaggaagtaggttgaagtaggactccttcgtcctctcactggctttggctccctcaataaactgtgtgggaacctggctcagtgtctgtctctctctctcac

SEQ ID NO: 422565 - DNA, 4515 bp, Homo sapiens
gattgtcttaaaaaattgtcagaccggataaagggaggtctaaaaggggaccgtcccaagagcaaggcttccaaaagctaagcccggaaggacggcacctcgcgcattctcccgcctacctatcaatcatcgtgctccgctgtccagttggctggccaagggggcggggccgtcgtgtgacgtttgcagcccgccggccaggaagccgcgagatgcgtgacgagcgaagcgcgtgacggaggagcggttggccaacgcagtggcggcagtcggtgtaaacaaggcctcgcgccgctgcgggtcctgcgaccgctcctggctggtgggtggtctcgcgtggggcggttaccgccggcttcagtgggaggtgcttctcggcttcctccccctcatggcgtacacacccccggcgcaccacgtgggcgtgaggcgaggaaggaggggtgttaggccaaattctattttcattggctgtcactgctgccggcctttgtaagggggcgctctgattggtcgataaggtgggggcgtcgagggtctttgagtcctaaggcttctaattggttagatgagataagctagtgaagcgctttcttccgagagggatttcgattggtcggtcagagaggttacctggaaatccaacaccgcccaacacccctcccgctccccagtccggggacttcgataggattggagaaggtttgtgttcccgacgccttggtagttggcataggctaaagaaaagggatctcagccccgaggaagggtcaccctcctagagatagctactaccccgtctcaggagaccctggtatttctagagcacgctttgctttcaccaaacccaaggaggtgacaggaggagcccccgcacaggacctaagaatgctgtgaccagaagatgggatcgcggaacagcagcagtgcaggatccgggtccggagacccctccgagggcttgccccgaagaggggctggcctgcgtcggagtgaggaagaggaagaagaggatgaagatgtggatctggcccaggtactggcctatctcctccgcagaggccaagtgaggttggtgcagggaggaggtgcagcaaatttacaattcattcaggccctcttggactcagaggaagagaatgacagagcttgggatggtcgtcttggggatcgatacaacccacctgtggatgctacccctgacacccgggagctggaattcaatgagatcaagacacaagtggaactggccacagggcagctggggcttaggcgggccgcccagaagcacagctttcctcgaatgttgcaccagagagaacggggcctctgccatcggggaagcttctcccttggagaacagtctcgagtgatatctcacttcttgcccaatgatctgggcttcactgatagctactctcagaaggctttctgtggcatctacagcaaagatggtcaaatattcatgtctgcttgccaagaccagacaatccgactctatgactgccgatatggccgtttccgtaaattcaagagcatcaaggcccgcgacgtaggctggagcgtcttggatgtggccttcacccctgatgggaaccacttcctctactctagctggtctgattacattcatatctgcaatatctatggtgagggagatacacacactgccctggatctcaggccagatgagcgtcgctttgctgtcttctccattgctgtctcctcagatggacgagaagtactaggaggggccaatgatggctgcctgtatgtctttgaccgagaacagaaccggcgcacccttcagattgagtcccatgaggatgatgtgaatgcagtggcctttgctgatataagctcccaaatcctgttctctgggggagatgatgccatctgcaaagtgtgggatcgacgcaccatgcgggaggatgaccccaagcctgtgggtgcactggctggacaccaggatggcatcaccttcattgacagcaagggtgatgcccggtatctgatctccaactctaaagaccagaccatcaaactctgggatatccgacgcttttccagccgggaaggcatggaagcttcacgccaggctgccacacagcaaaactgggactatcggtggcagcaagtgcccaaaaaagcctggcggaagctgaagctcccaggggacagctccttgatgacctaccggggccacggagtgctgcacaccctcatccgctgccggttctcccccattcatagcactggccagcagttcatctacagtggctgctccactggcaaagtggttgtgtacgaccttctaagtggccacattgtgaagaagctgaccaaccacaaggcctgtgtgcgtgacgtcagttggcacccctttgaagagaagattgtcagcagttcgtgggacgggaacctgcgtctgtggcagtaccgccaggctgagtacttccaggatgacatgccagaatctgaggaatgtgccagcgcccctgccccagtgccccaatcctctacacccttttcctcaccccagtagatccaacctccagccccatatagggtgaacctcttgataagctctctgcctcctcctccctttctcccttgtggggaatgtttggaggaatcactggcatttgatggggaataacataagcctgggctctgagcctcagctgagccctggaagattctccccatggggcagagtggtctccttacgtgctcacacccagtcagcttgggtccctatctctggccagagtttggcaggactgccattatctggggtgtggcctctgccagcaagagaagtgtcctgggtgtttttaatcatgtttgaatgttaggggttggatcctagagtagatgcctgaggccacatctgaacagacctgtcagccaggcctgccaggtcttcacgttgaggattcaactggccaatcacaggacaggtgtcctggcctttcttcctgaggtctctaggggaggggcatgggtaagggtgtttcctcagcaccctcctggggtggggattatgtctgctgtcatgtctgggtctttagggtaggacaggctgtggtatgagaggcaggagtctccacaaggcttcatgtggccccttatagggcaggccctgccctctgggaaggtcccttcatgctggaggcacacagctttaaggaagtaggttgaagtaggactccttcgtcctctcactggctttggctccctcaataaactgtgtgggaacctggctcagtgtctgtctctctctctcactctctgtttttcctatctgaggtctttcatctcctcacttcaggaaaacacagttcagcaaagtcttcagatgcgatcctgtgtaggagaaaatacccttctggtgccccatgaaaaagggaaataccaaaaccatttgttcactgagccttgcaataggtgctcccttaccaatttcagaagcttccctgcaagtagatatcgagagagcacactttccattagagcctggtaatacccatatcacctctgctctgaggctgggcctgcagctgtgtagtctttggaagaggtagcccctgaacgcagagcctaagagaagcaagtcggccctgacgccaggccccagtgggcgcctcacactcagaacctcataccccagagcaaaccgatggtcagggagagggctagagctcacacccagctcggaatagatcttccctgatgacatttcatgccctctaaggcagtttttaaatgaaggtacacacatccaggggtgttcacaggctttcacagcaagggtacctatttcatggcaaaataggcagttttaaaagaataaacaagctaggtgtggtggctcatgcctgtaatcctagcactttgggaagccaaaatggtggaacccaatctctactaaaaatacaaaaaaactagccggatatggtggcgggtgcctgtaatctcagctacttgagaggctgaggcaggagaatcgcttgaacttgggagcagaggtgagctgagtgcagtgagccaagaccatgccattacactcaagcttgggcaacgagagcaaaactctgtctcaaaaaaaaaattagccagatgtggtgacgcatgcctgtagtcctagctactcaggaggctgaggtgggaggatcacctaaggccaggaggtcaaggctgcggtgagccgtgattgtgccaatgtactccagcctaggtgacagagtgagaccctgtctcaaaaataaataataaataaataaatgttcagatccttggcttctgtgttctcattcctcaaattgatctacctagtgtgaaactcccgtgccagatctcctttcccatccacgcttttcattccccgtctgccaagtgataaagttacctaaggtgctacccatctcacccagaacctgtgttacttccagggcaccaaattaagagagaaattcaaattgttagtatccttatagcttcattagatcaaag

SEQ ID NO: 422566 - DNA, 2081 bp, Homo sapiens
gaaaattgtagaaatttagaggatggtggaatggttgaaagacgggattgcactcacagccaaaagggaagaatgactgttctgatattccagctctgttaggattctgctgattgggacactccttatcctgagcacccctcaccctcactttctctctccttccctagcttcttgcccaatgatctgggcttcactgatagctactctcagaaggctttctgtggcatctacagcaaagatggtcaaatattcatgtctgcttgccaagaccagacaatccgactctatgactgccgatatggccgtttccgtaaattcaagagcatcaaggcccgcgacgtaggctggagcgtcttggatgtggccttcacccctgatgggaaccacttcctctactctagctggtctgattacattcatatctgcaatatctatggtgagggagatacacacactgccctggatctcaggccagatgagcgtcgctttgctgtcttctccattgctgtctcctcagatggacgagaagtactaggaggggccaatgatggctgcctgtatgtctttgaccgagaacagaaccggcgcacccttcagattgagtcccatgaggatgatgtgaatgcagtggcctttgctgatataagctcccaaatcctgttctctgggggagatgatgccatctgcaaagtgtgggatcgacgcaccatgcgggaggatgaccccaagcctgtgggtgcactggctggacaccaggatggcatcaccttcattgacagcaagggtgatgcccggtatctgatctccaactctaaagaccagaccatcaaactctgggatatccgacgcttttccagccgggaaggcatggaagcttcacgccaggctgccacacagcaaaactgggactatcggtggcagcaagtgcccaaaaaagcctggcggaagctgaagctcccaggggacagctccttgatgacctaccggggccacggagtgctgcacaccctcatccgctgccggttctcccccattcatagcactggccagcagttcatctacagtggctgctccactggcaaagtggttgtgtacgaccttctaagtggccacattgtgaagaagctgaccaaccacaaggcctgtgtgcgtgacgtcagttggcacccctttgaagagaagattgtcagcagttcgtgggacgggaacctgcgtctgtggcagtaccgccaggctgagtacttccaggatgacatgccagaatctgaggaatgtgccagcgcccctgccccagtgccccaatcctctacacccttttcctcaccccagtagatccaacctccagccccatatagggtgaacctcttgataagctctctgcctcctcctccctttctcccttgtggggaatgtttggaggaatcactggcatttgatggggaataacataagcctgggctctgagcctcagctgagccctggaagattctccccatggggcagagtggtctccttacgtgctcacacccagtcagcttgggtccctatctctggccagagtttggcaggactgccattatctggggtgtggcctctgccagcaagagaagtgtcctgggtgtttttaatcatgtttgaatgttaggggttggatcctagagtagatgcctgaggccacatctgaacagacctgtcagccaggcctgccaggtcttcacgttgaggattcaactggccaatcacaggacaggtgtcctggcctttcttcctgaggtctctaggggaggggcatgggtaagggtgtttcctcagcaccctcctggggtggggattatgtctgctgtcatgtctgggtctttagggtaggacaggctgtggtatgagaggcaggagtctccacaaggcttcatgtggccccttatagggcaggccctgccctctgggaaggtcccttcatgctggaggcacacagctttaaggaagtaggttgaagtaggactccttcgtcctctcactggctttggctccctcaataaactgtgtgggaacctggctcagtgtctgtctctctctctcac

SEQ ID NO: 422567 - DNA, 3388 bp, Homo sapiens
gattgtcttaaaaaattgtcagaccggataaagggaggtctaaaaggggaccgtcccaagagcaaggcttccaaaagctaagcccggaaggacggcacctcgcgcattctcccgcctacctatcaatcatcgtgctccgctgtccagttggctggccaagggggcggggccgtcgtgtgacgtttgcagcccgccggccaggaagccgcgagatgcgtgacgagcgaagcgcgtgacggaggagcggttggccaacgcagtggcggcagtcggtgtaaacaaggcctcgcgccgctgcgggtcctgcgaccgctcctggctggtgggtggtctcgcgtggggcggttaccgccggcttcagtgggaggtgcttctcggcttcctccccctcatggcgtacacacccccggcgcaccacgtgggcgtgaggcgaggaaggaggggtgttaggccaaattctattttcattggctgtcactgctgccggcctttgtaagggggcgctctgattggtcgataaggtgggggcgtcgagggtctttgagtcctaaggcttctaattggttagatgagataagctagtgaagcgctttcttccgagagggatttcgattggtcggtcagagaggttacctggaaatccaacaccgcccaacacccctcccgctccccagtccggggacttcgataggattggagaaggtttgtgttcccgacgccttggtagttggcataggctaaagaaaagggatctcagccccgaggaagggtcaccctcctagagatagctactaccccgtctcaggagaccctggtatttctagagcacgctttgctttcaccaaacccaaggaggtgacaggaggagcccccgcacaggacctaagaatgctgtgaccagaagatgggatcgcggaacagcagcagtgcaggatccgggtccggagacccctccgagggcttgccccgaagaggggctggcctgcgtcggagtgaggaagaggaagaagaggatgaagatgtggatctggcccaggtactggcctatctcctccgcagaggccaagtgaggttggtgcagggaggaggtgcagcaaatttacaattcattcaggccctcttggactcagaggaagagaatgacagagcttgggatggtcgtcttggggatcgatacaacccacctgtggatgctacccctgacacccgggagctggaattcaatgagatcaagacacaagtggaactggccacagggcagctggggcttaggcgggccgcccagaagcacagctttcctcgaatgttgcaccagagagaacggggcctctgccatcggggaagcttctcccttggagaacagtctcgagtgatatctcacttcttgcccaatgatctgggcttcactgatagctactctcagaaggctttctgtggcatctacagcaaagatggtcaaatattcatgtctgcttgccaagaccagacaatccgactctatgactgccgatatggccgtttccgtaaattcaagagcatcaaggcccgcgacgtaggctggagcgtcttggatgtggccttcacccctgatgggaaccacttcctctactctagctggtctgattacattcatatctgcaatatctatggtgagggagatacacacactgccctggatctcaggccagatgagcgtcgctttgctgtcttctccattgctgtctcctcagatggacgagaagtactaggaggggccaatgatggctgcctgtatgtctttgaccgagaacagaaccggcgcacccttcagattgagtcccatgaggatgatgtgaatgcagtggcctttgctgatataagctcccaaatcctgttctctgggggagatgatgccatctgcaaagtgtgggatcgacgcaccatgcgggaggatgaccccaagcctgtgggtgcactggctggacaccaggatggcatcaccttcattgacagcaagggtgatgcccggtatctgatctccaactctaaagaccagaccatcaaactctgggatatccgacgcttttccagccgggaaggcatggaagcttcacgccaggctgccacacagcaaaactgggactatcggtggcagcaagtgcccaaaaaagcctggcggaagctgaagctcccaggggacagctccttgatgacctaccggggccacggagtgctgcacaccctcatccgctgccggttctcccccattcatagcactggccagcagttcatctacagtggctgctccactggcaaagtggttgtgtacgaccttctaagtggccacattgtgaagaagctgaccaaccacaaggcctgtgtgcgtgacgtcagttggcacccctttgaagagaagattgtcagcagttcggtgaggttgcaagggttgagggtgctggcacatgtctggggcttggacttgggtgggggcagcacatcctgactgcttgccaccctctgccctgcagtgggacgggaacctgcgtctgtggcagtaccgccaggctgagtacttccaggatgacatgccagaatctgaggaatgtgccagcgcccctgccccagtgccccaatcctctacacccttttcctcaccccagtagatccaacctccagccccatatagggtgaacctcttgataagctctctgcctcctcctccctttctcccttgtggggaatgtttggaggaatcactggcatttgatggggaataacataagcctgggctctgagcctcagctgagccctggaagattctccccatggggcagagtggtctccttacgtgctcacacccagtcagcttgggtccctatctctggccagagtttggcaggactgccattatctggggtgtggcctctgccagcaagagaagtgtcctgggtgtttttaatcatgtttgaatgttaggggttggatcctagagtagatgcctgaggccacatctgaacagacctgtcagccaggcctgccaggtcttcacgttgaggattcaactggccaatcacaggacaggtgtcctggcctttcttcctgaggtctctaggggaggggcatgggtaagggtgtttcctcagcaccctcctggggtggggattatgtctgctgtcatgtctgggtctttagggtaggacaggctgtggtatgagaggcaggagtctccacaaggcttcatgtggccccttatagggcaggccctgccctctgggaaggtcccttcatgctggaggcacacagctttaaggaagtaggttgaagtaggactccttcgtcctctcactggctttggctccctcaataaactgtgtgggaacctggctcagtgtctgtctctctctctcac

SEQ ID NO: 422568 - DNA, 3245 bp, Homo sapiens
gattgtcttaaaaaattgtcagaccggataaagggaggtctaaaaggggaccgtcccaagagcaaggcttccaaaagctaagcccggaaggacggcacctcgcgcattctcccgcctacctatcaatcatcgtgctccgctgtccagttggctggccaagggggcggggccgtcgtgtgacgtttgcagcccgccggccaggaagccgcgagatgcgtgacgagcgaagcgcgtgacggaggagcggttggccaacgcagtggcggcagtcggtgtaaacaaggcctcgcgccgctgcgggtcctgcgaccgctcctggctggtgggtggtctcgcgtggggcggttaccgccggcttcagtgggaggtgcttctcggcttcctccccctcatggcgtacacacccccggcgcaccacgtgggcgtgaggcgaggaaggaggggtgttaggccaaattctattttcattggctgtcactgctgccggcctttgtaagggggcgctctgattggtcgataaggtgggggcgtcgagggtctttgagtcctaaggcttctaattggttagatgagataagctagtgaagcgctttcttccgagagggatttcgattggtcggtcagagaggttacctggaaatccaacaccgcccaacacccctcccgctccccagtccggggacttcgataggattggagaaggtttgtgttcccgacgccttggtagttggcataggctaaagaaaagggatctcagccccgaggaagggtcaccctcctagagatagctactaccccgtctcaggagaccctggtatttctagagcacgctttgctttcaccaaacccaaggaggtgacaggaggagcccccgcacaggacctaagaatgctgtgaccagaagatgggatcgcggaacagcagcagtgcaggatccgggtccggagacccctccgagggcttgccccgaagaggggctggcctgcgtcggagtgaggaagaggaagaagaggatgaagatgtggatctggcccaggtactggcctatctcctccgcagaggccaagtgaggttggtgcagggaggaggtgcagcaaatttacaattcattcaggccctcttggactcagaggaagagaatgacagagcttgggatggtcgtcttggggatcgatacaacccacctgtggatgctacccctgacacccgggagctggaattcaatgagatcaagacacaagtggaactggccacagggcagctggggcttaggcgggccgcccagaagcacagctttcctcgaatgttgcaccagagagaacggggcctctgccatcggggaagcttctcccttggagaacagtctcgagtgatatctcacttcttgcccaatgatctgggcttcactgatagctactctcagaaggctttctgtggcatctacagcaaagatggtcaaatattcatgtctgcttgccaagaccagacaatccgactctatgactgccgatatggccgtttccgtaaattcaagagcatcaaggcccgcgacgtaggctggagcgtcttggatgtggccttcacccctgatgggaaccacttcctctactctagctggtctgattacattcatatctgcaatatctatggtgagggagatacacacactgccctggatctcaggccagatgagcgtcgctttgctgtcttctccattgctgtctcctcagatggacgagaagtactaggaggggccaatgatggctgcctgtatgtctttgaccgagaacagaaccggcgcacccttcagattgagtcccatgaggatgatgtgaatgcagtggcctttgctgatataagctcccaaatcctgttctctgggggagatgatgccatctgcaaagtgtgggatcgacgcaccatgcgggaggatgaccccaagcctgtgggtgcactggctggacaccaggatggcatcaccttcattgacagcaagggtgatgcccggtatctgatctccaactctaaagaccagaccatcaaactctgggatatccgacgcttttccagccgggaaggcatggaagcttcacgccaggctgccacacagcaaaactgggactatcggtggcagcaagtgcccaaaaaagccggggccacggagtgctgcacaccctcatccgctgccggttctcccccattcatagcactggccagcagttcatctacagtggctgctccactggcaaagtggttgtgtacgaccttctaagtggccacattgtgaagaagctgaccaaccacaaggcctgtgtgcgtgacgtcagttggcacccctttgaagagaagattgtcagcagttcgtgggacgggaacctgcgtctgtggcagtaccgccaggctgagtacttccaggatgacatgccagaatctgaggaatgtgccagcgcccctgccccagtgccccaatcctctacacccttttcctcaccccagtagatccaacctccagccccatatagggtgaacctcttgataagctctctgcctcctcctccctttctcccttgtggggaatgtttggaggaatcactggcatttgatggggaataacataagcctgggctctgagcctcagctgagccctggaagattctccccatggggcagagtggtctccttacgtgctcacacccagtcagcttgggtccctatctctggccagagtttggcaggactgccattatctggggtgtggcctctgccagcaagagaagtgtcctgggtgtttttaatcatgtttgaatgttaggggttggatcctagagtagatgcctgaggccacatctgaacagacctgtcagccaggcctgccaggtcttcacgttgaggattcaactggccaatcacaggacaggtgtcctggcctttcttcctgaggtctctaggggaggggcatgggtaagggtgtttcctcagcaccctcctggggtggggattatgtctgctgtcatgtctgggtctttagggtaggacaggctgtggtatgagaggcaggagtctccacaaggcttcatgtggccccttatagggcaggccctgccctctgggaaggtcccttcatgctggaggcacacagctttaaggaagtaggttgaagtaggactccttcgtcctctcactggctttggctccctcaataaactgtgtgggaacctggctcagtgtctgtctctctctctcac

SEQ ID NO: 422569 - DNA, 3267 bp, Homo sapiens
gattgtcttaaaaaattgtcagaccggataaagggaggtctaaaaggggaccgtcccaagagcaaggcttccaaaagctaagcccggaaggacggcacctcgcgcattctcccgcctacctatcaatcatcgtgctccgctgtccagttggctggccaagggggcggggccgtcgtgtgacgtttgcagcccgccggccaggaagccgcgagatgcgtgacgagcgaagcgcgtgacggaggagcggttggccaacgcagtggcggcagtcggtgtaaacaaggcctcgcgccgctgcgggtcctgcgaccgctcctggctggtgggtggtctcgcgtggggcggttaccgccggcttcagtgggaggtgcttctcggcttcctccccctcatggcgtacacacccccggcgcaccacgtgggcgtgaggcgaggaaggaggggtgttaggccaaattctattttcattggctgtcactgctgccggcctttgtaagggggcgctctgattggtcgataaggtgggggcgtcgagggtctttgagtcctaaggcttctaattggttagatgagataagctagtgaagcgctttcttccgagagggatttcgattggtcggtcagagaggttacctggaaatccaacaccgcccaacacccctcccgctccccagtccggggacttcgataggattggagaaggtttgtgttcccgacgccttggtagttggcataggctaaagaaaagggatctcagccccgaggaagggtcaccctcctagagatagctactaccccgtctcaggagaccctggtatttctagagcacgctttgctttcaccaaacccaaggaggtgacaggaggagcccccgcacaggacctaagaatgctgtgaccagaagatgggatcgcggaacagcagcagtgcaggatccgggtccggagacccctccgagggcttgccccgaagaggggctggcctgcgtcggagtgaggaagaggaagaagaggatgaagatgtggatctggcccaggtactggcctatctcctccgcagaggccaagtgaggttggtgcagggaggaggtgcagcaaatttacaattcattcaggccctcttggactcagaggaagagaatgacagagcttgggatggtcgtcttggggatcgatacaacccacctgtggatgctacccctgacacccgggagctggaattcaatgagatcaagacacaagtggaactggccacagggcagctggggcttaggcgggccgcccagaagcacagctttcctcgaatgttgcaccagagagaacggggcctctgccatcggggaagcttctcccttggagaacagtctcgagtgatatctcacttcttgcccaatgatctgggcttcactgatagctactctcagaaggctttctgtggcatctacagcaaagatggtcaaatattcatgtctgcttgccaagaccagacaatccgactctatgactgccgatatggccgtttccgtaaattcaagagcatcaaggcccgcgacgtaggctggagcgtcttggatgtggccttcacccctgatgggaaccacttcctctactctagctggtctgattacattcatatctgcaatatctatggtgagggagatacacacactgccctggatctcaggccagatgagcgtcgctttgctgtcttctccattgctgtctcctcagatggacgagaagtactaggaggggccaatgatggctgcctgtatgtctttgaccgagaacagaaccggcgcacccttcagattgagtcccatgaggatgatgtgaatgcagtggcctttgctgatataagctcccaaatcctgttctctgggggagatgatgccatctgcaaagtgtgggatcgacgcaccatgcgggaggatgaccccaagcctgtgggtgcactggctggacaccaggatggcatcaccttcattgacagcaagggtgatgcccggtatctgatctccaactctaaagaccagaccatcaaactctgggatatccgacgcttttccagccgggaaggcatggaagcttcacgccaggctgccacacagcaaaactgggactatcggtggcagcaagtgcccaaaaaagcctggcggaagctgaagctcccaggggacagctccttgatgacctaccggggccacggagtgctgcacaccctcatccgctgccggttctcccccattcatagcactggccagcagttcatctacagtggctgctccactggcaaagtggttgtgtacgaccttctaagtggccacattgtgaagaagctgaccaaccacaaggcctgtgtgcgtgacgtcagttggcacccctttgaagagaagattgtcagcagttcgtgggacgggaacctgcgtctgtggcagtaccgccaggctgagtacttccaggatgacatgccagaatctgaggaatgtgccagcgcccctgccccagtgccccaatcctctacacccttttcctcaccccagtagatccaacctccagccccatatagggtgaacctcttgataagctctctgcctcctcctccctttctcccttgtggggaatgtttggaggaatcactggcatttgatggggaataacataagcctgggctctgagcctcagctgagccctggaagattctccccatggggcagagtggtctccttacgtgctcacacccagtcagcttgggtccctatctctggccagagtttggcaggactgccattatctggggtgtggcctctgccagcaagagaagtgtcctgggtgtttttaatcatgtttgaatgttaggggttggatcctagagtagatgcctgaggccacatctgaacagacctgtcagccaggcctgccaggtcttcacgttgaggattcaactggccaatcacaggacaggtgtcctggcctttcttcctgaggtctctaggggaggggcatgggtaagggtgtttcctcagcaccctcctggggtggggattatgtctgctgtcatgtctgggtctttagggtaggacaggctgtggtatgagaggcaggagtctccacaaggcttcatgtggccccttatagggcaggccctgccctctgggaaggtcccttcatgctggaggcacacagctttaaggaagtagcaagcactgcgccgccttcagcgtctcggcggcgtacgctgcctggatcagactgtctgggggaagcg

SEQ ID NO: 422570 - DNA, 1578 bp, Homo sapiens
  misc_feature (24)..(25): n is a, c, g, or t
cccgggctgcaggaattggcacgnngaagtactatgaggggccaatgatggctgcctgtatgtctttgaccgagaacagaaccggcgcacccttcagattgagtcccatgaggatgatgtgaatgcagtggcctttgctgatataagctcccaaatcctgttctctgggggagatgatgccatctgcaaagtgtgggatcgacgcaccatgcgggaggatgaccccaagcctgtgggtgcactggctggacaccaggatggcatcaccttcattgacagcaagggtgatgcccggtatctgatctccaactctaaagaccagaccatcaaactctgggatatccgacgcttttccagccgggaaggcatggaagcttcacgccaggctgccacacagcaaaactgggactatcggtggcagcaagtgcccaaaaaagcctggcggaagctgaagctcccaggggacagctccttgatgacctaccggggccacggagtgctgcacaccctcatccgctgccggttctcccccattcatagcactggccagcagttcatctacagtggctgctccactggcaaagtggttgtgtacgaccttctaagtggccacattgtgaagaagctgaccaaccacaaggcctgtgtgcgtgacgtcagttggcacccctttgaagagaagattgtcagcagttcgtgggacgggaacctgcgtctgtggcagtaccgccaggctgagtacttccaggatgacatgccagaatctgaggaatgtgccagcgcccctgccccagtgccccaatcctctacacccttttcctcaccccagtagatccaacctccagccccatatagggtgaacctcttgataagctctctgcctcctcctccctttctcccttgtggggaatgtttggaggaatcactggcatttgatggggaataacataagcctgggctctgagcctcagctgagccctggaagattctccccatggggcagagtggtctccttacgtgctcacacccagtcagcttgggtccctatctctggccagagtttggcaggactgccattatctggggtgtggcctctgccagcaagagaagtgtcctgggtgtttttaatcatgtttgaatgttaggggttggatcctagagtagatgcctgaggccacatctgaacagacctgtcagccaggcctgccaggtcttcacgttgaggattcaactggccaatcacaggacaggtgtcctggcctttcttcctgaggtctctaggggaggggcatgggtaagggtgtttcctcagcaccctcctggggtggggattatgtctgctgtcatgtctgggtctttagggtaggacaggctgtggtatgagaggcaggagtctccacaaggcttcatgtggccccttatagggcaggccctgccctctgggaaggtcccttcatgctggaggcacacagctttaaggaagtaggttgaagtaggactccttcgtcctctcactggctttggctccctcaataaactgtgtgggaacctggctcagtgtctgtctctctctctcac

SEQ ID NO: 422571 - DNA, 2908 bp, Homo sapiens
gattgtcttaaaaaattgtcagaccggataaagggaggtctaaaaggggaccgtcccaagagcaaggcttccaaaagctaagcccggaaggacggcacctcgcgcattctcccgcctacctatcaatcatcgtgctccgctgtccagttggctggccaagggggcggggccgtcgtgtgacgtttgcagcccgccggccaggaagccgcgagatgcgtgacgagcgaagcgcgtgacggaggagcggttggccaacgcagtggcggcagtcggtgtaaacaaggcctcgcgccgctgcgggtcctgcgaccgctcctggctggtgggtggtctcgcgtggggcggttaccgccggcttcagtgggaggtgcttctcggcttcctccccctcatggcgtacacacccccggcgcaccacgtgggcgtgaggcgaggaaggaggggtgttaggccaaattctattttcattggctgtcactgctgccggcctttgtaagggggcgctctgattggtcgataaggtgggggcgtcgagggtctttgagtcctaaggcttctaattggttagatgagataagctagtgaagcgctttcttccgagagggatttcgattggtcggtcagagaggttacctggaaatccaacaccgcccaacacccctcccgctccccagtccggggacttcgataggattggagaaggtttgtgttcccgacgccttggtagttggcataggctaaagaaaagggatctcagccccgaggaagggtcaccctcctagagatagctactaccccgtctcaggagaccctggtatttctagagcacgctttgctttcaccaaacccaaggaggtgacaggaggagcccccgcacaggacctaagaatgctgtgaccagaagatgggatcgcggaacagcagcagtgcaggatccgggtccggagacccctccgagggcttgccccgaagaggggctggcctgcgtcggagtgaggaagaggaagaagaggatgaagatgtggatctggcccaggtactggcctatctcctccgcagaggccaagtgaggttggtgcagggaggaggtgcagcaaatttacaattcattcaggccctcttggactcagaggaagagaatgacagagcttgggatggtcgtcttggggatcgatacaacccacctgtggatgctacccctgacacccgggagctggaattcaatgagatcaagacacaagtggaactggccacagggcagctggggcttaggcgggccgcccagaagcacagctttcctcgaatgttgcaccagagagaacggggcctctgccatcggggaagcttctcccttggagaacagtctcgagtgatatctcacttcttgcccaatgatctgggcttcactgatagctactctcagaaggctttctgtggcatctacagcaaagatggtcaaatattcatgtctgcttgccaagaccagacaatccgactctatgactgccgatatggccgtttccgtaaattcaagagcatcaaggcccgcgacgtaggctggagcgtcttggatgtggccttcacccctgatgggaaccacttcctctactctagctggtctgattacattcatatctgcaatatctatggtgagggagatacacacactgccctggatctcaggccagatgagcgtcgctttgctgtcttctccattgctgtctcctcagatggacgagaagtactaggaggggccaatgatggctgcctgtatgtctttgaccgagaacagaaccggcgcacccttcagattgagtcccatgaggatgatgtgaatgcagtggcctttgctgatataagctcccaaatcctgttctctgggggagatgatgccatctgcaaagtgtgggatcgacgcaccatgcgggaggatgaccccaagcctgtgggtgcactggctggacaccaggatggcatcaccttcattgacagcaagggtgatgcccggtatctgatctccaactctaaagaccagaccatcaaactctgggatatccgacgcttttccagccgggaaggcatggaagcttcacgccaggctgccacacagcaaaactgggactatcggtggcagcaagtgcccaaaaaagcctggcggaagctgaagctcccaggggacagctccttgatgacctaccggggccacggagtgctgcacaccctcatccgctgccggttctcccccattcatagcactggccagcagttcatctacagtggctgctccactggcaaagtggttgtgtacgaccttctaagtggccacattgtgaagaagctgaccaaccacaaggcctgtgtgcgtgacgtcagttggcacccctttgaagagaagattgtcagcagttcgtgggacgggaacctgcgtctgtggcagtaccgccaggctgagtacttccaggatgacatgccagaatctgaggaatgtgccagcgcccctgccccagtgccccaatcctctacacccttttcctcaccccagtagatccaacctccagccccatatagggtgaacctcttgataagctctctgcctcctcctccctttctcccttgtggggaatgtttggaggaatcactggcatttgatggggaataacataagcctgggctctgagcctcagctgagcctgtctgtctctctctctcactctctgttgggaggctgaagagtatgacccatagcagtggagctagactttaggtagggttattattttgatcttaaaagcatcctttgcaaaataagcaacaaaaattcataattacttgtcaaagctacaaactaatggcttatgtcaagtcctgttaatctcggcttgggatggcctcctccctgcctgagaag

SEQ ID NO: 422572 - DNA, 1455 bp, Homo sapiens
aaggagcctaaggcagtgctgtccctagagagacactcacagtcccatgacaaaagaaagatgcaccctgtccagataaggtgcagcaggtgcacacacccccagacagctcattgttcacttttgtggtgccttccatatcttataagggccagacatacccacaccactaaaccataccctcaacccaaggtatggaaaggaacagggatagaagcagaaataacacagtcttctggtgtgggctttgctcccatgggaacatgggaagttgcctgagaggcaggtcagtggtgctactcatggggaggtgagggatagtttagatgtcttgtggtggtccctctccactcttgcctgtcctggacagtgtacgaccttctaagtggccacattgtgaagaagctgaccaaccacaaggcctgtgtgcgtgacgtcagttggcacccctttgaagagaagattgtcagcagttcggtgaggttgcaagggttgagggtgctggcacatgtctggggcttggacttgggtgggggcagcacatcctgactgcttgccaccctctgccctgcagtgggacgggaacctgcgtctgtggcagtaccgccaggctgagtacttccaggatgacatgccagaatctgaggaatgtgccagcgcccctgccccagtgccccaatcctctacacccttttcctcaccccagtagatccaacctccagccccatatagggtgaacctcttgataagctctctgcctcctcctccctttctcccttgtggggaatgtttggaggaatcactggcatttgatggggaataacataagcctgggctctgagcctcagctgagccctggaagattctccccatggggcagagtggtctccttacgtgctcacacccagtcagcttgggtccctatctctggccagagtttggcaggactgccattatctggggtgtggcctctgccagcaagagaagtgtcctgggtgtttttaatcatgtttgaatgttaggggttggatcctagagtagatgcctgaggccacatctgaacagacctgtcagccaggcctgccaggtcttcacgttgaggattcaactggccaatcacaggacaggtgtcctggcctttcttcctgaggtctctaggggaggggcatgggtaagggtgtttcctcagcaccctcctggggtggggattatgtctgctgtcatgtctgggtctttagggtaggacaggctgtggtatgagaggcaggagtctccacaaggcttcatgtggccccttatagggcaggccctgccctctgggaaggtcccttcatgctggaggcacacagctttaaggaagtaggttgaagtaggactccttcgtcctctcactggctttggctccctcaataaactgtgtgggaacctggctcagtgtctgtctctctctctcac

SEQ ID NO: 422573 - DNA, 2584 bp, Homo sapiens
gattgtcttaaaaaattgtcagaccggataaagggaggtctaaaaggggaccgtcccaagagcaaggcttccaaaagctaagcccggaaggacggcacctcgcgcattctcccgcctacctatcaatcatcgtgctccgctgtccagttggctggccaagggggcggggccgtcgtgtgacgtttgcagcccgccggccaggaagccgcgagatgcgtgacgagcgaagcgcgtgacggaggagcggttggccaacgcagtggcggcagtcggtgtaaacaaggcctcgcgccgctgcgggtcctgcgaccgctcctggctggtgggtggtctcgcgtggggcggttaccgccggcttcagtgggaggtgcttctcggcttcctccccctcatggcgtacacacccccggcgcaccacgtgggcgtgaggcgaggaaggaggggtgttaggccaaattctattttcattggctgtcactgctgccggcctttgtaagggggcgctctgattggtcgataaggtgggggcgtcgagggtctttgagtcctaaggcttctaattggttagatgagataagctagtgaagcgctttcttccgagagggatttcgattggtcggtcagagaggttacctggaaatccaacaccgcccaacacccctcccgctccccagtccggggacttcgataggattggagaaggtttgtgttcccgacgccttggtagttggcataggctaaagaaaagggatctcagccccgaggaagggtcaccctcctagagatagctactaccccgtctcaggagaccctggtatttctagagcacgctttgctttcaccaaacccaaggaggtgacaggaggagcccccgcacaggacctaagaatgctgtgaccagaagatgggatcgcggaacagcagcagtgcaggatccgggtccggagacccctccgagggcttgccccgaagaggggctggcctgcgtcggagtgaggaagaggaagaagaggatgaagatgtggatctggcccaggtactggcctatctcctccgcagaggccaagtgaggttggtgcagggaggaggtgcagcaaatttacaattcattcaggccctcttggactcagaggaagagaatgacagagcttgggatggtcgtcttggggatcgatacaacccacctgtggatgctacccctgacacccgggagctggaattcaatgagatcaagacacaagtggaactggccacagggcagctggggcttaggcgggccgcccagaagcacagctttcctcgaatgttgcaccagagagaacggggcctctgccatcggggaagcttctcccttggagaacagtctcgagtgatatctcacttcttgcccaatgatctgggcttcactgatagctactctcagaaggctttctgtggcatctacagcaaagatggtcaaatattcatgtctgcttgccaagaccagacaatccgactctatgactgccgatatggccgtttccgtaaattcaagagcatcaaggcccgcgacgtaggctggagcgtcttggatgtggccttcacccctgatgggaaccacttcctctactctagctggtctgattacattcatatctgcaatatctatggtgagggagatacacacactgccctggatctcaggccagatgagcgtcgctttgctgtcttctccattgctgtctcctcagatggacgagaagtactaggaggggccaatgatggctgcctgtatgtctttgaccgagaacagaaccggcgcacccttcagattgagtcccatgaggatgatgtgaatgcagtggcctttgctgatataagctcccaaatcctgttctctgggggagatgatgccatctgcaaagtgtgggatcgacgcaccatgcgggaggatgaccccaagcctgtgggtgcactggctggacaccaggatggcatcaccttcattgacagcaagggtgatgcccggtatctgatctccaactctaaagaccagaccatcaaactctgggatatccgacgcttttccagccgggaaggcatggaagcttcacgccaggctgccacacagcaaaactgggactatcggtggcagcaagtgcccaaaaaagcctggcggaagctgaagctcccaggggacagctccttgatgacctactgtcagccaggcctgccaggtcttcacgttgaggattcaactggccaatcacaggacaggtgtcctggcctttcttcctgaggtctctaggggaggggcatgggtaagggtgtttcctcagcaccctcctggggtggggattatgtctgctgtcatgtctgggtctttagggtaggacaggctgtggtatgagaggcaggagtctccacaaggcttcatgtggccccttatagggcaggccctgccctctgggaaggtcccttcatgctggaggcacacagctttaaggaagtaggttgaagtaggactccttcgtcctctcactggctttggctccctcaataaactgtgtgggaacctggctcagtgtctgtctctctctctcac

SEQ ID NO: 422574 - DNA, 2938 bp, Homo sapiens
gattgtcttaaaaaattgtcagaccggataaagggaggtctaaaaggggaccgtcccaagagcaaggcttccaaaagctaagcccggaaggacggcacctcgcgcattctcccgcctacctatcaatcatcgtgctccgctgtccagttggctggccaagggggcggggccgtcgtgtgacgtttgcagcccgccggccaggaagccgcgagatgcgtgacgagcgaagcgcgtgacggaggagcggttggccaacgcagtggcggcagtcggtgtaaacaaggcctcgcgccgctgcgggtcctgcgaccgctcctggctggtgggtggtctcgcgtggggcggttaccgccggcttcagtgggaggtgcttctcggcttcctccccctcatggcgtacacacccccggcgcaccacgtgggcgtgaggcgaggaaggaggggtgttaggccaaattctattttcattggctgtcactgctgccggcctttgtaagggggcgctctgattggtcgataaggtgggggcgtcgagggtctttgagtcctaaggcttctaattggttagatgagataagctagtgaagcgctttcttccgagagggatttcgattggtcggtcagagaggttacctggaaatccaacaccgcccaacacccctcccgctccccagtccggggacttcgataggattggagaaggtttgtgttcccgacgccttggtagttggcataggctaaagaaaagggatctcagccccgaggaagggtcaccctcctagagatagctactaccccgtctcaggagaccctggtatttctagagcacgctttgctttcaccaaacccaaggaggtgacaggaggagcccccgcacaggacctaagaatgctgtgaccagaagatgggatcgcggaacagcagcagtgcaggatccgggtccggagacccctccgagggcttgccccgaagaggggctggcctgcgtcggagtgaggaagaggaagaagaggatgaagatgtggatctggcccaggtactggcctatctcctccgcagaggccaagtgaggttggtgcagggaggaggtgcagcaaatttacaattcattcaggccctcttggactcagaggaagagaatgacagagcttgggatggtcgtcttggggatcgatacaacccacctgtggatgctacccctgacacccgggagctggaattcaatgagatcaagacacaagtggaactggccacagggcagctggggcttaggcgggccgcccagaagcacagctttcctcgaatgttgcaccagagagaacggggcctctgccatcggggaagcttctcccttggagaacagtctcgagtgatatctcacttcttgcccaatgatctgggcttcactgatagctactctcagaaggctttctgtggcatctacagcaaagatggtcaaatattcatgtctgcttgccaagaccagacaatccgactctatgactgccgatatggccgtttccgtaaattcaagagcatcaaggcccgcgacgtaggctggagcgtcttggatgtggccttcacccctgatgggaaccacttcctctactctagctggtctgattacattcatatctgcaatatctatggtgagggagatacacacactgccctggatctcaggccagatgagcgtcgctttgctgtcttctccattgctgtctcctcagatggacgagaagtactaggaggggccaatgatggctgcctgtatgtctttgaccgagaacagaaccggcgcacccttcagattgagtcccatgaggatgatgtgaatgcagtggcctttgctgatataagctcccaaatcctgttctctgggggagatgatgccatctgcaaagtgtgggatcgacgcaccatgcgggaggatgaccccaagcctgtgggtgcactggctggacaccaggatggcatcaccttcattgacagcaagggtgatgcccggtatctgatctccaactctaaagaccagaccatcaaactctgggatatccgacgcttttccagccgggaaggcatggaagcttcacgccaggctgccacacagcaaaactgggactatcggtggcagcaagtgcccaaaaaagcctggcggaagctgaagctcccaggggacagctccttgatgacctaccggggccacggagtgctgcacaccctcatccgctgccggttctcccccattcatagcactggccagcagttcatctacagtggctgctccactggcaaagtggttggtaaggattgtgtcagaacagggggcctcaggaagggcaggaatgactccttgccattccacctataacgactagtgaccaccttaaaaagcccagtgacagctacaggtaaaatcaaacttagcttggaggcttaaacagagaaatagaaaccattctatttttcagtgttttaaattaagaaaaggaacatagaattctagacagtaaatataatagattgccaaaaatatagttggttctgtttttcagccagtcaagaaagaggttgcagatgaaaggtaggagggaacagagacaaaatgacacaggaagatggtagcaagtagttaagggacatgcagtcgctaaagcagaaaagcatagaaagaaataagctggctgcagtggctcatgcctgtaaccccagggctttgggaggccaatgagggcagatcacttgagcccaggagtttgagaccagccagggcaacatggagaaaccttgtctctacaaaaaatggctggacatggtggcacaggcctgtagtcccagctacttgggaggctagggtgggagaatcacctgagcccgagactgcagtgagccatgattgtgccaccgcacttcagcctgggtgacagagtgagaaact

SEQ ID NO: 422575 - DNA, 656 bp, Homo sapiens
  misc_feature (42)..(42): n is a, c, g, or t
tcacactgccccatggggagaatcttccaggctcagctgagncacgtaaggagaccctggaagattctccccatggggcagagtggtctccttacgtgctcacacccagtcagcttgggtccctatctctggccagagtttggcaggactgccattatctggggtgtggcctctgccagcaagagaagtgtcctgggtgtttttaatcatgtttgaatgttaggggttggatcctagagtagatgcctgaggccacatctgaacagacctgtcagccaggcctgccaggtcttcacgttgaggattcaactggccaatcacaggacaggtgtcctggcctttcttcctgaggtctctaggggaggggcatgggtaagggtgtttcctcagcaccctcctggggtggggattatgtctgctgtcatgtctgggtctttagggtaggacaggctgtggtatgagaggcaggagtctccacaaggcttcatgtggccccttatagggcaggccctgccctctgggaaggtcccttcatgctggaggcacacagctttaaggaagtaggttgaagtaggactccttcgtcctctcactggctttggctccctcaataaactgtgtgggaacctggctcagtgtctgtctctctctctcac

SEQ ID NO: 422576 - DNA, 2346 bp, Homo sapiens
gattgtcttaaaaaattgtcagaccggataaagggaggtctaaaaggggaccgtcccaagagcaaggcttccaaaagctaagcccggaaggacggcacctcgcgcattctcccgcctacctatcaatcatcgtgctccgctgtccagttggctggccaagggggcggggccgtcgtgtgacgtttgcagcccgccggccaggaagccgcgagatgcgtgacgagcgaagcgcgtgacggaggagcggttggccaacgcagtggcggcagtcggtgtaaacaaggcctcgcgccgctgcgggtcctgcgaccgctcctggctggtgggtggtctcgcgtggggcggttaccgccggcttcagtgggaggtgcttctcggcttcctccccctcatggcgtacacacccccggcgcaccacgtgggcgtgaggcgaggaaggaggggtgttaggccaaattctattttcattggctgtcactgctgccggcctttgtaagggggcgctctgattggtcgataaggtgggggcgtcgagggtctttgagtcctaaggcttctaattggttagatgagataagctagtgaagcgctttcttccgagagggatttcgattggtcggtcagagaggttacctggaaatccaacaccgcccaacacccctcccgctccccagtccggggacttcgataggattggagaaggtttgtgttcccgacgccttggtagttggcataggctaaagaaaagggatctcagccccgaggaagggtcaccctcctagagatagctactaccccgtctcaggagaccctggtatttctagagcacgctttgctttcaccaaacccaaggaggtgacaggaggagcccccgcacaggacctaagaatgctgtgaccagaagatgggatcgcggaacagcagcagtgcaggatccgggtccggagacccctccgagggcttgccccgaagaggggctggcctgcgtcggagtgaggaagaggaagaagaggatgaagatgtggatctggcccaggtactggcctatctcctccgcagaggccaagtgaggttggtgcagggaggaggtgcagcaaatttacaattcattcaggccctcttggactcagaggaagagaatgacagagcttgggatggtcgtcttggggatcgatacaacccacctgtggatgctacccctgacacccgggagctggaattcaatgagatcaagacacaagtggaactggccacagggcagctggggcttaggcgggccgcccagaagcacagctttcctcgaatgttgcaccagagagaacggggcctctgccatcggggaagcttctcccttggagaacagtctcgagtgatatctcacttcttgcccaatgatctgggcttcactgatagctactctcagaaggctttctgtggcatctacagcaaagatggtcaaatattcatgtctgcttgccaagaccagacaatccgactctatgactgccgatatggccgtttccgtaaattcaagagcatcaaggcccgcgacgtaggctggagcgtcttggatgtggccttcacccctgatgggaaccacttcctctactctagctggtctgattacattcatatctgcaatatctatggtgagggagatacacacactgccctggatctcaggccagatgagcgtcgctttgctgtcttctccattgctgtctcctcagatggacgagaagtactaggaggggccaatgatggctgcctgtatgtctttgaccgagaacagaaccggcgcacccttcagattgagtcccatgaggatgatgtgaatgcagtggcctttgctgatataagctcccaaatcctgttctctgggggagatgatgccatctgcaaagtgtgggatcgacgcaccatgcgggaggatgaccccaagcctgtgggtgcactggctggacaccaggatggcatcaccttcattgacagcaaggtgggccagaagtcaggactgtacagccaggccgctaaggttctagttgcccaggagggcatgaaagcggactggtgtgggaatttgacaagctccttattaaccaaggtttgtaagagttggagtttagggaaggggctcaagccagggaacatgaattccatctgtactcaccagtcctcaaggagcagggcagggctttccgtacaagaaaaatggaagaccggtcaggtacagcggctcacacctgtaatcctagcactttgggaggctgaggtgggaggatcacttgagctcaggcgttccagaccagcctgtgaaacctagcgagacctcatctctatttattt

SEQ ID NO: 422577 - DNA, 1941 bp, Homo sapiens
gattgtcttaaaaaattgtcagaccggataaagggaggtctaaaaggggaccgtcccaagagcaaggcttccaaaagctaagcccggaaggacggcacctcgcgcattctcccgcctacctatcaatcatcgtgctccgctgtccagttggctggccaagggggcggggccgtcgtgtgacgtttgcagcccgccggccaggaagccgcgagatgcgtgacgagcgaagcgcgtgacggaggagcggttggccaacgcagtggcggcagtcggtgtaaacaaggcctcgcgccgctgcgggtcctgcgaccgctcctggctggtgggtggtctcgcgtggggcggttaccgccggcttcagtgggaggtgcttctcggcttcctccccctcatggcgtacacacccccggcgcaccacgtgggcgtgaggcgaggaaggaggggtgttaggccaaattctattttcattggctgtcactgctgccggcctttgtaagggggcgctctgattggtcgataaggtgggggcgtcgagggtctttgagtcctaaggcttctaattggttagatgagataagctagtgaagcgctttcttccgagagggatttcgattggtcggtcagagaggttacctggaaatccaacaccgcccaacacccctcccgctccccagtccggggacttcgataggattggagaaggtttgtgttcccgacgccttggtagttggcataggctaaagaaaagggatctcagccccgaggaagggtcaccctcctagagatagctactaccccgtctcaggagaccctggtatttctagagcacgctttgctttcaccaaacccaaggaggtgacaggaggagcccccgcacaggacctaagaatgctgtgaccagaagatgggatcgcggaacagcagcagtgcaggatccgggtccggagacccctccgagggcttgccccgaagaggggctggcctgcgtcggagtgaggaagaggaagaagaggatgaagatgtggatctggcccaggtactggcctatctcctccgcagaggccaagtgaggttggtgcagggaggaggtgcagcaaatttacaattcattcaggccctcttggactcagaggaagagaatgacagagcttgggatggtcgtcttggggatcgatacaacccacctgtggatgctacccctgacacccgggagctggaattcaatgagatcaagacacaagtggaactggccacagggcagctggggcttaggcgggccgcccagaagcacagctttcctcgaatgttgcaccagagagaacggggcctctgccatcggggaagcttctcccttggagaacagtctcgagtgatatctcacttcttgcccaatgatctgggcttcactgatagctactctcagaaggctttctgtggcatctacagcaaagatggtcaaatattcatgtctgcttgccaagaccagacaatccgactctatgactgccgatatggccgtttccgtaaattcaagagcatcaaggcccgcgacgtaggctggagcgtcttggatgtggccttcacccctgatgggaaccacttcctctactctagctggtctgattacattcatatctgcaatatctatggtgagggagatacacacactgccctggatctcaggccagatgagcgtcgctttgctgtcttctccattgctgtctcctcagatggacgagaagtactaggagggtaagtgcttgtggggtatgtttccctcaataacaagatgggggttctgccagagatgagttctgctgttacacagatggcactggcagctgcagagaacaaccagaccttctcccaaggtcaggatttacaagttgcttcaccccttgctctccatttccccagcacgagattggaggtgtcaagcct

SEQ ID NO: 422578 - DNA, 1358 bp, Homo sapiens
gattgtcttaaaaaattgtcagaccggataaagggaggtctaaaaggggaccgtcccaagagcaaggcttccaaaagctaagcccggaaggacggcacctcgcgcattctcccgcctacctatcaatcatcgtgctccgctgtccagttggctggccaagggggcggggccgtcgtgtgacgtttgcagcccgccggccaggaagccgcgagatgcgtgacgagcgaagcgcgtgacggaggagcggttggccaacgcagtggcggcagtcggtgtaaacaaggcctcgcgccgctgcgggtcctgcgaccgctcctggctggtgggtggtctcgcgtggggcggttaccgccggcttcagtgggaggtgcttctcggcttcctccccctcatggcgtacacacccccggcgcaccacgtgggcgtgaggcgaggaaggaggggtgttaggccaaattctattttcattggctgtcactgctgccggcctttgtaagggggcgctctgattggtcgataaggtgggggcgtcgagggtctttgagtcctaaggcttctaattggttagatgagataagctagtgaagcgctttcttccgagagggatttcgattggtcggtcagagaggttacctggaaatccaacaccgcccaacacccctcccgctccccagtccggggacttcgataggattggagaaggtttgtgttcccgacgccttggtagttggcataggctaaagaaaagggatctcagccccgaggaagggtcaccctcctagagatagctactaccccgtctcaggagaccctggtatttctagagcacgctttgctttcaccaaacccaaggaggtgacaggaggagcccccgcacaggacctaagaatgctgtgaccagaagatgggatcgcggaacagcagcagtgcaggatccggagtagatgcctgaggccacatctgaacagacctgtcagccaggcctgccaggtcttcacgttgaggattcaactggccaatcacaggacaggtgtcctggcctttcttcctgaggtctctaggggaggggcatgggtaagggtgtttcctcagcaccctcctggggtggggattatgtctgctgtcatgtctgggtctttagggtaggacaggctgtggtatgagaggcaggagtctccacaaggcttcatgtggccccttatagggcaggccctgccctctgggaaggtcccttcatgctggaggcacacagctttaaggaagtaggttgaagtaggactccttcgtcctctcactggctttggctccctcaataaactgtgtgggaacctggctcagtgtctgtctctctctctcac

SEQ ID NO: 422579 - DNA, 1460 bp, Homo sapiens
gattgtcttaaaaaattgtcagaccggataaagggaggtctaaaaggggaccgtcccaagagcaaggcttccaaaagctaagcccggaaggacggcacctcgcgcattctcccgcctacctatcaatcatcgtgctccgctgtccagttggctggccaagggggcggggccgtcgtgtgacgtttgcagcccgccggccaggaagccgcgagatgcgtgacgagcgaagcgcgtgacggaggagcggttggccaacgcagtggcggcagtcggtgtaaacaaggcctcgcgccgctgcgggtcctgcgaccgctcctggctggtgggtggtctcgcgtggggcggttaccgccggcttcagtgggaggtgcttctcggcttcctccccctcatggcgtacacacccccggcgcaccacgtgggcgtgaggcgaggaaggaggggtgttaggccaaattctattttcattggctgtcactgctgccggcctttgtaagggggcgctctgattggtcgataaggtgggggcgtcgagggtctttgagtcctaaggcttctaattggttagatgagataagctagtgaagcgctttcttccgagagggatttcgattggtcggtcagagaggttacctggaaatccaacaccgcccaacacccctcccgctccccagtccggggacttcgataggattggagaaggtttgtgttcccgacgccttggtagttggcataggctaaagaaaagggatctcagccccgaggaagggtcaccctcctagagatagctactaccccgtctcaggagaccctggtatttctagagcacgctttgctttcaccaaacccaaggaggtgacaggaggagcccccgcacaggacctaagaatgctgtgaccagaagatgggatcgcggaacagcagcagtgcaggatccgggtccggagacccctccgagggcttgccccgaagaggggctggcctgcgtcggagtgaggaagaggaagaagaggatgaagatgtggatctggcccaggtactggcctatctcctccgcagaggccaagtgaggttggtgcagggaggaggtgcagcaaatttacaattcattcaggccctcttggactcagaggaagagaatgacagagcttgggatggtcgtcttggggatcgatacaacccacctgtggatgctacccctgacacccgggagctggaattcaatgagatcaagacacaagtggaactggccacagggcagctggggcttaggcgggccgcccagaagcacagctttcctcgaatgttgcaccagagagaacggggcctctgccatcggggaagcttctcccttggagaacagtctcgagtgatatctcagtgagtatggggcttggtgaagagactctaagggccagataggtcttatctcctaaactttgaaggggtaggtgttaaag

SEQ ID NO: 422580 - DNA, 1371 bp, Homo sapiens
  misc_feature (1325)..(1325): n is a, c, g, or t
  misc_feature (1327)..(1327): n is a, c, g, or t
  misc_feature (1333)..(1333): n is a, c, g, or t
gattgtcttaaaaaattgtcagaccggataaagggaggtctaaaaggggaccgtcccaagagcaaggcttccaaaagctaagcccggaaggacggcacctcgcgcattctcccgcctacctatcaatcatcgtgctccgctgtccagttggctggccaagggggcggggccgtcgtgtgacgtttgcagcccgccggccaggaagccgcgagatgcgtgacgagcgaagcgcgtgacggaggagcggttggccaacgcagtggcggcagtcggtgtaaacaaggcctcgcgccgctgcgggtcctgcgaccgctcctggctggtgggtggtctcgcgtggggcggttaccgccggcttcagtgggaggtgcttctcggcttcctccccctcatggcgtacacacccccggcgcaccacgtgggcgtgaggcgaggaaggaggggtgttaggccaaattctattttcattggctgtcactgctgccggcctttgtaagggggcgctctgattggtcgataaggtgggggcgtcgagggtctttgagtcctaaggcttctaattggttagatgagataagctagtgaagcgctttcttccgagagggatttcgattggtcggtcagagaggttacctggaaatccaacaccgcccaacacccctcccgctccccagtccggggacttcgatagaaggaggtgacaggaggagcccccgcacaggacctaagaatgctgtgaccagaagatgggatcgcggaacagcagcagtgcaggatccgggtccggagacccctccgagggcttgccccgaagaggggctggcctgcgtcggagtgaggaagaggaagaagaggatgaagatgtggatctggcccaggtactggcctatctcctccgcagaggccaagtgaggttggtgcagggaggaggtgcagcaaatttacaattcattcaggccctcttggactcagaggaagagaatgacagagcttgggatggtcgtcttggggatcgatacaacccacctgtggatgctacccctgacacccgggagctggaattcaatgagatcaagacacaagtggaactggccacagggcagctggggcttaggcgggccgcccagaagcacagctttcctcgaatgttgcaccagagagaacggggcctctgccatcggggaagcttctcccttggagaacagtctcgagtgatatctcacttcttgcccaatgatctgggcttcactgatagctactctcagaaggctttctgtggcatctacagcaaagatggtcaaatattcatgtctgcttgccaagancnaaatcngatctttaggcgaaggcggcgaattcaagctcagcgga

SEQ ID NO: 422581 - DNA, 1178 bp, Homo sapiens
gattgtcttaaaaaattgtcagaccggataaagggaggtctaaaaggggaccgtcccaagagcaaggcttccaaaagctaagcccggaaggacggcacctcgcgcattctcccgcctacctatcaatcatcgtgctccgctgtccagttggctggccaagggggcggggccgtcgtgtgacgtttgcagcccgccggccaggaagccgcgagatgcgtgacgagcgaagcgcgtgacggaggagcggttggccaacgcagtggcggcagtcggtgtaaacaaggcctcgcgccgctgcgggtcctgcgaccgctcctggctgaaggaggtgacaggaggagcccccgcacaggacctaagaatgctgtgaccagaagatgggatcgcggaacagcagcagtgcaggatccgggtccggagacccctccgagggcttgccccgaagaggggctggcctgcgtcggagtgaggaagaggaagaagaggatgaagatgtggatctggcccagaggccaagtgaggttggtgcagggaggaggtgcagcaaatttacaattcattcaggccctcttggactcagaggaagagaatgacagagcttgggatggtcgtcttggggatcgatacaacccacctgtggatgctacccctgacacccgggagctggaattcaatgagatcaagacacaagtggaactggccacagggcagctggggcttaggcgggccgcccagaagcacagctttcctcgaatgttgcaccagagagaacggggcctctgccatcggggaagcttctcccttggagaacagtctcgagtgatatctcacttcttgcccaatgatctgggcttcactgatagctactctcagaaggctttctgtggcatctacagcaaagatggtcaaatattcatgtctgcttgccaagaaccaaaaatcgatctataatgcgaaataggcggtccataattcagagcttaaggccggaagtagcgaacgttggatttgcctacccgagggaacctcctactccgtcgggtatctgttgcattcggggggggccaccgccgctccaaaacgctggttccgtcctcaggaaaaaggcccggttttcaacacccaacagcaaaggcgtacccggcacagggcacgcgcggcctgcccctcagcccgct

SEQ ID NO: 422582 - DNA, 322 bp, Homo sapiens
taaggctagaataggaaagccggccagtagcctgggcaaggaaaggaaaacctagccaggtggtaggatctgaggcagaacgctggaaatgagttcacctggatgaagagaggcaagtaaagccagaggccagagttcttctgctcaactagagaacgggaactagactgacaggcgccgacatttgcaagctctgatgcttcactatccacctttggattcatagggtgatgcccggtatctgatctccaactctaaagaccagaccatcaaactctgggatatccgacgcttttccagccgggaaggcatggaagcttca

SEQ ID NO: 422583 - DNA, 398 bp, Homo sapiens
tcaagggaagctctttgggagcaaacctcttgagttggaagttctgtttaggggaaaaagtatactggtgggtctgtgtgcattcctgggagggaagcaccatcttgtcagccagaggactgggtaaaatagatggttgcaggatgatttctgggttctcactgagcatctgcattatggtgcatgttagccagacttcttttttcccctggggatgtgccttacaaccgttgtcagattttatgtagattaacaaaagctgaaggaagtccacttaacccagctccttcttgcttttaggccagatgagcgtcgctttgctgtcttctccattgctgtctcctcagatggacgagaagtactaggagggtaagtgcttgtggggtatgtttccctca

SEQ ID NO: 422584 - DNA, 2669 bp, Homo sapiens
atctttcttcagttggtgagctagggtagcgcactacggttcactcttgctttctttgcttcacaggatgattggagaaggtttgtgttcccgacgccttggtagttggcataggctaaagaaaagggatctcagccccgaggaagggtcaccctcctagagatagctactaccccgtctcaggagaccctggtatttctagagcacgctttgctttcaccaaacccaaggaggtgacaggaggagcccccgcacaggacctaagaatgctgtgaccagaagatgggatcgcggaacagcagcagtgcaggatccgggtccggagacccctccgagggcttgccccgaagaggggctggcctgcgtcggagtgaggaagaggaagaagaggatgaagatgtggatctggcccaggtactggcctatctcctccgcagaggccaagtgaggttggtgcagggaggaggtgcagcaaatttacaattcattcaggccctcttggactcagaggaagagaatgacagagcttgggatggtcgtcttggggatcgatacaacccacctgtggatgctacccctgacacccgggagctggaattcaatgagatcaagacacaagtggaactggccacagggcagctggggcttaggcgggccgcccagaagcacagctttcctcgaatgttgcaccagagagaacggggcctctgccatcggggaagcttctcccttggagaacagtctcgagtgatatctcacttcttgcccaatgatctgggcttcactgatagctactctcagaaggctttctgtggcatctacagcaaagatggtcaaatattcatgtctgcttgccaagaccagacaatccgactctatgactgccgatatggccgtttccgtaaattcaagagcatcaaggcccgcgacgtaggctggagcgtcttggatgtggccttcacccctgatgggaaccacttcctctactctagctggtctgattacattcatatctgcaatatctatggtgagggagatacacacactgccctggatctcaggccagatgagcgtcgctttgctgtcttctccattgctgtctcctcagatggacgagaagtactaggaggggccaatgatggctgcctgtatgtctttgaccgagaacagaaccggcgcacccttcagattgagtcccatgaggatgatgtgaatgcagtggcctttgctgatataagctcccaaatcctgttctctgggggagatgatgccatctgcaaagtgtgggatcgacgcaccatgcgggaggatgaccccaagcctgtgggtgcactggctggacaccaggatggcatcaccttcattgacagcaagggtgatgcccggtatctgatctccaactctaaagaccagaccatcaaactctgggatatccgacgcttttccagccgggaaggcatggaagcttcacgccaggctgccacacagcaaaactgggactatcggtggcagcaagtgcccaaaaaagcctggcggaagctgaagctcccaggggacagctccttgatgacctaccggggccacggagtgctgcacaccctcatccgctgccggttctcccccattcatagcactggccagcagttcatctacagtggctgctccactggcaaagtggttgtgtacgaccttctaagtggccacattgtgaagaagctgaccaaccacaaggcctgtgtgcgtgacgtcagttggcacccctttgaagagaagattgtcagcagttcgtgggacgggaacctgcgtctgtggcagtaccgccaggctgagtacttccaggatgacatgccagaatctgaggaatgtgccagcgcccctgccccagtgccccaatcctctacacccttttcctcaccccagtagatccaacctccagccccatatagggtgaacctcttgataagctctctgcctcctcctccctttctcccttgtggggaatgtttggaggaatcactggcatttgatggggaataacataagcctgggctctgagcctcagctgagccctggaagattctccccatggggcagagtggtctccttacgtgctcacacccagtcagcttgggtccctatctctggccagagtttggcaggactgccattatctggggtgtggcctctgccagcaagagaagtgtcctgggtgtttttaatcatgtttgaatgttaggggttggatcctagagtagatgcctgaggccacatctgaacagacctgtcagccaggcctgccaggtcttcacgttgaggattcaactggccaatcacaggacaggtgtcctggcctttcttcctgaggtctctaggggaggggcatgggtaagggtgtttcctcagcaccctcctggggtggggattatgtctgctgtcatgtctgggtctttagggtaggacaggctgtggtatgagaggcaggagtctccacaaggcttcatgtggccccttatagggcaggccctgccctctgggaaggtcccttcatgctggaggcacacagctttaaggaagtaggttgaagtaggactccttcgtcctctcactggctttggctccctcaataaactgtgtgggaacctggctcagtgtctgtctctctctctcac

SEQ ID NO: 422585 - DNA, 2764 bp, Homo sapiens
gattgtcttaaaaaattgtcagaccggataaagggaggtctaaaaggggaccgtcccaagagcaaggcttccaaaagctaagcccggaaggacggcacctcgcgcattctcccgcctacctatcaatcatcgtgctccgctgtccagttggctggccaagggggcggggccgtcgtgtgacgtttgcagcccgccggccaggaagccgcgagatgcgtgacgagcgaagcgcgtgacggaggagcggttggccaacgcagtggcggcagtcggtgtaaacaaggcctcgcgccgctgcgggtcctgcgaccgctcctggctgaaggaggtgacaggaggagcccccgcacaggacctaagaatgctgtgaccagaagatgggatcgcggaacagcagcagtgcaggatccgggtccggagacccctccgagggcttgccccgaagaggggctggcctgcgtcggagtgaggaagaggaagaagaggatgaagatgtggatctggcccaggtactggcctatctcctccgcagaggccaagtgaggttggtgcagggaggaggtgcagcaaatttacaattcattcaggccctcttggactcagaggaagagaatgacagagcttgggatggtcgtcttggggatcgatacaacccacctgtggatgctacccctgacacccgggagctggaattcaatgagatcaagacacaagtggaactggccacagggcagctggggcttaggcgggccgcccagaagcacagctttcctcgaatgttgcaccagagagaacggggcctctgccatcggggaagcttctcccttggagaacagtctcgagtgatatctcacttcttgcccaatgatctgggcttcactgatagctactctcagaaggctttctgtggcatctacagcaaagatggtcaaatattcatgtctgcttgccaagaccagacaatccgactctatgactgccgatatggccgtttccgtaaattcaagagcatcaaggcccgcgacgtaggctggagcgtcttggatgtggccttcacccctgatgggaaccacttcctctactctagctggtctgattacattcatatctgcaatatctatggtgagggagatacacacactgccctggatctcaggccagatgagcgtcgctttgctgtcttctccattgctgtctcctcagatggacgagaagtactaggaggggccaatgatggctgcctgtatgtctttgaccgagaacagaaccggcgcacccttcagattgagtcccatgaggatgatgtgaatgcagtggcctttgctgatataagctcccaaatcctgttctctgggggagatgatgccatctgcaaagtgtgggatcgacgcaccatgcgggaggatgaccccaagcctgtgggtgcactggctggacaccaggatggcatcaccttcattgacagcaagggtgatgcccggtatctgatctccaactctaaagaccagaccatcaaactctgggatatccgacgcttttccagccgggaaggcatggaagcttcacgccaggctgccacacagcaaaactgggactatcggtggcagcaagtgcccaaaaaagcctggcggaagctgaagctcccaggggacagctccttgatgacctaccggggccacggagtgctgcacaccctcatccgctgccggttctcccccattcatagcactggccagcagttcatctacagtggctgctccactggcaaagtggttgtgtacgaccttctaagtggccacattgtgaagaagctgaccaaccacaaggcctgtgtgcgtgacgtcagttggcacccctttgaagagaagattgtcagcagttcgtgggacgggaacctgcgtctgtggcagtaccgccaggctgagtacttccaggatgacatgccagaatctgaggaatgtgccagcgcccctgccccagtgccccaatcctctacacccttttcctcaccccagtagatccaacctccagccccatatagggtgaacctcttgataagctctctgcctcctcctccctttctcccttgtggggaatgtttggaggaatcactggcatttgatggggaataacataagcctgggctctgagcctcagctgagccctggaagattctccccatggggcagagtggtctccttacgtgctcacacccagtcagcttgggtccctatctctggccagagtttggcaggactgccattatctggggtgtggcctctgccagcaagagaagtgtcctgggtgtttttaatcatgtttgaatgttaggggttggatcctagagtagatgcctgaggccacatctgaacagacctgtcagccaggcctgccaggtcttcacgttgaggattcaactggccaatcacaggacaggtgtcctggcctttcttcctgaggtctctaggggaggggcatgggtaagggtgtttcctcagcaccctcctggggtggggattatgtctgctgtcatgtctgggtctttagggtaggacaggctgtggtatgagaggcaggagtctccacaaggcttcatgtggccccttatagggcaggccctgccctctgggaaggtcccttcatgctggaggcacacagctttaaggaagtaggttgaagtaggactccttcgtcctctcactggctttggctccctcaataaactgtgtgggaacctggctcagtgtctgtctctctctctcac

SEQ ID NO: 422586 - DNA, 3236 bp, Homo sapiens
gattgtcttaaaaaattgtcagaccggataaagggaggtctaaaaggggaccgtcccaagagcaaggcttccaaaagctaagcccggaaggacggcacctcgcgcattctcccgcctacctatcaatcatcgtgctccgctgtccagttggctggccaagggggcggggccgtcgtgtgacgtttgcagcccgccggccaggaagccgcgagatgcgtgacgagcgaagcgcgtgacggaggagcggttggccaacgcagtggcggcagtcggtgtaaacaaggcctcgcgccgctgcgggtcctgcgaccgctcctggctggtgggtggtctcgcgtggggcggttaccgccggcttcagtgggaggtgcttctcggcttcctccccctcatggcgtacacacccccggcgcaccacgtgggcgtgaggcgaggaaggaggggtgttaggccaaattctattttcattggctgtcactgctgccggcctttgtaagggggcgctctgattggtcgataaggtgggggcgtcgagggtctttgagtcctaaggcttctaattggttagatgagataagctagtgaagcgctttcttccgagagggatttcgattggtcggtcagagaggttacctggaaatccaacaccgcccaacacccctcccgctccccagtccggggacttcgataggattggagaaggtttgtgttcccgacgccttggtagttggcataggctaaagaaaagggatctcagccccgaggaagggtcaccctcctagagatagctactaccccgtctcaggagaccctggtatttctagagcacgctttgctttcaccaaacccaaggaggtgacaggaggagcccccgcacaggacctaagaatgctgtgaccagaagatgggatcgcggaacagcagcagtgcaggatccgggtccggagacccctccgagggcttgccccgaagaggggctggcctgcgtcggagtgaggaagaggaagaagaggatgaagatgtggatctggcccaggtactggcctatctcctccgcaggccctcttggactcagaggaagagaatgacagagcttgggatggtcgtcttggggatcgatacaacccacctgtggatgctacccctgacacccgggagctggaattcaatgagatcaagacacaagtggaactggccacagggcagctggggcttaggcgggccgcccagaagcacagctttcctcgaatgttgcaccagagagaacggggcctctgccatcggggaagcttctcccttggagaacagtctcgagtgatatctcacttcttgcccaatgatctgggcttcactgatagctactctcagaaggctttctgtggcatctacagcaaagatggtcaaatattcatgtctgcttgccaagaccagacaatccgactctatgactgccgatatggccgtttccgtaaattcaagagcatcaaggcccgcgacgtaggctggagcgtcttggatgtggccttcacccctgatgggaaccacttcctctactctagctggtctgattacattcatatctgcaatatctatggtgagggagatacacacactgccctggatctcaggccagatgagcgtcgctttgctgtcttctccattgctgtctcctcagatggacgagaagtactaggaggggccaatgatggctgcctgtatgtctttgaccgagaacagaaccggcgcacccttcagattgagtcccatgaggatgatgtgaatgcagtggcctttgctgatataagctcccaaatcctgttctctgggggagatgatgccatctgcaaagtgtgggatcgacgcaccatgcgggaggatgaccccaagcctgtgggtgcactggctggacaccaggatggcatcaccttcattgacagcaagggtgatgcccggtatctgatctccaactctaaagaccagaccatcaaactctgggatatccgacgcttttccagccgggaaggcatggaagcttcacgccaggctgccacacagcaaaactgggactatcggtggcagcaagtgcccaaaaaagcctggcggaagctgaagctcccaggggacagctccttgatgacctaccggggccacggagtgctgcacaccctcatccgctgccggttctcccccattcatagcactggccagcagttcatctacagtggctgctccactggcaaagtggttgtgtacgaccttctaagtggccacattgtgaagaagctgaccaaccacaaggcctgtgtgcgtgacgtcagttggcacccctttgaagagaagattgtcagcagttcgtgggacgggaacctgcgtctgtggcagtaccgccaggctgagtacttccaggatgacatgccagaatctgaggaatgtgccagcgcccctgccccagtgccccaatcctctacacccttttcctcaccccagtagatccaacctccagccccatatagggtgaacctcttgataagctctctgcctcctcctccctttctcccttgtggggaatgtttggaggaatcactggcatttgatggggaataacataagcctgggctctgagcctcagctgagccctggaagattctccccatggggcagagtggtctccttacgtgctcacacccagtcagcttgggtccctatctctggccagagtttggcaggactgccattatctggggtgtggcctctgccagcaagagaagtgtcctgggtgtttttaatcatgtttgaatgttaggggttggatcctagagtagatgcctgaggccacatctgaacagacctgtcagccaggcctgccaggtcttcacgttgaggattcaactggccaatcacaggacaggtgtcctggcctttcttcctgaggtctctaggggaggggcatgggtaagggtgtttcctcagcaccctcctggggtggggattatgtctgctgtcatgtctgggtctttagggtaggacaggctgtggtatgagaggcaggagtctccacaaggcttcatgtggccccttatagggcaggccctgccctctgggaaggtcccttcatgctggaggcacacagctttaaggaagtaggttgaagtaggactccttcgtcctctcactggctttggctccctcaataaactgtgtgggaacctggctcagtgtctgtctctctctctcac

SEQ ID NO: 422587 - DNA, 2766 bp, Homo sapiens
gattgtcttaaaaaattgtcagaccggataaagggaggtctaaaaggggaccgtcccaagagcaaggcttccaaaagctaagcccggaaggacggcacctcgcgcattctcccgcctacctatcaatcatcgtgctccgctgtccagttggctggccaagggggcggggccgtcgtgtgacgtttgcagcccgccggccaggaagccgcgagatgcgtgacgagcgaagcgcgtgacggaggagcggttggccaacgcagtggcggcagtcggtgtaaacaaggcctcgcgccgctgcgggtcctgcgaccgctcctggctgagcacgctttgctttcaccaaacccaaggaggtgacaggaggagcccccgcacaggacctaagaatgctgtgaccagaagatgggatcgcggaacagcagcagtgcaggatccgggtccggagacccctccgagggcttgccccgaagaggggctggcctgcgtcggagtgaggaagaggaagaagaggatgaagatgtggatctggcccagaggccaagtgaggttggtgcagggaggaggtgcagcaaatttacaattcattcaggccctcttggactcagaggaagagaatgacagagcttgggatggtcgtcttggggatcgatacaacccacctgtggatgctacccctgacacccgggagctggaattcaatgagatcaagacacaagtggaactggccacagggcagctggggcttaggcgggccgcccagaagcacagctttcctcgaatgttgcaccagagagaacggggcctctgccatcggggaagcttctcccttggagaacagtctcgagtgatatctcacttcttgcccaatgatctgggcttcactgatagctactctcagaaggctttctgtggcatctacagcaaagatggtcaaatattcatgtctgcttgccaagaccagacaatccgactctatgactgccgatatggccgtttccgtaaattcaagagcatcaaggcccgcgacgtaggctggagcgtcttggatgtggccttcacccctgatgggaaccacttcctctactctagctggtctgattacattcatatctgcaatatctatggtgagggagatacacacactgccctggatctcaggccagatgagcgtcgctttgctgtcttctccattgctgtctcctcagatggacgagaagtactaggaggggccaatgatggctgcctgtatgtctttgaccgagaacagaaccggcgcacccttcagattgagtcccatgaggatgatgtgaatgcagtggcctttgctgatataagctcccaaatcctgttctctgggggagatgatgccatctgcaaagtgtgggatcgacgcaccatgcgggaggatgaccccaagcctgtgggtgcactggctggacaccaggatggcatcaccttcattgacagcaagggtgatgcccggtatctgatctccaactctaaagaccagaccatcaaactctgggatatccgacgcttttccagccgggaaggcatggaagcttcacgccaggctgccacacagcaaaactgggactatcggtggcagcaagtgcccaaaaaagcctggcggaagctgaagctcccaggggacagctccttgatgacctaccggggccacggagtgctgcacaccctcatccgctgccggttctcccccattcatagcactggccagcagttcatctacagtggctgctccactggcaaagtggttgtgtacgaccttctaagtggccacattgtgaagaagctgaccaaccacaaggcctgtgtgcgtgacgtcagttggcacccctttgaagagaagattgtcagcagttcgtgggacgggaacctgcgtctgtggcagtaccgccaggctgagtacttccaggatgacatgccagaatctgaggaatgtgccagcgcccctgccccagtgccccaatcctctacacccttttcctcaccccagtagatccaacctccagccccatatagggtgaacctcttgataagctctctgcctcctcctccctttctcccttgtggggaatgtttggaggaatcactggcatttgatggggaataacataagcctgggctctgagcctcagctgagccctggaagattctccccatggggcagagtggtctccttacgtgctcacacccagtcagcttgggtccctatctctggccagagtttggcaggactgccattatctggggtgtggcctctgccagcaagagaagtgtcctgggtgtttttaatcatgtttgaatgttaggggttggatcctagagtagatgcctgaggccacatctgaacagacctgtcagccaggcctgccaggtcttcacgttgaggattcaactggccaatcacaggacaggtgtcctggcctttcttcctgaggtctctaggggaggggcatgggtaagggtgtttcctcagcaccctcctggggtggggattatgtctgctgtcatgtctgggtctttagggtaggacaggctgtggtatgagaggcaggagtctccacaaggcttcatgtggccccttatagggcaggccctgccctctgggaaggtcccttcatgctggaggcacacagctttaaggaagtaggttgaagtaggactccttcgtcctctcactggctttggctccctcaataaactgtgtgggaacctggctcagtgtctgtctctctctctcac

SEQ ID NO: 422588 - DNA, 4698 bp, Homo sapiens
gattgtcttaaaaaattgtcagaccggataaagggaggtctaaaaggggaccgtcccaagagcaaggcttccaaaagctaagcccggaaggacggcacctcgcgcattctcccgcctacctatcaatcatcgtgctccgctgtccagttggctggccaagggggcggggccgtcgtgtgacgtttgcagcccgccggccaggaagccgcgagatgcgtgacgagcgaagcgcgtgacggaggagcggttggccaacgcagtggcggcagtcggtgtaaacaaggcctcgcgccgctgcgggtcctgcgaccgctcctggctggtgggtggtctcgcgtggggcggttaccgccggcttcagtgggaggtgcttctcggcttcctccccctcatggcgtacacacccccggcgcaccacgtgggcgtgaggcgaggaaggaggggtgttaggccaaattctattttcattggctgtcactgctgccggcctttgtaagggggcgctctgattggtcgataaggtgggggcgtcgagggtctttgagtcctaaggcttctaattggttagatgagataagctagtgaagcgctttcttccgagagggatttcgattggtcggtcagagaggttacctggaaatccaacaccgcccaacacccctcccgctccccagtccggggacttcgataggattggagaaggtttgtgttcccgacgccttggtagttggcataggctaaagaaaagggatctcagccccgaggaagggtcaccctcctagagatagctactaccccgtctcaggagaccctggtatttctagagcacgctttgctttcaccaaacccaaggaggtgacaggaggagcccccgcacaggacctaagaatgctgtgaccagaagatgggatcgcggaacagcagcagtgcaggatccgggtccggagacccctccgagggcttgccccgaagaggggctggcctgcgtcggagtgaggaagaggaagaagaggatgaagatgtggatctggcccaggtactggcctatctcctccgcagaggccaagtgaggttggtgcagggaggaggtgcagcaaatttacaattcattcaggccctcttggactcagaggaagagaatgacagagcttgggatggtcgtcttggggatcgatacaacccacctgtggatgctacccctgacacccgggagctggaattcaatgagatcaagacacaagtggaactggccacagggcagctggggcttaggcgggccgcccagaagcacagctttcctcgaatgttgcaccagagagaacggggcctctgccatcggggaagcttctcccttggagaacagtctcgagtgatatctcacttcttgcccaatgatctgggcttcactgatagctactctcagaaggctttctgtggcatctacagcaaagatggtcaaatattcatgtctgcttgccaagaccagacaatccgactctatgactgccgatatggccgtttccgtaaattcaagagcatcaaggcccgcgacgtaggctggagcgtcttggatgtggccttcacccctgatgggaaccacttcctctactctagctggtctgattacattcatatctgcaatatctatggtgagggagatacacacactgccctggatctcaggccagatgagcgtcgctttgctgtcttctccattgctgtctcctcagatggacgagaagtactaggaggggccaatgatggctgcctgtatgtctttgaccgagaacagaaccggcgcacccttcagattgagtcccatgaggatgatgtgaatgcagtggcctttgctgatataagctcccaaatcctgttctctgggggagatgatgccatctgcaaagtgtgggatcgacgcaccatgcgggaggatgaccccaagcctgtgggtgcactggctggacaccaggatggcatcaccttcattgacagcaagggtgatgcccggtatctgatctccaactctaaagaccagaccatcaaactctgggatatccgacgcttttccagccgggaaggcatggaagcttcacgccaggctgccacacagcaaaactgggactatcggtggcagcaagtgcccaaaaaagcctggcggaagctgaagctcccaggggacagctccttgatgacctaccggggccacggagtgctgcacaccctcatccgctgccggttctcccccattcatagcactggccagcagttcatctacagtggctgctccactggcaaagtggttgtgtacgaccttctaagtggccacattgtgaagaagctgaccaaccacaaggcctgtgtgcgtgacgtcagttggcacccctttgaagagaagattgtcagcagttcgtgggacgggaacctgcgtctgtggcagtaccgccaggctgagtacttccaggatgacatgccagaatctgaggaatgtgccagcgcccctgccccagtgccccaatcctctacacccttttcctcaccccagtagatccaacctccagccccatatagggtgaacctcttgataagctctctgcctcctcctccctttctcccttgtggggaatgtttggaggaatcactggcatttgatggggaataacataagcctgggctctgagcctcagctgagccctggaagattctccccatggggcagagtggtctccttacgtgctcacacccagtcagcttgggtccctatctctggccagagtttggcaggactgccattatctggggtgtggcctctgccagcaagagaagtgtcctgggtgtttttaatcatgtttgaatgttaggggttggatcctagagtagatgcctgaggccacatctgaacagacctgtcagccaggcctgccaggtcttcacgttgaggattcaactggccaatcacaggacaggtgtcctggcctttcttcctgaggtctctaggggaggggcatgggtaagggtgtttcctcagcaccctcctggggtggggattatgtctgctgtcatgtctgggtctttagggtaggacaggctgtggtatgagaggcaggagtctccacaaggcttcatgtggccccttatagggcaggccctgccctctgggaaggtcccttcatgctggaggcacacagctttaaggaagtaggttgaagtaggactccttcgtcctctcactggctttggctccctcaataaactgtgtgggaacctggctcagtgtctgtctctctctctcactctctgtttttcctatctgaggtctttcatctcctcacttcaggaaaacacagttcagcaaagtcttcagatgcgatcctgtgtaggagaaaatacccttctggtgccccatgaaaaagggaaataccaaaaccatttgttcactgagccttgcaataggtgctcccttaccaatttcagaagcttccctgcaagtagatatcgagagagcacactttccattagagcctggtaatacccatatcacctctgctctgaggctgggcctgcagctgtgtagtctttggaagaggtagcccctgaacgcagagcctaagagaagcaagtcggccctgacgccaggccccagtgggcgcctcacactcagaacctcataccccagagcaaaccgatggtcagggagagggctagagctcacacccagctcggaatagatcttccctgatgacatttcatgccctctaaggcagtttttaaatgaaggtacacacatccaggggtgttcacaggctttcacagcaagggtacctatttcatggcaaaataggcagttttaaaagaataaacaagctaggtgtggtggctcatgcctgtaatcctagcactttgggaagccaaagctgatggatcgcttgagcccaggagtttgagaccagcctgggcaacatggcaaaaccccatctctacaaaaaatacaaaaagtaggccgggcacggtggttcacacctgtaatcccggcattttgggaggccgagataggtggatcacctgaagtcaggtgtttgagaccagcctggccaacatggtggaacccaatctctactaaaaatacaaaaaaactagccggatatggtggcgggtgcctgtaatctcagctacttgagaggctgaggcaggagaatcgcttgaacttgggagcagaggtgagctgagtgcagtgagccaagaccatgccattacactcaagcttgggcaacgagagcaaaactctgtctcaaaaaaaaaattagccagatgtggtgacgcatgcctgtagtcctagctactcaggaggctgaggtgggaggatcacctaaggccaggaggtcaaggctgcggtgagccgtgattgtgccaatgtactccagcctaggtgacagagtgagaccctgtctcaaaaataaataataaataaataaatgttcagatccttggcttctgtgttctcattcctcaaattgatctacctagtgtgaaactcccgtgccagatctcctttcccatccacgcttttcattccccgtctgccaagtgataaagttacctaaggtgctacccatctcacccagaacctgtgttacttccagggcaccaaattaagagagaaattcaaattgttagtatccttatagcttcattagatcaaag

SEQ ID NO: 422589 - DNA, 407 bp, Homo sapiens
ggagactgtccactgactattaggtggagaaagagccaccacttgaagattggaaaggcatttgtctctgggcatcgaaccttgctcaggactggtggtacgaaacaatcccaaagcagatttcctaacctagggtttactctgcatccctacccagcctggcggaagctgaagctcccaggggacagctccttgatgacctaccggggccacggagtgctgcacaccctcatccgctgccggttctcccccattcatagcactggccagcagttcatctacagtggctgctccactggcaaagtggttggtaaggattgtgtcagaacagggggcctcaggaagggcaggaatgactccttgccattccacctataacgactagtgaccaccttaaaaagcccagt

SEQ ID NO: 422590 - DNA, 1025 bp, Homo sapiens
gcccaaggcaagagtgcagatgtaccacaggcctcatccttaattgttatacttcaagctaacaaacaattaagtacaatatgtcctatcagctgatcttgacaagtataccttcgtggccactgggaaggccagtttgatgtagaatccctgcctcctgggggttctgcaggttgggttccctggaccacccaattccctttccatccctggctctgtgttgtacctcaggagcttcctacatttgtgggacattcctggccatacctccaaggtccacctgcatgccccttggccattctttgggcctagaggtgcacacagctgtgtggccaccttccagaagacggacctgggaaaacagacttgaaattctctaagcagagaatctggggctccgggtatccaaagaatggtctagaggtgggaacacaggctcttgccttgcttctgcagactacttgcggtggtagacatgtatgtggtcagaggaggacccaagcaggctctctaaggctgaggccagctcaggagcccctcagtgcgcatgtctaaggcgtaactgcagaaaggaagaaagacttggggaggagattaaggcagagtcattaagactgcctagttcattttggggggaagaggataagttgggaagagttaaacaagaggaaaaagaggctgatgaaaagaagggagaagcccagaacctgcaccacttctacaaagatagggactcctaatttattattgtgtttagttagagaatgaaaaaaaaaaaaaacaaaaaaaaaaccttttacagaggtcaaagggctctgtaattcagggacaagggatatgaaaggcaaaagaaggatggttttggagctaaaagcagggactaggaatgatttctccccaaggtcacctggatccatcttatttctgcaccttcccctctttcatgatggatactggacccctgaaccattcaagaagaaacattccaccttattgtatcccctaaaagggggttcttttagagt

SEQ ID NO: 422591 - DNA, 901 bp, Homo sapiens
gccgtgacaagcccaaccggacggctggagagggcgagaagggcagacgggacatgcagcctcttccgcctgagccccggaagggtgatgtggctgcggcatcgccggcctcgctatgtctgccattttcaattttcagagtctattgactgtaatcttgctgcttatatgtacctgtgcttatattcgatccttggcacccagcctcctggacagaaataaaactggattgttgggtatattttggaagtgtgccagaattggtgaacggaagagtccttatgttgcagtatgctgtatagtaatggccttcagcatcctcttcatacagtagctggggaaaatgccagaatgtagttgccatcagatttgattgtgaacaaggactgactgcagaaaataatggaaaggatgtttaactcttttatctccgaacattgaatgagataaatttccagatgctgttctctattttaatgttattggaccaatgttctgtataaacaattaagatgtaaccatttaatagtctgtaacaatcaacctcagtactgtcactacaatattacattctgcaaatgttattctgttgtatcagatacaaaattttagtgaggtatctctaaggcacatagtagaaaacaaaattggttaattactcaagttcctttcactgtgatttggaaatgatttaatctttatagaatgagaaccttttttggactagcttttttattaaatgggccacttgggtggaagggtgcttaaattaaaagggggggttcctctgggccccatttgttcttaccgggcgtctacttggagcttttttggggtttatttaaaggttgggttggagaggggagtgtcaattggcgtgggggcttggggtccaatgttg

SEQ ID NO: 422592 - DNA, 773 bp, Homo sapiens
gcgtcccatgtccaggggtctccacgtctcgtcctgtggggctcccctctgtcgcgcggccgcgtgtgtgtgtcctcgctcctaattcgggccgaatatactccctgtatcccaagaggtatatataccgccccttttgggctgggaatcctgggtactttccgaagacttgcctgaatagtatataaggtggaggcaactgactagttaggtcagtatttttagaaactcttaatagctcatactcttgataccaaaagcagccctgattgttaaagcacacacctgcacaagaagcagtgatggttgcatttacatttcctgggtgcacaaaaaaaaattctcaaaaagcaaggacttacgctttttgcaaagcctttgagaagttactggatcataggaagcttataacaagaatggaagattcttaaataactcactttctttggtatccagtaacagtagatgttcaaaatatgtagctgattaataccagcattgtgaacgctgtacaaccttgtggttattactaagcaagttactactagcttctgaaaagtagcttcataattaatgttatttatacactgccttccatgacttttactttgccctaagctaatctccaaaatctgaaatgctactccaatatcagaaaaaaagggggaggtggaattatatttcctgtgattttaagagtacagagaatcatgcacatctctgattagttcatatatgtctagtgtgtaataaaagtcaagatgaactctcaa

SEQ ID NO: 422593 - DNA, 4570 bp, Homo sapiens
gccgtgacaagcccaaccggacggctggagagggcgagaagggcagacgggacatgcagcctcttccgcctgagccccggaagggtgatgtggctgcggcatcgccggcctcgctatgtctgccattttcaattttcagagtctattgactgtaatcttgctgcttatatgtacctgtgcttatattcgatccttggcacccagcctcctggacagaaataaaactggattgttgggtatattttggaagtgtgccagaattggtgaacggaagagtccttatgttgcagtatgctgtatagtaatggccttcagcatcctcttcatacagtagctggggaaaatgccagaatgtagttgccatcagatttgattgtgaacaaggactgactgcagaaaataatggaaaggatgtttaactcttttatctccgaacattgaatgagataaatttccagatgctgttctctattttaatgttattggaccaatgttctgtataaacaattaagatgtaaccatttaatagtctgtaacaatcaacctcagtactgtcactacaatattacattctgcaaatgttattctgttgtatcagatacaaaattttagtgaggtatctctaaggcacatagtagaaaacaaaattggttaattactcaagttcctttcactgtgatttggaaatgatttaatctttatagaatgagaaccttttttggactagcttttttattaaaatggctcaatttgtgttgataaggattgcattaatatttaatagtgcttgcttttcctctgggcacaccattttgatcattaaccagagtacctctactcttagcaaactctagtttatgacaagtatttaaaatatttaaaacaagcttatgcagttcttaaggacgaaggtaaatgagatgtaacttaaaaatagtattgggaaaatgttgatagttaacattagtggatttagactagccaaatgacatagtaggctctgaaacatcttgtcaagtatatgtattttgtgcatgaatttttgctggaaagctgtctttctctgaaaaacacaacgttcttagaatgaaaagaacaattataaaataattatcctatatgtgtttttcattctttttagtgtcatggcttcaaaaatgaaacatttattttaattgccgtaaaggaactgtatttttgttttgttttttaacacagcactttaaatccagtttgtgttttgtcaacttgaactggaatctcttttgttactttggaggtgataaatagttttcaaatctgctgatttgtatactgtggcacaagtatctttgaactttgatagtgaaaggagaccttcaacaatttttagtctaggcgagaggaatattaggaatgtgacttctaaattttacaatagagcagttattttaaggtcatggttaacatttcttaaggttcaactaaaattcagttaaaatttcagagctacgaggaacttaaatcttagctaaaaattacctgttgtagatagtattaattagattgtttgcagctattaattcatcataaagataaaatgaagaaactctccctttttttaaacaaaaaaaattatttctagattaataggctagtagttatttctgcagaaacaacgtatggaactgaaagccacctatttttattttagactaatttaaaccacttggaatggattctaggaaacatcttaagcttgtgtgttgcctgtggtggttttttgtttgggggtgttttttggttttggtttgattttctgtattttgttatctggggattttttgtttgtttgttttggtttggttttggttttatatttttggcatgtctatggcagttaaaagtggtatattttgctttagatagggaatcaggttataatcattgttcttcctctaaactgcctcttgggctttacatcaggtcaaggatttttagggtttctcaaaaataggattcttgtcagtgtatgcatgctgagtaagtcacctttctggctctaatttctgggtggccatctgttgtccagctctgctgccaactggactttccgaaagccatgtcaactaattttttatatgctaagacaaatcgaatatgaaaagaggaagaatattctagatattctaagacatttcttaatttggcatctcagaggaggtaggtggaaagtaaaggaagagataattttgggggaaaatttgtggaaacatacaaaacgttttgctttgtatagatgctaaacagagtgggaggcagcatatttgtaacaacaaccattctgaccttttgaaacacaagcttttggagaagtcagggagagacacagtatgaataaaagcaattaacattttctttaatgtatatttttcaaagaggaccacggaatcctgttctctaacccaaggggcagtgtaggtggttttaagcccacagaatattgagatatttctcttgtggttttggtggggtggtgggatgcagaaggttattaaagatcaatttaagcatcagatagactatcccttttatttttttaacttttaggttcaggggtacatgtgcaggttgttatataggtaaactcatgtcaagtggttttgttgtacagattattttgtcacccaggtgctaagcctagtacccagtagttattttccctgctcttctccctcctcccaccctccaccctcaagtaggccccagtgtctgttgttcctttctttgtgtccttgagttctcatcatttagctcctacttctaaatgagaacatgtatttggttttctgttctgtgttagtttgctaaggataatggcctccagctcagatggaatatctctatcatatagacctgttgttacagggcaggatcggatgatggacactgaagtcctcagcttgctaagttcagttgctctccctagcctccttttggcttcagagtcttttgattccatctatcctggtattttttgtgtgctgatgtttagttctggattggcttcagctgtgctaataggaagggcgttgtcttttcaagcaatcttaaaaggtggtcaatcaaaaggccagagtctgaatcccttctgtggcttaaataatttgaggatcaagtccagtgtcttgttaatccctgttctactgtgccagacactatcttgaatgcttttatatgttcaggttcaaaatcgctctttcataccaggggatgatagtaacgtgtaacttgcaatagattccttcatcttagtaataagatgatcagtctagttaggacaaaatagagattgaataaattaacttttccaagtttacagagtaaaaatgagcagatctctgcctggttttgtgaaaaagagttagcactggtaaatagaatatttctactcctacaccattctttcagtatatcatcactgaagacaggaagataggcacacagattcttcctcgtagtaattcatagtgcactaggtgaaagagatgaagtatgtattaagtacaatgtgatggcatttattattcagataatcccaggattctagaagaaaataaagaagagtgacagttcagttagggtgtgaacttccagaggagcactgcttaagctgaacttgagagcattgtgcaaaagcacagtagtctgttaagaactagaaataacctagcttgtgccacttcgggagtattaagacataagcctagaaaggtaggcaaaggttagatcttagactgtcttgtatttttctcattcctgttgattacctacctcaaaattgaatatgtttttcctcctgcctaacacaaaactactcaagggcagaaatttaaattcttccttggtgtatgtgcaaagaaggttgaatatattcatgcctaccttattttggactaggaatacagtagtatactttccgaagacttgcctgaatagtatataaggtggaggcaactgactagttaggtcagtatttttagaaactcttaatagctcatactcttgataccaaaagcagccctgattgttaaagcacacacctgcacaagaagcagtgatggttgcatttacatttcctgggtgcacaaaaaaaaattctcaaaaagcaaggacttacgctttttgcaaagcctttgagaagttactggatcataggaagcttataacaagaatggaagattcttaaataactcactttctttggtatccagtaacagtagatgttcaaaatatgtagctgattaataccagcattgtgaacgctgtacaaccttgtggttattactaagcaagttactactagcttctgaaaagtagcttcataattaatgttatttatacactgccttccatgacttttactttgccctaagctaatctccaaaatctgaaatgctactccaatatcagaaaaaaagggggaggtggaattatatttcctgtgattttaagagtacagagaatcatgcacatctctgattagttcatatatgtctagtgtgtaataaaagtcaagatgaactctcaa

SEQ ID NO: 422594 - DNA, 4513 bp, Homo sapiens
gccgtgacaagcccaaccggacggctggagagggcgagaagggcagacgggacatgcagcctcttccgcctgagccccggaagggtgatgtggctgcggcatcgccggcctcgctatgtctgccattttcaattttcagagtctattgactgtaatcttgctgcttatatgtacctgtgcttatattcgatccttggcacccagcctcctggacagaaataaaactggattgttgggtatattttggaagtgtgccagaattggtgaacggaagagtccttatgttgcagtatgctgtatagtaatggccttcagcatcctcttcatacagtagctggggaaaatgccagaatgtagttgccatcagatttgattgtgaacaaggactgactgcagaaaataatggaaaggatgtttaactcttttatctccgaacattgaatgagataaatttccagatgctgttctctattttaatgttattggaccaatgttctgtataaacaattaagatgtaaccatttaatagtctgtaacaatcaacctcagtactgtcactacaatattacattctgcaaatgttattctgttgtatcagatacaaaattttagtgaggtatctctaaggcacatagtagaaaacaaaattggttaattactcaagttcctttcactgtgatttggaaatgatttaatctttatagaatgagaaccttttttggactagcttttttattaaaatggctcaatttgtgttgataaggattgcattaatatttaatagtgcttgcttttcctctgggcacaccattttgatcattaaccagagtacctctactcttagcaaactctagtttatgacaagtatttaaaatatttaaaacaagcttatgcagttcttaaggacgaaggtaaatgagatgtaacttaaaaatagtattgggaaaatgttgatagttaacattagtggatttagactagccaaatgacatagtaggctctgaaacatcttgtcaagtatatgtattttgtgcatgaatttttgctggaaagctgtctttctctgaaaaacacaacgttcttagaatgaaaagaacaattataaaataattatcctatatgtgtttttcattctttttagtgtcatggcttcaaaaatgaaacatttattttaattgccgtaaaggaactgtatttttgttttgttttttaacacagcactttaaatccagtttgtgttttgtcaacttgaactggaatctcttttgttactttggaggtgataaatagttttcaaatctgctgatttgtatactgtggcacaagtatctttgaactttgatagtgaaaggagaccttcaacaatttttagtctaggcgagaggaatattaggaatgtgacttctaaattttacaatagagcagttattttaaggtcatggttaacatttcttaaggttcaactaaaattcagttaaaatttcagagctacgaggaacttaaatcttagctaaaaattacctgttgtagatagtattaattagattgtttgcagctattaattcatcataaagataaaatgaagaaactctccctttttttaaacaaaaaaaattatttctagattaataggctagtagttatttctgcagaaacaacgtatggaactgaaagccacctatttttattttagactaatttaaaccacttggaatggattctaggaaacatcttaagcttgtgtgttgcctgtggtggttttttgtttgggggtgttttttggttttggtttgattttctgtattttgttatctggggattttttgtttgtttgttttggtttggttttggttttatatttttggcatgtctatggcagttaaaagtggtatattttgctttagatagggaatcaggttataatcattgttcttcctctaaactgcctcttgggctttacatcaggtcaaggatttttagggtttctctttctgggtggccatctgttgtccagctctgctgccaactggactttccgaaagccatgtcaactaattttttatatgctaagacaaatcgaatatgaaaagaggaagaatattctagatattctaagacatttcttaatttggcatctcagaggaggtaggtggaaagtaaaggaagagataattttgggggaaaatttgtggaaacatacaaaacgttttgctttgtatagatgctaaacagagtgggaggcagcatatttgtaacaacaaccattctgaccttttgaaacacaagcttttggagaagtcagggagagacacagtatgaataaaagcaattaacattttctttaatgtatatttttcaaagaggaccacggaatcctgttctctaacccaaggggcagtgtaggtggttttaagcccacagaatattgagatatttctcttgtggttttggtggggtggtgggatgcagaaggttattaaagatcaatttaagcatcagatagactatcccttttatttttttaacttttaggttcaggggtacatgtgcaggttgttatataggtaaactcatgtcaagtggttttgttgtacagattattttgtcacccaggtgctaagcctagtacccagtagttattttccctgctcttctccctcctcccaccctccaccctcaagtaggccccagtgtctgttgttcctttctttgtgtccttgagttctcatcatttagctcctacttctaaatgagaacatgtatttggttttctgttctgtgttagtttgctaaggataatggcctccagctcagatggaatatctctatcatatagacctgttgttacagggcaggatcggatgatggacactgaagtcctcagcttgctaagttcagttgctctccctagcctccttttggcttcagagtcttttgattccatctatcctggtattttttgtgtgctgatgtttagttctggattggcttcagctgtgctaataggaagggcgttgtcttttcaagcaatcttaaaaggtggtcaatcaaaaggccagagtctgaatcccttctgtggcttaaataatttgaggatcaagtccagtgtcttgttaatccctgttctactgtgccagacactatcttgaatgcttttatatgttcaggttcaaaatcgctctttcataccaggggatgatagtaacgtgtaacttgcaatagattccttcatcttagtaataagatgatcagtctagttaggacaaaatagagattgaataaattaacttttccaagtttacagagtaaaaatgagcagatctctgcctggttttgtgaaaaagagttagcactggtaaatagaatatttctactcctacaccattctttcagtatatcatcactgaagacaggaagataggcacacagattcttcctcgtagtaattcatagtgcactaggtgaaagagatgaagtatgtattaagtacaatgtgatggcatttattattcagataatcccaggattctagaagaaaataaagaagagtgacagttcagttagggtgtgaacttccagaggagcactgcttaagctgaacttgagagcattgtgcaaaagcacagtagtctgttaagaactagaaataacctagcttgtgccacttcgggagtattaagacataagcctagaaaggtaggcaaaggttagatcttagactgtcttgtatttttctcattcctgttgattacctacctcaaaattgaatatgtttttcctcctgcctaacacaaaactactcaagggcagaaatttaaattcttccttggtgtatgtgcaaagaaggttgaatatattcatgcctaccttattttggactaggaatacagtagtatactttccgaagacttgcctgaatagtatataaggtggaggcaactgactagttaggtcagtatttttagaaactcttaatagctcatactcttgataccaaaagcagccctgattgttaaagcacacacctgcacaagaagcagtgatggttgcatttacatttcctgggtgcacaaaaaaaaattctcaaaaagcaaggacttacgctttttgcaaagcctttgagaagttactggatcataggaagcttataacaagaatggaagattcttaaataactcactttctttggtatccagtaacagtagatgttcaaaatatgtagctgattaataccagcattgtgaacgctgtacaaccttgtggttattactaagcaagttactactagcttctgaaaagtagcttcataattaatgttatttatacactgccttccatgacttttactttgccctaagctaatctccaaaatctgaaatgctactccaatatcagaaaaaaagggggaggtggaattatatttcctgtgattttaagagtacagagaatcatgcacatctctgattagttcatatatgtctagtgtgtaataaaagtcaagatgaactctcaa

SEQ ID NO: 422595 - DNA, 4613 bp, Homo sapiens
gccgtgacaagcccaaccggacggctggagagggcgagaagggcagacgggacatgcagcctcttccgcctgagccccggaagggtgatgtggctgcggcatcgccggcctcgctatgtctgccattttcaattttcagagtctattgactgtaatcttgctgcttatatgtacctgtgcttatattcgatccttggcacccagcctcctggacagaaataaaactggattgttgggtatattttggaagtgtgccagaattggtgaacggaagagtccttatgttgcagtatgctgtatagtaatggccttcagcatcctcttcatacagtagctggggaaaatgccagaatgtagttgccatcagatttgattgtgaacaaggactgactgcagaaaataatggaaaggatgtttaactcttttatctccgaacattgaatgagataaatttccagatgctgttctctattttaatgttattggaccaatgttctgtataaacaattaagatgtaaccatttaatagtctgtaacaatcaacctcagtactgtcactacaatattacattctgcaaatgttattctgttgtatcagatacaaaattttagtgaggtatctctaaggcacatagtagaaaacaaaattggttaattactcaagttcctttcactgtgatttggaaatgatttaatctttatagaatgagaaccttttttggactagcttttttattaaaatggctcaatttgtgttgataaggattgcattaatatttaatagtgcttgcttttcctctgggcacaccattttgatcattaaccagagtacctctactcttagcaaactctagtttatgacaagtatttaaaatatttaaaacaagcttatgcagttcttaaggacgaaggtaaatgagatgtaacttaaaaatagtattgggaaaatgttgatagttaacattagtggatttagactagccaaatgacatagtaggctctgaaacatcttgtcaagtatatgtattttgtgcatgaatttttgctggaaagctgtctttctctgaaaaacacaacgttcttagaatgaaaagaacaattataaaataattatcctatatgtgtttttcattctttttagtgtcatggcttcaaaaatgaaacatttattttaattgccgtaaaggaactgtatttttgttttgttttttaacacagcactttaaatccagtttgtgttttgtcaacttgaactggaatctcttttgttactttggaggtgataaatagttttcaaatctgctgatttgtatactgtggcacaagtatctttgaactttgatagtgaaaggagaccttcaacaatttttagtctaggcgagaggaatattaggaatgtgacttctaaattttacaatagagcagttattttaaggtcatggttaacatttcttaaggttcaactaaaattcagttaaaatttcagagctacgaggaacttaaatcttagctaaaaattacctgttgtagatagtattaattagattgtttgcagctattaattcatcataaagataaaatgaagaaactctccctttttttaaacaaaaaaaattatttctagattaataggctagtagttatttctgcagaaacaacgtatggaactgaaagccacctatttttattttagactaatttaaaccacttggaatggattctaggaaacatcttaagcttgtgtgttgcctgtggtggttttttgtttgggggtgttttttggttttggtttgattttctgtattttgttatctggggattttttgtttgtttgttttggtttggttttggttttatatttttggcatgtctatggcagttaaaagtggtatattttgctttagatagggaatcaggttataatcattgttcttcctctaaactgcctcttgggctttacatcaggtcaaggatttttagggtttctcaaaaataggattcttgtcagtgtatgcatgctgagtaagtcacctttctggctctaatttctgggtggccatctgttgtccagctctgctgccaactggactttccgaaagccatgtcaactaattttttatatgctaagacaaatcgaatatgaaaagaggaagaatattctagatattctaagacatttcttaatttggcatctcagaggaggtaggtggaaagtaaaggaagagataattttgggggaaaatttgtggaaacatacaaaacgttttgctttgtatagatgctaaacagagtgggaggcagcatatttgtaacaacaaccattctgaccttttgaaacacaagcttttggagaagtcagggagagacacagtatgaataaaagcaattaacattttctttaatgtatatttttcaaagaggaccacggaatcctgttctctaacccaaggggcagtgtaggtggttttaagcccacagaatattgagatatttctcttgtggttttggtggggtggtgggatgcagaaggttattaaagatcaatttaagcatcagatagactatcccttttatttttttaacttttaggttcaggggtacatgtgcaggttgttatataggtaaactcatgtcaagtggttttgttgtacagattattttgtcacccaggtgctaagcctagtacccagtagttattttccctgctcttctccctcctcccaccctccaccctcaagtaggccccagtgtctgttgttcctttctttgtgtccttgagttctcatcatttagctcctacttctaaatgagaacatgtatttggttttctgttctgtgttagtttgctaaggataatggcctccagctcagatggaatatctctatcatatagacctgttgttacagggcaggatcggatgatggacactgaagtcctcagcttgctaagttcagttgctctccctagcctccttttggcttcagagtcttttgattccatctatcctggtattttttgtgtgctgatgtttagttctggattggcttcagctgtgctaataggaagggcgttgtcttttcaagcaatcttaaaaggtggtcaatcaaaaggccagagtctgaatcccttctgtggcttaaataatttgaggatcaagtccagtgtcttgttaatccctgttctactgtgccagacactatcttgaatgcttttatatgttcaggttcaaaatcgctctttcataccaggggatgatagtaacgtgtaacttgcaatagattccttcatcttagtaataagatgatcagtctagttaggacaaaatagagattgaataaattaacttttccaagtttacagagtaaaaatgagcagatctctgcctggttttgtgaaaaagagttagcactggtaaatagaatatttctactcctacaccattctttcagtatatcatcactgaagacaggaagataggcacacagattcttcctcgtagtaattcatagtgcactaggtgaaagagatgaagtatgtattaagtacaatgtgatggcatttattattcagataatcccaggattctagaagaaaataaagaagagtgacagttcagttagggtgtgaacttccagaggagcactgcttaagctgaacttgagagcattgtgcaaaagcacagtagtctgttaagaactagaaataacctagcttgtgccacttcgggagtattaagacataagcctagaaaggtaggcaaaggttagatcttagactgtcttgtatttttctcattcctgttgattacctacctcaaaattgaatatgtttttcctcctgcctaacacaaaactactcaagggcagaaatttaaattcttccttggtgtatgtgcaaagaaggttgaatatattcatgcctaccttattttggactaggaatacagtagtatactttccgaagacttgcctgaatagtatataaggtggaggcaactgactagttaggtcagtatttttagaaactcttaatagctcatactcttgataccaaaagcagccctgattgttaaagcacacacctgcacaagaagcagtgatggttgcatttacatttcctgggtgcacaaaaaaaaattctcaaaaagcaaggacttacgctttttgcaaagcctttgagaagttactggatcataggaagcttataacaagaatggaagattcttaaataactcactttctttggtatccagtaacagtagatgttcaaaatatgtagctgattaataccagcattgtgaacgctgtacaaccttgtggttattactaagcaagttactactagcttctgaaaagtagcttcataattaatgttatttatacactgccttccatgacttttactttgccctaagctaatctccaaaatctgaaatgctactccaatatcagaaaaaaagggggaggtggaattatatttcctgtgattttaagagtacagagaatcatgcacatctctgattagttcatatatgtctagtgtgtaataaaagtcaagatgaactctcaaaaaaaaaaacaaaaggggggcggtctaaaagtttccttgaggc

SEQ ID NO: 422596 - DNA, 4516 bp, Homo sapiens
gccgtgacaagcccaaccggacggctggagagggcgagaagggcagacgggacatgcagcctcttccgcctgagccccggaagggtgatgtggctgcggcatcgccggcctcgctatgtctgccattttcaattttcagagtctattgactgtaatcttgctgcttatatgtacctgtgcttatattcgatccttggcacccagcctcctggacagaaataaaactggattgttgggtatattttggaagtgtgccagaattggtgaacggaagagtccttatgttgcagtatgctgtatagtaatggccttcagcatcctcttcatacagtagctggggaaaatgccagaatgtagttgccatcagatttgattgtgaacaaggactgactgcagaaaataatggaaaggatgtttaactcttttatctccgaacattgaatgagataaatttccagatgctgttctctattttaatgttattggaccaatgttctgtataaacaattaagatgtaaccatttaatagtctgtaacaatcaacctcagtactgtcactacaatattacattctgcaaatgttattctgttgtatcagatacaaaattttagtgaggtatctctaaggcacatagtagaaaacaaaattggttaattactcaagttcctttcactgtgatttggaaatgatttaatctttatagaatgagaaccttttttggactagcttttttattaaaatggctcaatttgtgttgataaggattgcattaatatttaatagtgcttgcttttcctctgggcacaccattttgatcattaaccagagtacctctactcttagcaaactctagtttatgacaagtatttaaaatatttaaaacaagcttatgcagttcttaaggacgaaggtaaatgagatgtaacttaaaaatagtattgggaaaatgttgatagttaacattagtggatttagactagccaaatgacatagtaggctctgaaacatcttgtcaagtatatgtattttgtgcatgaatttttgctggaaagctgtctttctctgaaaaacacaacgttcttagaatgaaaagaacaattataaaataattatcctatatgtgtttttcattctttttagtgtcatggcttcaaaaatgaaacatttattttaattgccgtaaaggaactgtatttttgttttgttttttaacacagcactttaaatccagtttgtgttttgtcaacttgaactggaatctcttttgttactttggaggtgataaatagttttcaaatctgctgatttgtatactgtggcacaagtatctttgaactttgatagtgaaaggagaccttcaacaatttttagtctaggcgagaggaatattaggaatgtgacttctaaattttacaatagagcagttattttaaggtcatggttaacatttcttaaggttcaactaaaattcagttaaaatttcagagctacgaggaacttaaatcttagctaaaaattacctgttgtagatagtattaattagattgtttgcagctattaattcatcataaagataaaatgaagaaactctccctttttttaaacaaaaaaaattatttctagattaataggctagtagttatttctgcagaaacaacgtatggaactgaaagccacctatttttattttagactaatttaaaccacttggaatggattctaggaaacatcttaagcttgtgtgttgcctgtggtggttttttgtttgggggtgttttttggttttggtttgattttctgtattttgttatctggggattttttgtttgtttgttttggtttggttttggttttatatttttggcatgtctatggcagttaaaagtggtatattttgctttagatagggaatcaggttataatcattgttcttcctctaaactgcctcttgggctttacatcaggtcaaggatttttagggtttctcaaaaataggattcttgtcagtgtatgcatgctgagtaagtcacctttctggctctaatttctgggtggccatctgttgtccagctctgctgccaactggactttccgaaagccatgtcaactaattttttatatgctaagacaaatcgaatatgaaaagaggaagaatattctagatattctaagacatttcttaatttggcatctcagaggaggtaggtggaaagtaaaggaagagataattttgggggaaaatttgtggaaacatacaaaacgttttgctttgtatagatgctaaacagagtgggaggcagcatatttgtaacaacaaccattctgaccttttgaaacacaagcttttggagaagtcagggagagacacagtatgaataaaagcaattaacattttctttaatgtatatttttcaaagaggaccacggaatcctgttctctaacccaaggggcagtgtaggtggttttaagcccacagaatattgagatatttctcttgtggttttggtggggtggtgggatgcagaaggttattaaagatcaatttaagcatcagatagactatcccttttatttttttaacttttaggttcaggggtacatgtgcaggttgttatataggtaaactcatgtcaagtggttttgttgtacagattattttgtcacccaggtgctaagcctagtacccagtagttattttccctgctcttctccctcctcccaccctccaccctcaagtaggccccagtgtctgttgttcctttctttgtgtccttgagttctcatcatttagctcctacttctaaatgagaacatgtatttggttttctgttctgtgttagtttgctaaggataatggcctccagctcagatggaatatctctatcatatagacctgttgttacagggcaggatcggatgatggacactgaagtcctcagcttgctaagttcagttgctctccctagcctccttttggcttcagagtcttttgattccatctatcctggtattttttgtgtgctgatgtttagttctggattggcttcagctgtgctaataggaagggcgttgtcttttcaagcaatcttaaaaggtggtcaatcaaaaggccagagtctgaatcccttctgtggcttaaataatttgaggatcaagtccagtgtcttgttaatccctgttctactgtgccagacactatcttgaatgcttttatatgttcaggttcaaaatcgctctttcataccaggggatgatagtaacgtgtaacttgcaatagattccttcatcttagtaataagatgatcagtctagttaggacaaaatagagattgaataaattaacttttccaagtttacagagtaaaaatgagcagatctctgcctggttttgtgatatatcatcactgaagacaggaagataggcacacagattcttcctcgtagtaattcatagtgcactaggtgaaagagatgaagtatgtattaagtacaatgtgatggcatttattattcagataatcccaggattctagaagaaaataaagaagagtgacagttcagttagggtgtgaacttccagaggagcactgcttaagctgaacttgagagcattgtgcaaaagcacagtagtctgttaagaactagaaataacctagcttgtgccacttcgggagtattaagacataagcctagaaaggtaggcaaaggttagatcttagactgtcttgtatttttctcattcctgttgattacctacctcaaaattgaatatgtttttcctcctgcctaacacaaaactactcaagggcagaaatttaaattcttccttggtgtatgtgcaaagaaggttgaatatattcatgcctaccttattttggactaggaatacagtagtatactttccgaagacttgcctgaatagtatataaggtggaggcaactgactagttaggtcagtatttttagaaactcttaatagctcatactcttgataccaaaagcagccctgattgttaaagcacacacctgcacaagaagcagtgatggttgcatttacatttcctgggtgcacaaaaaaaaattctcaaaaagcaaggacttacgctttttgcaaagcctttgagaagttactggatcataggaagcttataacaagaatggaagattcttaaataactcactttctttggtatccagtaacagtagatgttcaaaatatgtagctgattaataccagcattgtgaacgctgtacaaccttgtggttattactaagcaagttactactagcttctgaaaagtagcttcataattaatgttatttatacactgccttccatgacttttactttgccctaagctaatctccaaaatctgaaatgctactccaatatcagaaaaaaagggggaggtggaattatatttcctgtgattttaagagtacagagaatcatgcacatctctgattagttcatatatgtctagtgtgtaataaaagtcaagatgaactctcaa

SEQ ID NO: 422597 - DNA, 5162 bp, Homo sapiens
gccgtgacaagcccaaccggacggctggagagggcgagaagggcagacgggacatgcagcctcttccgcctgagccccggaagggtgatgtggctgcggcatcgccggcctcgctatgtctgccattttcaattttcagagtctattgactgtaatcttgctgcttatatgtacctgtgcttatattcgatccttggcacccagcctcctggacagaaataaaactggattgttgggtatattttggaagtgtgccagaattggtgaacggaagagtccttatgttgcagtatgctgtatagtaatggccttcagcatcctcttcatacagtagctggggaaaatgccagaatgtagttgccatcagatttgattgtgaacaaggactgactgcagaaaataatggaaaggatgtttaactcttttatctccgaacattgaatgagataaatttccagatgctgttctctattttaatgttattggaccaatgttctgtataaacaattaagatgtaaccatttaatagtctgtaacaatcaacctcagtactgtcactacaatattacattctgcaaatgttattctgttgtatcagatacaaaattttagtgaggtatctctaaggcacatagtagaaaacaaaattggttaattactcaagttcctttcactgtgatttggaaatgatttaatctttatagaatgagaaccttttttggactagcttttttattaaaatggctcaatttgtgttgataaggattgcattaatatttaatagtgcttgcttttcctctgggcacaccattttgatcattaaccagagtacctctactcttagcaaactctagtttatgacaagtatttaaaatatttaaaacaagcttatgcagttcttaaggacgaaggtaaatgagatgtaacttaaaaatagtattgggaaaatgttgatagttaacattagtggatttagactagccaaatgacatagtaggctctgaaacatcttgtcaagtatatgtattttgtgcatgaatttttgctggaaagctgtctttctctgaaaaacacaacgttcttagaatgaaaagaacaattataaaataattatcctatatgtgtttttcattctttttagtgtcatggcttcaaaaatgaaacatttattttaattgccgtaaaggaactgtatttttgttttgttttttaacacagcactttaaatccagtttgtgttttgtcaacttgaactggaatctcttttgttactttggaggtgataaatagttttcaaatctgctgatttgtatactgtggcacaagtatctttgaactttgatagtgaaaggagaccttcaacaatttttagtctaggcgagaggaatattaggaatgtgacttctaaattttacaatagagcagttattttaaggtcatggttaacatttcttaaggttcaactaaaattcagttaaaatttcagagctacgaggaacttaaatcttagctaaaaattacctgttgtagatagtattaattagattgtttgcagctattaattcatcataaagataaaatgaagaaactctccctttttttaaacaaaaaaaattatttctagattaataggctagtagttatttctgcagaaacaacgtatggaactgaaagccacctatttttattttagactaatttaaaccacttggaatggattctaggaaacatcttaagcttgtgtgttgcctgtggtggttttttgtttgggggtgttttttggttttggtttgattttctgtattttgttatctggggattttttgtttgtttgttttggtttggttttggttttatatttttggcatgtctatggcagttaaaagtggtatattttgctttagatagggaatcaggttataatcattgttcttcctctaaactgcctcttgggctttacatcaggtcaaggatttttagggtttctcaaaaataggattcttgtcagtgtatgcatgctgagtaagtcacctttctggctctaatttctgggtggccatctgttgtccagctctgctgccaactggactttccgaaagccatgtcaactaattttttatatgctaagacaaatcgaatatgaaaagaggaagaatattctagatattctaagacatttcttaatttggcatctcagaggaggtaggtggaaagtaaaggaagagataattttgggggaaaatttgtggaaacatacaaaacgttttgctttgtatagatgctaaacagagtgggaggcagcatatttgtaacaacaaccattctgaccttttgaaacacaagcttttggagaagtcagggagagacacagtatgaataaaagcaattaacattttctttaatgtatatttttcaaagaggaccacggaatcctgttctctaacccaaggggcagtgtaggtggttttaagcccacagaatattgagatatttctcttgtggttttggtggggtggtgggatgcagaaggttattaaagatcaatttaagcatcagatagactatcccttttatttttttaacttttaggttcaggggtacatgtgcaggttgttatataggtaaactcatgtcaagtggttttgttgtacagattattttgtcacccaggtgctaagcctagtacccagtagttattttccctgctcttctccctcctcccaccctccaccctcaagtaggccccagtgtctgttgttcctttctttgtgtccttgagttctcatcatttagctcctacttctaaatgagaacatgtatttggttttctgttctgtgttagtttgctaaggataatggcctccagctcagatggaatatctctatcatatagacctgttgttacagggcaggatcggatgatggacactgaagtcctcagcttgctaagttcagttgctctccctagcctccttttggcttcagagtcttttgattccatctatcctggtattttttgtgtgctgatgtttagttctggattggcttcagctgtgctaataggaagggcgttgtcttttcaagcaatcttaaaaggtggtcaatcaaaaggccagagtctgaatcccttctgtggcttaaataatttgaggatcaagtccagtgtcttgttaatccctgttctactgtgccagacactatcttgaatgcttttatatgttcaggttcaaaatcgctctttcataccaggggatgatagtaacgtgtaacttgcaatagattccttcatcttagtaataagatgatcagtctagttaggacaaaatagagattgaataaattaacttttccaagtttacagagtaaaaatgagcagatctctgcctggttttgtgaaaaagagttagcactggtaaatagaatatttctactcctacaccattctttcagtatatcatcactgaagacaggaagataggcacacagattcttcctcgtagtaattcatagtgcactaggtgaaagagatgaagtatgtattaagtacaatgtgatggcatttattattcagataatcccaggattctagaagaaaataaagaagagtgacagttcagttagggtgtgaacttccagaggagcactgcttaagctgaacttgagagcattgtgcaaaagcacagtagtctgttaagaactagaaataacctagcttgtgccacttcgggagtattaagacataagcctagaaaggtaggcaaaggttagatcttagactgtcttgtatttttctcattcctgttgattacctacctcaaaattgaatatgtttttcctcctgcctaacacaaaactactcaagggcagaaatttaaattcttccttggtgtatgtgcaaagaaggttgaatatattcatgcctaccttattttggactaggaatacagtagtatactttccgaagacttgcctgaatagtatataaggtggaggcaactgactagttaggtcagtatttttagaaactcttaatagctcatactcttgataccaaaagcagccctgattgttaaagcacacacctgcacaagaagcagtgatggttgcatttacatttcctgggtgcacaaaaaaaaattctcaaaaagcaaggacttacgctttttgcaaagcctttgagaagttactggatcataggaagcttataacaagaatggaagattcttaaataactcactttctttggtatccagtaacagtagatgttcaaaatatgtagctgattaataccagcattgtgaacgctgtacaaccttgtggttattactaagcaagttactactagcttctgaaaagtagcttcataattaatgttatttatacactgccttccatgacttttactttgccctaagctaatctccaaaatctgaaatgctactccaatatcagaaaaaaagggggaggtggaattatatttcctgtgattttaagagtacagagaatcatgcacatctctgattagttcatatatgtctagtgtgtaataaaagtcaagatgaactctcaaagagcctcctacttttgtcttattgtcagatatgtgaaagcagtttttagaggttagaaaatggaaatttccacctttctagtaggatgagaatagagaaatgttctatttttttttttcctacctgcatttgcattcatggatggccaggattcgttttggggtattatttttattgttgttttgcatcctactagctattggatctactatattgctgttatcattgagtatgctttgaagagccttaaatgactccagcagtttgctttgggtgtgaagtctttaattttcccagagatggtggaaatccgattctgagtgaaagtgacagttatcaattactgagttattttcaaccttgtcctcaactgggagccttcagatgcccaaacattctggcaagtaactattattttctgtctaaaatctgtttgtgagcatagtccatcagtcagattattcagccaatttatactattattagtatttactgagaaatatgaaaaggcttttgtcttgctttgaggaatgtggtcttcctgctgttagcttcccaaaactgaataaacacagaccaacctttgtcaga

SEQ ID NO: 422598 - DNA, 4961 bp, Homo sapiens
  misc_feature (4958)..(4958): n is a, c, g, or t
gccgtgacaagcccaaccggacggctggagagggcgagaagggcagacgggacatgcagcctcttccgcctgagccccggaagggtgatgtggctgcggcatcgccggcctcgctatgtctgccattttcaattttcagagtctattgactgtaatcttgctgcttatatgtacctgtgcttatattcgatccttggcacccagcctcctggacagaaataaaactggattgttgggtatattttggaagtgtgccagaattggtgaacggaagagtccttatgttgcagtatgctgtatagtaatggccttcagcatcctcttcatacagtagctggggaaaatgccagaatgtagttgccatcagatttgattgtgaacaaggactgactgcagaaaataatggaaaggatgtttaactcttttatctccgaacattgaatgagataaatttccagatgctgttctctattttaatgttattggaccaatgttctgtataaacaattaagatgtaaccatttaatagtctgtaacaatcaacctcagtactgtcactacaatattacattctgcaaatgttattctgttgtatcagatacaaaattttagtgaggtatctctaaggcacatagtagaaaacaaaattggttaattactcaagttcctttcactgtgatttggaaatgatttaatctttatagaatgagaaccttttttggactagcttttttattaaaatggctcaatttgtgttgataaggattgcattaatatttaatagtgcttgcttttcctctgggcacaccattttgatcattaaccagagtacctctactcttagcaaactctagtttatgacaagtatttaaaatatttaaaacaagcttatgcagttcttaaggacgaaggtaaatgagatgtaacttaaaaatagtattgggaaaatgttgatagttaacattagtggatttagactagccaaatgacatagtaggctctgaaacatcttgtcaagtatatgtattttgtgcatgaatttttgctggaaagctgtctttctctgaaaaacacaacgttcttagaatgaaaagaacaattataaaataattatcctatatgtgtttttcattctttttagtgtcatggcttcaaaaatgaaacatttattttaattgccgtaaaggaactgtatttttgttttgttttttaacacagcactttaaatccagtttgtgttttgtcaacttgaactggaatctcttttgttactttggaggtgataaatagttttcaaatctgctgatttgtatactgtggcacaagtatctttgaactttgatagtgaaaggagaccttcaacaatttttagtctaggcgagaggaatattaggaatgtgacttctaaattttacaatagagcagttattttaaggtcatggttaacatttcttaaggttcaactaaaattcagttaaaatttcagagctacgaggaacttaaatcttagctaaaaattacctgttgtagatagtattaattagattgtttgcagctattaattcatcataaagataaaatgaagaaactctccctttttttaaacaaaaaaaattatttctagattaataggctagtagttatttctgcagaaacaacgtatggaactgaaagccacctatttttattttagactaatttaaaccacttggaatggattctaggaaacatcttaagcttgtgtgttgcctgtggtggttttttgtttgggggtgttttttggttttggtttgattttctgtattttgttatctggggattttttgtttgtttgttttggtttggttttggttttatatttttggcatgtctatggcagttaaaagtggtatattttgctttagatagggaatcaggttataatcattgttcttcctctaaactgcctcttgggctttacatcaggtcaaggatttttagggtttctcaaaaataggattcttgtcagtgtatgcatgctgagtaagtcacctttctggctctaatttctgggtggccatctgttgtccagctctgctgccaactggactttccgaaagccatgtcaactaattttttatatgctaagacaaatcgaatatgaaaagaggaagaatattctagatattctaagacatttcttaatttggcatctcagaggaggtaggtggaaagtaaaggaagagataattttgggggaaaatttgtggaaacatacaaaacgttttgctttgtatagatgctaaacagagtgggaggcagcatatttgtaacaacaaccattctgaccttttgaaacacaagcttttggagaagtcagggagagacacagtatgaataaaagcaattaacattttctttaatgtatatttttcaaagaggaccacggaatcctgttctctaacccaaggggcagtgtaggtggttttaagcccacagaatattgagatatttctcttgtggttttggtggggtggtgggatgcagaaggttattaaagatcaatttaagcatcagatagactatcccttttatttttttaacttttaggttcaggggtacatgtgcaggttgttatataggtaaactcatgtcaagtggttttgttgtacagattattttgtcacccaggtgctaagcctagtacccagtagttattttccctgctcttctccctcctcccaccctccaccctcaagtaggccccagtgtctgttgttcctttctttgtgtccttgagttctcatcatttagctcctacttctaaatgagaacatgtatttggttttctgttctgtgttagtttgctaaggataatggcctccagctcagatggaatatctctatcatatagacctgttgttacagggcaggatcggatgatggacactgaagtcctcagcttgctaagttcagttgctctccctagcctccttttggcttcagagtcttttgattccatctatcctggtattttttgtgtgctgatgtttagttctggattggcttcagctgtgctaataggaagggcgttgtcttttcaagcaatcttaaaaggtggtcaatcaaaaggccagagtctgaatcccttctgtggcttaaataatttgaggatcaagtccagtgtcttgttaatccctgttctactgtgccagacactatcttgaatgcttttatatgttcaggttcaaaatcgctctttcataccaggggatgatagtaacgtgtaacttgcaatagattccttcatcttagtaataagatgatcagtctagttaggacaaaatagagattgaataaattaacttttccaagtttacagagtaaaaatgagcagatctctgcctggttttgtgaaaaagagttagcactggtaaatagaatatttctactcctacaccattctttcagtatatcatcactgaagacaggaagataggcacacagattcttcctcgtagtaattcatagtgcactaggtgaaagagatgaagtatgtattaagtacaatgtgatggcatttattattcagataatcccaggattctagaagaaaataaagaagagtgacagttcagttagggtgtgaacttccagaggagcactgcttaagctgaacttgagagcattgtgcaaaagcacagtagtctgttaagaactagaaataacctagcttgtgccacttcgggagtattaagacataagcctagaaaggtaggcaaaggttagatcttagactgtcttgtatttttctcattcctgttgattacctacctcaaaattgaatatgtttttcctcctgcctaacacaaaactactcaagggcagaaatttaaattcttccttggtgtatgtgcaaagaaggttgaatatattcatgcctaccttattttggactaggaatacagtagtatactttccgaagacttgcctgaatagtatataaggtggaggcaactgactagttaggtcagtatttttagaaactcttaatagctcatactcttgataccaaaagcagccctgattgttaaagcacacacctgcacaagaagcagtgatggttgcatttacatttcctgggtgcacaaaaaaaaattctcaaaaagcaaggacttacgctttttgcaaagcctttgagaagttactggatcataggaagcttataacaagaatggaagattcttaaataactcactttctttggtatccagtaacagtagatgttcaaaatatgtagctgattaataccagcattgtgaacgctgtacaaccttgtggttattactaagcaagttactactagcttctgaaaagtagcttcataattaatgttatttatacactgccttccatgacttttactttgccctaagctaatctccaaaatctgaaatgctactccaatatcagaaaaaaagggggaggtggaattatatttcctgtgattttaagagtacagagaatcatgcacatctctgattagttcatatatgtctagtgtgtaataaaagtcaagatgaactctcaagaaaacaaaacacaacaaaaacaaaaacaaaaaacctcttttgggagccgccttgggcccccggaaaaacgcttttctaaaaccctttgcttggggcgcgcgcggggccccaagtatgtgttagacgtgtgaacacgtgtggtccatagaggtgttcccccagaggaagaactcggggccaatagcacatgagggcttgggattctcctcccgcatttaaaagaaagcgcccgggggggaaaaccagaaagtggttttgttgaacaaacaattcccccaagtggaggatcttcggagaagacccatagaggggaactcttttcacgaggaggatctccacaggaagagcctccgaaatatcataattagccccggcgttggggagggngtg

SEQ ID NO: 422599 - DNA, 3590 bp, Homo sapiens
  misc_feature (3539)..(3539): n is a, c, g, or t
  misc_feature (3555)..(3555): n is a, c, g, or t
  misc_feature (3557)..(3557): n is a, c, g, or t
gccgtgacaagcccaaccggacggctggagagggcgagaagggcagacgggacatgcagcctcttccgcctgagccccggaagggtgatgtggctgcggcatcgccggcctcgctatgtctgccattttcaattttcagagtctattgactgtaatcttgctgcttatatgtacctgtgcttatattcgatccttggcacccagcctcctggacagaaataaaactggattgttgggtatattttggaagtgtgccagaattggtgaacggaagagtccttatgttgcagtatgctgtatagtaatggccttcagcatcctcttcatacagtagctggggaaaatgccagaatgtagttgccatcagatttgattgtgaacaaggactgactgcagaaaataatggaaaggatgtttaactcttttatctccgaacattgaatgagataaatttccagatgctgttctctattttaatgttattggaccaatgttctgtataaacaattaagatgtaaccatttaatagtctgtaacaatcaacctcagtactgtcactacaatattacattctgcaaatgttattctgttgtatcagatacaaaattttagtgaggtatctctaaggcacatagtagaaaacaaaattggttaattactcaagttcctttcactgtgatttggaaatgatttaatctttatagaatgagaaccttttttggactagcttttttattaaaatggctcaatttgtgttgataaggattgcattaatatttaatagtgcttgcttttcctctgggcacaccattttgatcattaaccagagtacctctactcttagcaaactctagtttatgacaagtatttaaaatatttaaaacaagcttatgcagttcttaaggacgaaggtaaatgagatgtaacttaaaaatagtattgggaaaatgttgatagttaacattagtggatttagactagccaaatgacatagtaggctctgaaacatcttgtcaagtatatgtattttgtgcatgaatttttgctggaaagctgtctttctctgaaaaacacaacgttcttagaatgaaaagaacaattataaaataattatcctatatgtgtttttcattctttttagtgtcatggcttcaaaaatgaaacatttattttaattgccgtaaaggaactgtatttttgttttgttttttaacacagcactttaaatccagtttgtgttttgtcaacttgaactggaatctcttttgttactttggaggtgataaatagttttcaaatctgctgatttgtatactgtggcacaagtatctttgaactttgatagtgaaaggagaccttcaacaatttttagtctaggcgagaggaatattaggaatgtgacttctaaattttacaatagagcagttattttaaggtcatggttaacatttcttaaggttcaactaaaattcagttaaaatttcagagctacgaggaacttaaatcttagctaaaaattacctgttgtagatagtattaattagattgtttgcagctattaattcatcataaagataaaatgaagaaactctccctttttttaaacaaaaaaaattatttctagattaataggctagtagttatttctgcagaaacaacgtatggaactgaaagccacctatttttattttagactaatttaaaccacttggaatggattctaggaaacatcttaagcttgtgtgttgcctgtggtggttttttgtttgggggtgttttttggttttggtttgattttctgtattttgttatctggggattttttgtttgtttgttttggtttggttttggttttatatttttggcatgtctatggcagttaaaagtggtatattttgctttagatagggaatcaggttataatcattgttcttcctctaaactgcctcttgggctttacatcaggtcaaggatttttagggtttctcaaaaataggattcttgtcagtgtatgcatgctgagtaagtcacctttctggctctaatttctgggtggccatctgttgtccagctctgctgccaactggactttccgaaagccatgtcaactaattttttatatgctaagacaaatcgaatatgaaaagaggaagaatattctagatattctaagacatttcttaatttggcatctcagaggaggtaggtggaaagtaaaggaagagataattttgggggaaaatttgtggaaacatacaaaacgttttgctttgtatagatgctaaacagagtgggaggcagcatatttgtaacaacaaccattctgaccttttgaaacacaagcttttggagaagtcagggagagacacagtatgaataaaagcaattaacattttctttaatgtatatttttcaaagaggaccacggaatcctgttctctaacccaaggggcagtgtaggtggttttaagcccacagaatattgagatatttctcttgtggttttggtggggtggtgggatgcagaaggttattaaagatcaatttaagcatcagatagactatcccttttatttttttaacttttaggttcaggggtacatgtgcaggttgttatataggtaaactcatgtcaagtggttttgttgtacagattattttgtcacccaggtgctaagcctagtacccagtagttattttccctgctcttctccctcctcccaccctccaccctcaagtaggccccagtgtctgttgttcctttctttgtgtccttgagttctcatcatttagctcctacttctaaatgagaacatgtatttggttttctgttctgtgttagtttgctaaggataatggcctccagctcagatggaatatctctatcatatagacctgttgttacagggcaggatcggatgatggacactgaagtcctcagcttgctaagttcagttgctctccctagcctccttttggcttcagagtcttttgattccatctatcctggtattttttgtgtgctgatgtttagttctggattggcttcagctgtgctaataggaagggcgttgtcttttcaagcaatcttaaaaggtggtcaatcaaaaggccagagtctgaatcccttctgtggcttaaataatttgaggatcaagtccagtgtcttgttaatccctgttctactgtgccagacactatcttgaatgcttttatatgttcaggttcaaaatcgctctttcataccaggggatgatagtaacgtgtaacttgcaatagattccttcatcttagtaataagatgatcagtctagttaggacaaaatagagattgaataaattaacttttccaagtttacagagtaaaaatgagcagatctctgcctggttttgtgaaaaagagttagcactggtaaatagaatatttctactcctacaccattctttcagtatatcatcactgaagacaggaagataggcacacagattcttcctcgtagtaattcatagtgcactaggtgaaagagatgaagtattgnttgttaagaagaatgncnggtccagtagggggtgcttcacgaggacccttt

SEQ ID NO: 422600 - DNA, 1120 bp, Homo sapiens
gccgtgacaagcccaaccggacggctggagagggcgagaagggcagacgggacatgcagcctcttccgcctgagccccggaagggtgatgtggctgcggcatcgccggcctcgctatgtctgccattttcaattttcagagtctattgactgtaatcttgctgcttatatgtacctgtgcttatattcgatccttggcacccagcctcctggacagaaataaaactggattgttgggtatattttggaagtgtgccagaattggtgaacggaagagtccttatgttgcagtatgctgtatagtaatggccttcagcatcctcttcatacagtagctggggaaaatgccagaatgtagttgccatcagatttgattgtgaacaaggactgactgcagaaaataatggaaaggatgtttaactcttttatctccgaacattgaatgagataaatttccagatgctgttctctattttaatgttattggaccaatgttctgtataaacaattaagatgtaaccatttaatagtctgtaacaatcaacctcagtactgtcactacaatattacattctgcaaatgttattctgttgtatcagatacaaaattttagtgaggtatctctaaggcacatagtagaaaacaaaattggttaattactcaagttcctttcactgtgatttggaaatgatttaatctttatagaatgagaaccttttttggactagcttttttattaaaatggctcaatttgtgttgataaggattgcattaatatttaatagtgcttgcttttcctctgggcacaccattttgatcattaaccagagtacctctactcttagcaaactctagtttatgacaagtatttaaaatatttaaaacaagcttatgcagttcttaaggacgaaggtaaatgagatgtaacttaaaaatagtattgggaaaatgttgatagttaacattagtggatttagactagccaaatgacatagtaggctctgaaacatcttgtcaagtatatgtattttgtgcatgaatttttgctggaaagctgtctttctctgaaaaacacaacgttcttagaatgaaaagaacaattataaaataattatcctata

SEQ ID NO: 422601 - DNA, 1172 bp, Homo sapiens
gccgtgacaagcccaaccggacggctggagagggcgagaagggcagacgggacatgcagcctcttccgcctgagccccggaagggtgatgtggctgcggcatcgccggcctcgctatgtctgccattttcaattttcagagtctattgactgtaatcttgctgcttatatgtacctgtgcttatattcgatccttggcacccagcctcctggacagaaataaaactggattgttgggtatattttggaagtgtgccagaattggtgaacggaagagtccttatgttgcagtatgctgtatagtaatggccttcagcatcctcttcatacagtagctggggaaaatgccagaatgtagttgccatcagatttgattgtgaacaaggactgactgcagaaaataatggaaaggatgtttaactcttttatctccgaacattgaatgagataaatttccagatgctgttctctattttaatgttattggaccaatgttctgtataaacaattaagatgtaaccatttaatagtctgtaacaatcaacctcagtactgtcactacaatattacattctgcaaatgttattctgttgtatcagatacaaaattttagtgaggtatctctaaggcacatagtagaaaacaaaattggttaattactcaagttcctttcactgtgatttggaaatgatttaatctttatagaatgagaaccttttttggactagcttttttattaaaatggctcaatttgtgttgataaggattgcattaatatttaatagtgcttgcttttcctctgggcacaccattttgatcattaaccagagtacctctactcttagcaaactctagtttatgacaagtatttaaaatatttaaaacaagcttatgcagttcttaaggacgaaggtaaatgagatgtaacttaaaaatagtattgggaaaatgttgatagttaacattagtggatttagactagccaaatgacatagtaggctctgaaacatcttgtcaagtatatgtattttgtgcatgaatttttgctggaaagctgtctttctctgaaaaacacaacgttcttagaatgaaaagaacaattataaaataattatcctataaaaacagaacacaccgcacaaataacacaacacaacgccccgcccgcacccc

SEQ ID NO: 422602 - DNA, 941 bp, Homo sapiens
  misc_feature (798)..(798): n is a, c, g, or t
  misc_feature (801)..(801): n is a, c, g, or t
  misc_feature (803)..(804): n is a, c, g, or t
  misc_feature (806)..(806): n is a, c, g, or t
gccgtgacaagcccaaccggacggctggagagggcgagaagggcagacgggacatgcagcctcttccgcctgagccccggaagggtgatgtggctgcggcatcgccggcctcgctatgtctgccattttcaattttcagagtctattgactgtaatcttgctgcttatatgtacctgtgcttatattcgatccttggcacccagcctcctggacagaaataaaactggattgttgggtatattttggaagtgtgccagaattggtgaacggaagagtccttatgttgcagtatgctgtatagtaatggccttcagcatcctcttcatacagtagctggggaaaatgccagaatgtagttgccatcagatttgattgtgaacaaggactgactgcagaaaataatggaaaggatgtttaactcttttatctccgaacattgaatgagataaatttccagatgctgttctctattttaatgttattggaccaatgttctgtataaacaattaagatgtaaccatttaatagtctgtaacaatcaacctcagtactgtcactacaatattacattctgcaaatgttattctgttgtatcagatacaaaattttagtgaggtatctctaaggcacatagtagaaaacaaaattggttaattactcaagttcctttcactgtgatttggaaatgatttaatctttatagaatgagaaccttttttggactagcttttttattaaaatggctcaatttgtgttgataaaaaaaaaaaaaaaaacaaaaaccctcgagttttttntcntnntncttatattattttttttttttttttagaatttatataaatttattaatttatttttaggtgggggaaacatccgaaaaaaagtaaacttgcccagcacttcataggtgtattttgggtttttatccaatttcatt

SEQ ID NO: 422603 - DNA, 4460 bp, Homo sapiens
gccgtgacaagcccaaccggacggctggagagggcgagaagggcagacgggacatgcagcctcttccgcctgagccccggaagggtgatgtggctgcggcatcgccggcctcgctatgattgttgggtatattttggaagtgtgccagaattggtgaacggaagagtccttatgttgcagtatgctgtatagtaatggccttcagcatcctcttcatacagtagctggggaaaatgccagaatgtagttgccatcagatttgattgtgaacaaggactgactgcagaaaataatggaaaggatgtttaactcttttatctccgaacattgaatgagataaatttccagatgctgttctctattttaatgttattggaccaatgttctgtataaacaattaagatgtaaccatttaatagtctgtaacaatcaacctcagtactgtcactacaatattacattctgcaaatgttattctgttgtatcagatacaaaattttagtgaggtatctctaaggcacatagtagaaaacaaaattggttaattactcaagttcctttcactgtgatttggaaatgatttaatctttatagaatgagaaccttttttggactagcttttttattaaaatggctcaatttgtgttgataaggattgcattaatatttaatagtgcttgcttttcctctgggcacaccattttgatcattaaccagagtacctctactcttagcaaactctagtttatgacaagtatttaaaatatttaaaacaagcttatgcagttcttaaggacgaaggtaaatgagatgtaacttaaaaatagtattgggaaaatgttgatagttaacattagtggatttagactagccaaatgacatagtaggctctgaaacatcttgtcaagtatatgtattttgtgcatgaatttttgctggaaagctgtctttctctgaaaaacacaacgttcttagaatgaaaagaacaattataaaataattatcctatatgtgtttttcattctttttagtgtcatggcttcaaaaatgaaacatttattttaattgccgtaaaggaactgtatttttgttttgttttttaacacagcactttaaatccagtttgtgttttgtcaacttgaactggaatctcttttgttactttggaggtgataaatagttttcaaatctgctgatttgtatactgtggcacaagtatctttgaactttgatagtgaaaggagaccttcaacaatttttagtctaggcgagaggaatattaggaatgtgacttctaaattttacaatagagcagttattttaaggtcatggttaacatttcttaaggttcaactaaaattcagttaaaatttcagagctacgaggaacttaaatcttagctaaaaattacctgttgtagatagtattaattagattgtttgcagctattaattcatcataaagataaaatgaagaaactctccctttttttaaacaaaaaaaattatttctagattaataggctagtagttatttctgcagaaacaacgtatggaactgaaagccacctatttttattttagactaatttaaaccacttggaatggattctaggaaacatcttaagcttgtgtgttgcctgtggtggttttttgtttgggggtgttttttggttttggtttgattttctgtattttgttatctggggattttttgtttgtttgttttggtttggttttggttttatatttttggcatgtctatggcagttaaaagtggtatattttgctttagatagggaatcaggttataatcattgttcttcctctaaactgcctcttgggctttacatcaggtcaaggatttttagggtttctcaaaaataggattcttgtcagtgtatgcatgctgagtaagtcacctttctggctctaatttctgggtggccatctgttgtccagctctgctgccaactggactttccgaaagccatgtcaactaattttttatatgctaagacaaatcgaatatgaaaagaggaagaatattctagatattctaagacatttcttaatttggcatctcagaggaggtaggtggaaagtaaaggaagagataattttgggggaaaatttgtggaaacatacaaaacgttttgctttgtatagatgctaaacagagtgggaggcagcatatttgtaacaacaaccattctgaccttttgaaacacaagcttttggagaagtcagggagagacacagtatgaataaaagcaattaacattttctttaatgtatatttttcaaagaggaccacggaatcctgttctctaacccaaggggcagtgtaggtggttttaagcccacagaatattgagatatttctcttgtggttttggtggggtggtgggatgcagaaggttattaaagatcaatttaagcatcagatagactatcccttttatttttttaacttttaggttcaggggtacatgtgcaggttgttatataggtaaactcatgtcaagtggttttgttgtacagattattttgtcacccaggtgctaagcctagtacccagtagttattttccctgctcttctccctcctcccaccctccaccctcaagtaggccccagtgtctgttgttcctttctttgtgtccttgagttctcatcatttagctcctacttctaaatgagaacatgtatttggttttctgttctgtgttagtttgctaaggataatggcctccagctcagatggaatatctctatcatatagacctgttgttacagggcaggatcggatgatggacactgaagtcctcagcttgctaagttcagttgctctccctagcctccttttggcttcagagtcttttgattccatctatcctggtattttttgtgtgctgatgtttagttctggattggcttcagctgtgctaataggaagggcgttgtcttttcaagcaatcttaaaaggtggtcaatcaaaaggccagagtctgaatcccttctgtggcttaaataatttgaggatcaagtccagtgtcttgttaatccctgttctactgtgccagacactatcttgaatgcttttatatgttcaggttcaaaatcgctctttcataccaggggatgatagtaacgtgtaacttgcaatagattccttcatcttagtaataagatgatcagtctagttaggacaaaatagagattgaataaattaacttttccaagtttacagagtaaaaatgagcagatctctgcctggttttgtgaaaaagagttagcactggtaaatagaatatttctactcctacaccattctttcagtatatcatcactgaagacaggaagataggcacacagattcttcctcgtagtaattcatagtgcactaggtgaaagagatgaagtatgtattaagtacaatgtgatggcatttattattcagataatcccaggattctagaagaaaataaagaagagtgacagttcagttagggtgtgaacttccagaggagcactgcttaagctgaacttgagagcattgtgcaaaagcacagtagtctgttaagaactagaaataacctagcttgtgccacttcgggagtattaagacataagcctagaaaggtaggcaaaggttagatcttagactgtcttgtatttttctcattcctgttgattacctacctcaaaattgaatatgtttttcctcctgcctaacacaaaactactcaagggcagaaatttaaattcttccttggtgtatgtgcaaagaaggttgaatatattcatgcctaccttattttggactaggaatacagtagtatactttccgaagacttgcctgaatagtatataaggtggaggcaactgactagttaggtcagtatttttagaaactcttaatagctcatactcttgataccaaaagcagccctgattgttaaagcacacacctgcacaagaagcagtgatggttgcatttacatttcctgggtgcacaaaaaaaaattctcaaaaagcaaggacttacgctttttgcaaagcctttgagaagttactggatcataggaagcttataacaagaatggaagattcttaaataactcactttctttggtatccagtaacagtagatgttcaaaatatgtagctgattaataccagcattgtgaacgctgtacaaccttgtggttattactaagcaagttactactagcttctgaaaagtagcttcataattaatgttatttatacactgccttccatgacttttactttgccctaagctaatctccaaaatctgaaatgctactccaatatcagaaaaaaagggggaggtggaattatatttcctgtgattttaagagtacagagaatcatgcacatctctgattagttcatatatgtctagtgtgtaataaaagtcaagatgaactctcaa

SEQ ID NO: 422604 - DNA, 4417 bp, Homo sapiens
gccttttggagacagattcgcagtggtcgcttcttctccttggatttgttaaggattccaagtaactcttatttgattgttgggtatattttggaagtgtgccagaattggtgaacggaagagtccttatgttgcagtatgctgtatagtaatggccttcagcatcctcttcatacagtagctggggaaaatgccagaatgtagttgccatcagatttgattgtgaacaaggactgactgcagaaaataatggaaaggatgtttaactcttttatctccgaacattgaatgagataaatttccagatgctgttctctattttaatgttattggaccaatgttctgtataaacaattaagatgtaaccatttaatagtctgtaacaatcaacctcagtactgtcactacaatattacattctgcaaatgttattctgttgtatcagatacaaaattttagtgaggtatctctaaggcacatagtagaaaacaaaattggttaattactcaagttcctttcactgtgatttggaaatgatttaatctttatagaatgagaaccttttttggactagcttttttattaaaatggctcaatttgtgttgataaggattgcattaatatttaatagtgcttgcttttcctctgggcacaccattttgatcattaaccagagtacctctactcttagcaaactctagtttatgacaagtatttaaaatatttaaaacaagcttatgcagttcttaaggacgaaggtaaatgagatgtaacttaaaaatagtattgggaaaatgttgatagttaacattagtggatttagactagccaaatgacatagtaggctctgaaacatcttgtcaagtatatgtattttgtgcatgaatttttgctggaaagctgtctttctctgaaaaacacaacgttcttagaatgaaaagaacaattataaaataattatcctatatgtgtttttcattctttttagtgtcatggcttcaaaaatgaaacatttattttaattgccgtaaaggaactgtatttttgttttgttttttaacacagcactttaaatccagtttgtgttttgtcaacttgaactggaatctcttttgttactttggaggtgataaatagttttcaaatctgctgatttgtatactgtggcacaagtatctttgaactttgatagtgaaaggagaccttcaacaatttttagtctaggcgagaggaatattaggaatgtgacttctaaattttacaatagagcagttattttaaggtcatggttaacatttcttaaggttcaactaaaattcagttaaaatttcagagctacgaggaacttaaatcttagctaaaaattacctgttgtagatagtattaattagattgtttgcagctattaattcatcataaagataaaatgaagaaactctccctttttttaaacaaaaaaaattatttctagattaataggctagtagttatttctgcagaaacaacgtatggaactgaaagccacctatttttattttagactaatttaaaccacttggaatggattctaggaaacatcttaagcttgtgtgttgcctgtggtggttttttgtttgggggtgttttttggttttggtttgattttctgtattttgttatctggggattttttgtttgtttgttttggtttggttttggttttatatttttggcatgtctatggcagttaaaagtggtatattttgctttagatagggaatcaggttataatcattgttcttcctctaaactgcctcttgggctttacatcaggtcaaggatttttagggtttctcaaaaataggattcttgtcagtgtatgcatgctgagtaagtcacctttctggctctaatttctgggtggccatctgttgtccagctctgctgccaactggactttccgaaagccatgtcaactaattttttatatgctaagacaaatcgaatatgaaaagaggaagaatattctagatattctaagacatttcttaatttggcatctcagaggaggtaggtggaaagtaaaggaagagataattttgggggaaaatttgtggaaacatacaaaacgttttgctttgtatagatgctaaacagagtgggaggcagcatatttgtaacaacaaccattctgaccttttgaaacacaagcttttggagaagtcagggagagacacagtatgaataaaagcaattaacattttctttaatgtatatttttcaaagaggaccacggaatcctgttctctaacccaaggggcagtgtaggtggttttaagcccacagaatattgagatatttctcttgtggttttggtggggtggtgggatgcagaaggttattaaagatcaatttaagcatcagatagactatcccttttatttttttaacttttaggttcaggggtacatgtgcaggttgttatataggtaaactcatgtcaagtggttttgttgtacagattattttgtcacccaggtgctaagcctagtacccagtagttattttccctgctcttctccctcctcccaccctccaccctcaagtaggccccagtgtctgttgttcctttctttgtgtccttgagttctcatcatttagctcctacttctaaatgagaacatgtatttggttttctgttctgtgttagtttgctaaggataatggcctccagctcagatggaatatctctatcatatagacctgttgttacagggcaggatcggatgatggacactgaagtcctcagcttgctaagttcagttgctctccctagcctccttttggcttcagagtcttttgattccatctatcctggtattttttgtgtgctgatgtttagttctggattggcttcagctgtgctaataggaagggcgttgtcttttcaagcaatcttaaaaggtggtcaatcaaaaggccagagtctgaatcccttctgtggcttaaataatttgaggatcaagtccagtgtcttgttaatccctgttctactgtgccagacactatcttgaatgcttttatatgttcaggttcaaaatcgctctttcataccaggggatgatagtaacgtgtaacttgcaatagattccttcatcttagtaataagatgatcagtctagttaggacaaaatagagattgaataaattaacttttccaagtttacagagtaaaaatgagcagatctctgcctggttttgtgaaaaagagttagcactggtaaatagaatatttctactcctacaccattctttcagtatatcatcactgaagacaggaagataggcacacagattcttcctcgtagtaattcatagtgcactaggtgaaagagatgaagtatgtattaagtacaatgtgatggcatttattattcagataatcccaggattctagaagaaaataaagaagagtgacagttcagttagggtgtgaacttccagaggagcactgcttaagctgaacttgagagcattgtgcaaaagcacagtagtctgttaagaactagaaataacctagcttgtgccacttcgggagtattaagacataagcctagaaaggtaggcaaaggttagatcttagactgtcttgtatttttctcattcctgttgattacctacctcaaaattgaatatgtttttcctcctgcctaacacaaaactactcaagggcagaaatttaaattcttccttggtgtatgtgcaaagaaggttgaatatattcatgcctaccttattttggactaggaatacagtagtatactttccgaagacttgcctgaatagtatataaggtggaggcaactgactagttaggtcagtatttttagaaactcttaatagctcatactcttgataccaaaagcagccctgattgttaaagcacacacctgcacaagaagcagtgatggttgcatttacatttcctgggtgcacaaaaaaaaattctcaaaaagcaaggacttacgctttttgcaaagcctttgagaagttactggatcataggaagcttataacaagaatggaagattcttaaataactcactttctttggtatccagtaacagtagatgttcaaaatatgtagctgattaataccagcattgtgaacgctgtacaaccttgtggttattactaagcaagttactactagcttctgaaaagtagcttcataattaatgttatttatacactgccttccatgacttttactttgccctaagctaatctccaaaatctgaaatgctactccaatatcagaaaaaaagggggaggtggaattatatttcctgtgattttaagagtacagagaatcatgcacatctctgattagttcatatatgtctagtgtgtaataaaagtcaagatgaactctcaa

SEQ ID NO: 422605 - DNA, 629 bp, Homo sapiens
  misc_feature (510)..(511): n is a, c, g, or t
  misc_feature (613)..(614): n is a, c, g, or t
gccgtgacaagcccaaccggacggctggagagggcgagaagggcagacgggacatgcagcctcttccgcctgagccccggaagggtgatgtggctgcggcatcgccggcctcgctatgtctgccattttcaattttcagagtctattgactgtaatcttgctgcttatatgtacctgtgcttatattcgatccttggcacccagcctcctggacagaaataaaactggattgttgggtatattttggaagtgtgccagaattggtgaacggaagagtccttatgttgcagtatgctgtatagtaatggccttcagcatcctcttcatacagtagctggggaaaatgccagaatgtagttgccatcagatttgattgtgaacaaggactgactgcagaaaataatggaaaggatgtttaactcttttatctccgaacattgaatgagataaatttccagatgctgttctctattttaatgttattggaccaatgttctgtataaacaaatnntaagatgctccccccatcctcacccccccctgccccaccaatccacaccctcaagtaacgtgttcacctaccatattattcaccattcctgccaaaatggtnntattcctggttggta

SEQ ID NO: 422606 - DNA, 286 bp, Homo sapiens
gccgtgacaagcccaaccggacggctggagagggcgagaagggcagacgggacatgcagcctcttccgcctgagccccggaagggtgatgtggctgcggcatcgccggcctcgctatgtctgccattttcaattttcagagtctattgactgtaatcttgctgcttatatgtacctgtgcttatattcgatccttggcacccagcctcctggacagaaataaaactggattgttgggtatattttgtagcgtggccagaaggaggggatcctcaagagtcaccgga

SEQ ID NO: 422607 - DNA, 3664 bp, Homo sapiens
ggccgccggaagcgcctcggtgcgttgcaccgccggaggctgggcagctcgcagcgctgctcggcgctggaccccacccggcaggcgcaggccacccacacccggctctgtgcggctgccccccgcagcattgcacggccgaccctcgcccgcccactgccaccggccgcgggactggctgggactggctcggccgagggcactgctcctcggtgcattgctgctcgggcgccgcagcccgcagccgccagcctcccccggccgtgcccctcccccgtggagccggctgtccgtcggcgcccactgcccggcggcagcggcggagccaggcagccccgcggcggccgagcgcgctcgcgcatcgggccctctggccttctttacctagggcagcccgcgccccggtgcgagggagcggtccttaccgagacccgcccggcccggcggtgcgatgagcttcttcggcttcgggcagagcgtggaggtggaaatccttctgaacgatgcagagagtaggaagcgggccgagcacaagacggaggacgggaagaaggagaaatatttcctcttctacgacggggagacggtctccgggaaggtgagccttgccctcaagaaccccaacaagcggctggagcaccagggcatcaagatcgagttcatcgggcagatcgaactctactacgatcgcgggaaccaccatgagtttgtgtccctggtgaaggacctggcccggcctggagagatcacccagtcgcaggccttcgactttgagtttacccacgtggagaagccgtatgagtcctacacagggcagaatgtgaagctacgctatttccttcgtgctaccatcagccgccgcctcaatgatgttgtcaaagagatggacattgtagttcacacactcagcacatacccagagctgaactcttccatcaagatggaggttgggattgaggactgtctgcacattgaatttgagtacaataaatccaaataccacttgaaagatgtcattgtagggaagatatacttcctgctggtgagaatcaaaatcaagcacatggagatagacatcatcaagcgagaaacgacgggtacaggccccaacgtgtaccatgagaatgacacgatagccaagtacgagatcatggacggggcaccagtgcgaggagagtccatcccgatccggctcttcctggccgggtatgagctcacgcccaccatgcgggacatcaacaagaagttctctgtgcgctattacctcaacctggtgctgatagacgaggaggagcggcgctacttcaagcagcaggaagtggtgttgtggcggaagggtgacatcgtacggaagagcatgtcccaccaggcggccatcgcctcacagcgctttgagggcaccacctccctgggtgaggtgcggacccccagccagctgtctgacaacaactgcaggcagtaggcccccagggccgagaagatgctgggcacccacccagcacccccatctaccaacaccagcggctgggggcgggggcggaccttgtgaggctcagttgacccgttacttgcaacctgaaaacaaatcatgtttttgacttaaattcttttctctggagaacccaaggggcttggggtgggaagcagtctctccttgggattctgcggccgatgtgggatagaagaggtagcatcctggaagccagcctctctggggaacatgagcccccttcctcggggggctgccttgcgtcttagaggagggagagcagagagcacgcatccttggctcctggctctctgagcttcctgatacaggatctgagcatgtccctgggattctgagctgccaacagggccctgggtagtcacatcttgtactcccctttgctgtcccggaggtagtggcaggagttgggccagcccccactaagtggcaggggaagactcacgattgggaagctacctctttgggaatcttggatgtggtgatctcaagttcccacaggccacctccttctggccactcactgctgggacccaggcacctcccttctccatcctctctggattgtcagtaatgtcctggaacagaagcctgtaggatggccttgggcacggagaagccctggggtcagtgtcgtgcacggatggcggcagtgttgaacccaggaggctgaacccggcccaccacggaagatgagtgcatggcaaccgcctgccttcacgtcgctccacttggtaaccccaaggtctgggctgttctaggtattgcttcacgtgccccagcaagcccttaacaagagggcctggttccctgaagaaccaatcccaggaaggggccttgatccctccgccttgctgagagtgaaccctcgtctctcctcaccctccatttcatttctgggaattggggcttagtttcgaacctttggcaaggctgttcttactaatgcccaagcccctttacccctctccctataggttacacaggggagaccagggcctcggcagaagactgctgccacacttccgaatcattctgcttgccaaataggtcatcttcaccagttgactgacccaagtttaggaccattggtatcgtgtgtttaaaaaacacatataaaaaaactcttgtgaatattcttgttatgctagagaggaaggtacttctccctctacggctctgcgctggggcctatggtagtaaagttgtttactgtcctttttctgcttcccctggaaatgacaggcattactctcccattggcctcccttccctttatagaaagaccaagcaggccccactggccaagaggtacggtatttggcagtctgagttctcagtaatttggaaagttaaggagttggttcctgtgtcacctttcagttagtgtgggaaaggaagacttctgttttcctgagatcagtgcagtctcaggcctttggcagggctcatggatcagagctgagactggagggagaggcatttcgggtagcctaggagggcgactggcggcagcagaaccgaggaaggcaaggttgtttcccccacgctgtgtcctgtgttcaggtgcgacacacaatcctcatgggaacaggatcacccatgcgctgcccttgatgatcaaggttggggcttaagtggataagggaggcaagttctgggttccttgccttttcagagcatgaggtcaggctctgtatccctccttttcctagctgatattctaactagaagcatttgtcaattcctttgcctcccaactgacaacacacgttcattttccaaccttcctaacatcttaaacctttcttctgggagaactagaagacagaatttgctttgattctctcaggcgctgtgcacaagccaggtcttctgttttctctttcttactctacccacattcttgccttctctatccaactgtgaaagtgaggggaggctcctgtccccctctcttaaggtccccaaacctgggagtgcataggtactaaatcaagcagtgcaacttgtaattaagcagctgcagtgtttacatgtttcttaatgtgtcatcttttcaatggctgtattaaaagaagaacgtttgttttaatggtctttctgattaaagaaagcccctgtggctttggaggcattgtgcccacggtccaccaa

SEQ ID NO: 422608 - DNA, 4069 bp, Homo sapiens
ggccgccggaagcgcctcggtgcgttgcaccgccggaggctgggcagctcgcagcgctgctcggcgctggaccccacccggcaggcgcaggccacccacacccggctctgtgcggctgccccccgcagcattgcacggccgaccctcgcccgcccactgccaccggccgcgggactggctgggactggctcggccgagggcactgctcctcggtgcattgctgctcgggcgccgcagcccgcagccgccagcctcccccggccgtgcccctcccccgtggagccggctgtccgtcggcgcccactgcccggcggcagcggcggagccaggcagccccgcggcggccgagcgcgctcgcgcatcgggccctctggccttctttacctagggcagcccgcgccccggtgcgagggagcggtccttaccgagacccgcccggcccggcggtgcgatgagcttcttcggcttcgggcagagcgtggaggtggaaatccttctgaacgatgcagagagtaggaagcgggccgagcacaagacggaggacgggaagaaggagaaatatttcctcttctacgacggggagacggtctccgggaaggtgagccttgccctcaagaaccccaacaagcggctggagcaccagggcatcaagatcgagttcatcgggcagatcgaactctactacgatcgcgggaaccaccatgagtttgtgtccctggtgaaggacctggcccggcctggagagatcacccagtcgcaggccttcgactttgagtttacccacgtggagaagccgtatgagtcctacacagggcagaatgtgaagctacgtggatttgtcttaagcgtttgtacggcagaaagaaaggtgttgaaaccagtatagcagtgcctcaaaaaattaaacagaattaccatatgatctagcaattcctcttttggatccagaagcggatccaaaagaatggaaaacaggatctcgaacggatatctgtacacccatattcacagcagcattattcgcaataaccaaaaggtagaagcaacccaagtgtccatcagtgggtaaatggacacaggaaatgtgttttgtccgtacagtggactgttatacagccttcaaaaggaaggacattctgtcctatgctacaacatgggtgaacctaaaggacattgtgctacgtgaaagaagcctgtcacaaaaggacaaatactgtctgattccatatatatgagctatttccttcgtgctaccatcagccgccgcctcaatgatgttgtcaaagagatggacattgtagttcacacactcagcacatacccagagctgaactcttccatcaagatggaggttgggattgaggactgtctgcacattgaatttgagtacaataaatccaaataccacttgaaagatgtcattgtagggaagatatacttcctgctggtgagaatcaaaatcaagcacatggagatagacatcatcaagcgagaaacgacgggtacaggccccaacgtgtaccatgagaatgacacgatagccaagtacgagatcatggacggggcaccagtgcgaggagagtccatcccgatccggctcttcctggccgggtatgagctcacgcccaccatgcgggacatcaacaagaagttctctgtgcgctattacctcaacctggtgctgatagacgaggaggagcggcgctacttcaagcagcaggaagtggtgttgtggcggaagggtgacatcgtacggaagagcatgtcccaccaggcggccatcgcctcacagcgctttgagggcaccacctccctgggtgaggtgcggacccccagccagctgtctgacaacaactgcaggcagtaggcccccagggccgagaagatgctgggcacccacccagcacccccatctaccaacaccagcggctgggggcgggggcggaccttgtgaggctcagttgacccgttacttgcaacctgaaaacaaatcatgtttttgacttaaattcttttctctggagaacccaaggggcttggggtgggaagcagtctctccttgggattctgcggccgatgtgggatagaagaggtagcatcctggaagccagcctctctggggaacatgagcccccttcctcggggggctgccttgcgtcttagaggagggagagcagagagcacgcatccttggctcctggctctctgagcttcctgatacaggatctgagcatgtccctgggattctgagctgccaacagggccctgggtagtcacatcttgtactcccctttgctgtcccggaggtagtggcaggagttgggccagcccccactaagtggcaggggaagactcacgattgggaagctacctctttgggaatcttggatgtggtgatctcaagttcccacaggccacctccttctggccactcactgctgggacccaggcacctcccttctccatcctctctggattgtcagtaatgtcctggaacagaagcctgtaggatggccttgggcacggagaagccctggggtcagtgtcgtgcacggatggcggcagtgttgaacccaggaggctgaacccggcccaccacggaagatgagtgcatggcaaccgcctgccttcacgtcgctccacttggtaaccccaaggtctgggctgttctaggtattgcttcacgtgccccagcaagcccttaacaagagggcctggttccctgaagaaccaatcccaggaaggggccttgatccctccgccttgctgagagtgaaccctcgtctctcctcaccctccatttcatttctgggaattggggcttagtttcgaacctttggcaaggctgttcttactaatgcccaagcccctttacccctctccctataggttacacaggggagaccagggcctcggcagaagactgctgccacacttccgaatcattctgcttgccaaataggtcatcttcaccagttgactgacccaagtttaggaccattggtatcgtgtgtttaaaaaacacatataaaaaaactcttgtgaatattcttgttatgctagagaggaaggtacttctccctctacggctctgcgctggggcctatggtagtaaagttgtttactgtcctttttctgcttcccctggaaatgacaggcattactctcccattggcctcccttccctttatagaaagaccaagcaggccccactggccaagaggtacggtatttggcagtctgagttctcagtaatttggaaagttaaggagttggttcctgtgtcacctttcagttagtgtgggaaaggaagacttctgttttcctgagatcagtgcagtctcaggcctttggcagggctcatggatcagagctgagactggagggagaggcatttcgggtagcctaggagggcgactggcggcagcagaaccgaggaaggcaaggttgtttcccccacgctgtgtcctgtgttcaggtgcgacacacaatcctcatgggaacaggatcacccatgcgctgcccttgatgatcaaggttggggcttaagtggataagggaggcaagttctgggttccttgccttttcagagcatgaggtcaggctctgtatccctccttttcctagctgatattctaactagaagcatttgtcaattcctttgcctcccaactgacaacacacgttcattttccaaccttcctaacatcttaaacctttcttctgggagaactagaagacagaatttgctttgattctctcaggcgctgtgcacaagccaggtcttctgttttctctttcttactctacccacattcttgccttctctatccaactgtgaaagtgaggggaggctcctgtccccctctcttaaggtccccaaacctgggagtgcataggtactaaatcaagcagtgcaacttgtaattaagcagctgcagtgtttacatgtttcttaatgtgtcatcttttcaatggctgtattaaaagaagaacgtttgttttaatggtctttctgattaaagaaagcccctgtggctttggaggcattgtgcccacggtccaccaa

SEQ ID NO: 422609 - DNA, 2767 bp, Homo sapiens
gatgcttatactaataatgacctgtgctgttcccactcagttgctctctgttttcgagaagacatgagaagctgcaacatgacctggagtggaactggagagtcacatttttgtttcagccacctgctgggcagcagagcgactgcaccttcccagaaggctgaagtgctcgtgtgctgcactccagtggcatctctgcagtggtcagagtgacctggtataagggagagggcatcaccttgccccctgtgctgactcctgccctccccctacaggagagtccatcccgatccggctcttcctggccgggtatgagctcacgcccaccatgcgggacatcaacaagaagttctctgtgcgctattacctcaacctggtgctgatagacgaggaggagcggcgctacttcaagcagcaggaagtggtgttgtggcggaagggtgacatcgtacggaagagcatgtcccaccaggcggccatcgcctcacagcgctttgagggcaccacctccctgggtgaggtgcggacccccagccagctgtctgacaacaactgcaggcagtaggcccccagggccgagaagatgctgggcacccacccagcacccccatctaccaacaccagcggctgggggcgggggcggaccttgtgaggctcagttgacccgttacttgcaacctgaaaacaaatcatgtttttgacttaaattcttttctctggagaacccaaggggcttggggtgggaagcagtctctccttgggattctgcggccgatgtgggatagaagaggtagcatcctggaagccagcctctctggggaacatgagcccccttcctcggggggctgccttgcgtcttagaggagggagagcagagagcacgcatccttggctcctggctctctgagcttcctgatacaggatctgagcatgtccctgggattctgagctgccaacagggccctgggtagtcacatcttgtactcccctttgctgtcccggaggtagtggcaggagttgggccagcccccactaagtggcaggggaagactcacgattgggaagctacctctttgggaatcttggatgtggtgatctcaagttcccacaggccacctccttctggccactcactgctgggacccaggcacctcccttctccatcctctctggattgtcagtaatgtcctggaacagaagcctgtaggatggccttgggcacggagaagccctggggtcagtgtcgtgcacggatggcggcagtgttgaacccaggaggctgaacccggcccaccacggaagatgagtgcatggcaaccgcctgccttcacgtcgctccacttggtaaccccaaggtctgggctgttctaggtattgcttcacgtgccccagcaagcccttaacaagagggcctggttccctgaagaaccaatcccaggaaggggccttgatccctccgccttgctgagagtgaaccctcgtctctcctcaccctccatttcatttctgggaattggggcttagtttcgaacctttggcaaggctgttcttactaatgcccaagcccctttacccctctccctataggttacacaggggagaccagggcctcggcagaagactgctgccacacttccgaatcattctgcttgccaaataggtcatcttcaccagttgactgacccaagtttaggaccattggtatcgtgtgtttaaaaaacacatataaaaaaactcttgtgaatattcttgttatgctagagaggaaggtacttctccctctacggctctgcgctggggcctatggtagtaaagttgtttactgtcctttttctgcttcccctggaaatgacaggcattactctcccattggcctcccttccctttatagaaagaccaagcaggccccactggccaagaggtacggtatttggcagtctgagttctcagtaatttggaaagttaaggagttggttcctgtgtcacctttcagttagtgtgggaaaggaagacttctgttttcctgagatcagtgcagtctcaggcctttggcagggctcatggatcagagctgagactggagggagaggcatttcgggtagcctaggagggcgactggcggcagcagaaccgaggaaggcaaggttgtttcccccacgctgtgtcctgtgttcaggtgcgacacacaatcctcatgggaacaggatcacccatgcgctgcccttgatgatcaaggttggggcttaagtggataagggaggcaagttctgggttccttgccttttcagagcatgaggtcaggctctgtatccctccttttcctagctgatattctaactagaagcatttgtcaattcctttgcctcccaactgacaacacacgttcattttccaaccttcctaacatcttaaacctttcttctgggagaactagaagacagaatttgctttgattctctcaggcgctgtgcacaagccaggtcttctgttttctctttcttactctacccacattcttgccttctctatccaactgtgaaagtgaggggaggctcctgtccccctctcttaaggtccccaaacctgggagtgcataggtactaaatcaagcagtgcaacttgtaattaagcagctgcagtgtttacatgtttcttaatgtgtcatcttttcaatggctgtattaaaagaagaacgtttgttttaatggtctttctgattaaagaaagcccctgtggctttggaggcattgtgcccacggtccaccaa

SEQ ID NO: 422610 - DNA, 2519 bp, Homo sapiens
cttatatagaggacgcacatttgcgatgagagtccatcccgatccggctcttcctggccgggtatgagctcacgcccaccatgcgggacatcaacaagaagttctctgtgcgctattacctcaacctggtgctgatagacgaggaggagcggcgctacttcaagcagcaggaagtggtgttgtggcggaagggtgacatcgtacggaagagcatgtcccaccaggcggccatcgcctcacagcgctttgagggcaccacctccctgggtgaggtgcggacccccagccagctgtctgacaacaactgcaggcagtaggcccccagggccgagaagatgctgggcacccacccagcacccccatctaccaacaccagcggctgggggcgggggcggaccttgtgaggctcagttgacccgttacttgcaacctgaaaacaaatcatgtttttgacttaaattcttttctctggagaacccaaggggcttggggtgggaagcagtctctccttgggattctgcggccgatgtgggatagaagaggtagcatcctggaagccagcctctctggggaacatgagcccccttcctcggggggctgccttgcgtcttagaggagggagagcagagagcacgcatccttggctcctggctctctgagcttcctgatacaggatctgagcatgtccctgggattctgagctgccaacagggccctgggtagtcacatcttgtactcccctttgctgtcccggaggtagtggcaggagttgggccagcccccactaagtggcaggggaagactcacgattgggaagctacctctttgggaatcttggatgtggtgatctcaagttcccacaggccacctccttctggccactcactgctgggacccaggcacctcccttctccatcctctctggattgtcagtaatgtcctggaacagaagcctgtaggatggccttgggcacggagaagccctggggtcagtgtcgtgcacggatggcggcagtgttgaacccaggaggctgaacccggcccaccacggaagatgagtgcatggcaaccgcctgccttcacgtcgctccacttggtaaccccaaggtctgggctgttctaggtattgcttcacgtgccccagcaagcccttaacaagagggcctggttccctgaagaaccaatcccaggaaggggccttgatccctccgccttgctgagagtgaaccctcgtctctcctcaccctccatttcatttctgggaattggggcttagtttcgaacctttggcaaggctgttcttactaatgcccaagcccctttacccctctccctataggttacacaggggagaccagggcctcggcagaagactgctgccacacttccgaatcattctgcttgccaaataggtcatcttcaccagttgactgacccaagtttaggaccattggtatcgtgtgtttaaaaaacacatataaaaaaactcttgtgaatattcttgttatgctagagaggaaggtacttctccctctacggctctgcgctggggcctatggtagtaaagttgtttactgtcctttttctgcttcccctggaaatgacaggcattactctcccattggcctcccttccctttatagaaagaccaagcaggccccactggccaagaggtacggtatttggcagtctgagttctcagtaatttggaaagttaaggagttggttcctgtgtcacctttcagttagtgtgggaaaggaagacttctgttttcctgagatcagtgcagtctcaggcctttggcagggctcatggatcagagctgagactggagggagaggcatttcgggtagcctaggagggcgactggcggcagcagaaccgaggaaggcaaggttgtttcccccacgctgtgtcctgtgttcaggtgcgacacacaatcctcatgggaacaggatcacccatgcgctgcccttgatgatcaaggttggggcttaagtggataagggaggcaagttctgggttccttgccttttcagagcatgaggtcaggctctgtatccctccttttcctagctgatattctaactagaagcatttgtcaattcctttgcctcccaactgacaacacacgttcattttccaaccttcctaacatcttaaacctttcttctgggagaactagaagacagaatttgctttgattctctcaggcgctgtgcacaagccaggtcttctgttttctctttcttactctacccacattcttgccttctctatccaactgtgaaagtgaggggaggctcctgtccccctctcttaaggtccccaaacctgggagtgcataggtactaaatcaagcagtgcaacttgtaattaagcagctgcagtgtttacatgtttcttaatgtgtcatcttttcaatggctgtattaaaagaagaacgtttgttttaatggtctttctgattaaagaaagcccctgtggctttggaggcattgtgcccacggtccaccaa

SEQ ID NO: 422611 - DNA, 3262 bp, Homo sapiens
ggccgccggaagcgcctcggtgcgttgcaccgccggaggctgggcagctcgcagcgctgctcggcgctggaccccacccggcaggcgcaggccacccacacccggctctgtgcggctgccccccgcagcattgcacggccgaccctcgcccgcccactgccaccggccgcgggactggctgggactggctcggccgagggcactgctcctcggtgcattgctgctcgggcgccgcagcccgcagccgccagcctcccccggccgtgcccctcccccgtggagccggctgtccgtcggcgcccactgcccggcggcagcggcggagccaggcagccccgcggcggccgagcgcgctcgcgcatcgggccctctggccttctttacctagggcagcccgcgccccggtgcgagggagcggtccttaccgagacccgcccggcccggcggtgcgatgagcttcttcggcttcgggcagagcgtggaggtggaaatccttctgaacgatgcagagagtaggaagcgggccgagcacaagacggaggacgggaagaaggagaaatatttcctcttctacgacggggagacggtctccgggaaggtgagccttgccctcaagaaccccaacaagcggctggagcaccagggcatcaagatcgagttcatcgggcagatcgaactctactacgatcgcgggaaccaccatgagtttgtgtccctggtgaaggacctggcccggcctggagagatcacccagtcgcaggccttcgactttgagtttacccacgtggagaagccgtatgagtcctacacagggcagaatgtgaagctacgctatttccttcgtgctaccatcagccgccgcctcaatgatgttgtcaaagagatggacattgtagttcacacactcagcacatacccagagctgaactcttccatcaagatggaggttgggattgaggactgtctgcacattgaatttgagtacaataaatccaaataccacttgaaagatgtcattgtagggaagatatacttcctgctggtgagaatcaaaatcaagcacatggagatagacatcatcaagcgagaaacgacgggtacaggccccaacgtgtaccatgagaatgacacgatagccaagtacgagatcatggacggggcaccagtgcgaggagagtccatcccgatccggctcttcctggccgggtatgagctcacgcccaccatgcgggacatcaacaagaagttctctgtgcgctattacctcaacctggtgctgatagacgaggaggagcggcgctacttcaagcagcaggaagtggtgttgtggcggaagggtgacatcgtacggaagagcatgtcccaccaggcggccatcgcctcacagcgctttgagggcaccacctccctgggtgaggtgcggacccccagccagctgtctgacaacaactgcaggcagtaggcccccagggccgagaagatgctgggcacccacccagcacccccatctaccaacaccagcggctgggggcgggggcggaccttgtgaggctcagttgacccgttacttgcaacctgaaaacaaatcatgtttttgacttaaattcttttctctggagaacccaaggggcttggggtgggaagcagtctctccttgggattctgcggccgatgtgggatagaagaggtagcatcctggaagccagcctctctggggaacatgagcccccttcctcggggggctgccttgcgtcttagaggagggagagcagagagcacgcatccttggctcctggctctctgagcttcctgatacaggatctgagcatgtccctgggattctgagctgccaacagggccctgggtagtcacatcttgtactcccctttgctgtcccggaggtagtggcaggagttgggccagcccccactaagtggcaggggaagactcacgattgggaagctacctctttgggaatcttggatgtggtgatctcaagttcccacaggccacctccttctggccactcactgctgggacccaggcacctcccttctccatcctctctggattgtcagtaatgtcctggaacagaagcctgtaggatggccttgggcacggagaagccctggggtcagtgtcgtgcacggatggcggcagtgttgaacccaggaggctgaacccggcccaccacggaagatgagtgcatggcaaccgcctgccttcacgtcgctccacttggtaaccccaaggtctgggctgttctaggtattgcttcacgtgccccagcaagcccttaacaagagggcctggttccctgaagaaccaatcccaggaaggggccttgatccctccgccttgctgagagtgaaccctcgtctctcctcaccctccatttcatttctgggaattggggcttagtttcgaacctttggcaaggctgttcttactaatgcccaagcccctttacccctctccctataggttacacaggggagaccagggcctcggcagaagactgctgccacacttccgaatcattctgcttgccaaataggtcatcttcaccagttgactgacccaagtttaggaccattggtatcgtgtgtttaaaaaacacatataaaaaaactcttgtgaatattcttgttatgctagagaggaaggtacttctccctctacggctctgcgctggggcctatggtagtaaagttgtttactgtcctttttctgcttcccctggaaatgacaggcattactctcccattggcctcccttccctttatagaaagaccaagcaggccccactggccaagaggtacggtatttggcagtctgagttctcagtaatttggaaagttaaggagttggttcctgtgtcacctttcagttagtgtgggaaaggaagacttctgttttcctgagatcagtgcagtctcaggcctttggcagggctcatggatcagagctgagactggagggagaggcatttcgggtagcctaggagggcgactggcggcagcagaaccgaggaaggcaaggttgtttcccccacgctgtgtcctgtgttcaggtgcgacacacaatcctcatgggaacaggatcacccatgcgctgcccttgatgatcaaggttggggcttaagtggataagggaggccaatgggagagtaatgcctgtcatttccaggggaagcagaaaaaggacagtaacaactttactaccatagccccttttccagagcaagggatcctctagatcc

SEQ ID NO: 422612 - DNA, 2521 bp, Homo sapiens
ggccgccggaagcgcctcggtgcgttgcaccgccggaggctgggcagctcgcagcgctgctcggcgctggaccccacccggcaggcgcaggccacccacacccggctctgtgcggctgccccccgcagcattgcacggccgaccctcgcccgcccactgccaccggccgcgggactggctgggactggctcggccgagggcactgctcctcggtgcattgctgctcgggcgccgcagcccgcagccgccagcctcccccggccgtgcccctcccccgtggagccggctgtccgtcggcgcccactgcccggcggcagcggcggagccaggcagccccgcggcggccgagcgcgctcgcgcatcgggccctctggccttctttacctagggcagcccgcgccccggtgcgagggagcggtccttaccgagacccgcccggcccggcggtgcgatgagcttcttcggcttcgggcagagcgtggaggtggaaatccttctgaacgatgcagagagtaggaagcgggccgagcacaagacggaggacgggaagaaggagaaatatttcctcttctacgacggggagacggtctccgggaaggtgagccttgccctcaagaaccccaacaagcggctggagcaccagggcatcaagatcgagttcatcgggcagatcgaactctactacgatcgcgggaaccaccatgagtttgtgtccctggtgaaggacctggcccggcctggagagatcacccagtcgcaggccttcgactttgagtttacccacgtggagaagccgtatgagtcctacacagggcagaatgtgaagctacgctatttccttcgtgctaccatcagccgccgcctcaatgatgttgtcaaagagatggacattgtagttcacacactcagcacatacccagagctgaactcttccatcaagatggaggttgggattgaggactgtctgcacattgaatttgagtacaataaatccaaataccacttgaaagatgtcattgtagggaagatatacttcctgctggtgagaatcaaaatcaagcacatggagatagacatcatcaagcgagaaacgacgggtacaggccccaacgtgtaccatgagaatgacacgatagccaagtacgagatcatggacggggcaccagtgcgaggagagtccatcccgatccggctcttcctggccgggtatgagctcacgcccaccatgcgggacatcaacaagaagttctctgtgcgctattacctcaacctggtgctgatagacgaggaggagcggcgctacttcaagcagcaggaagtggtgttgtggcggaagggtgacatcgtacggaagagcatgtcccaccaggcggccatcgcctcacagcgctttgagggcaccacctccctgggtgaggtgcggacccccagccagctgtctgacaacaactgcaggcagtaggcccccagggccgagaagatgctgggcacccacccagcacccccatctaccaacaccagcggctgggggcgggggcggaccttgtgaggctcagttgacccgttacttgcaacctgaaaacaaatcatgtttttgacttaaattcttttctctggagaacccaaggggcttggggtgggaagcagtctctccttgggattctgcggccgatgtgggatagaagaggtagcatcctggaagccagcctctctggggaacatgagcccccttcctcggggggctgccttgcgtcttagaggagggagagcagagagcacgcatccttggctcctggctctctgagcttcctgatacaggatctgagcatgtccctgggattctgagctgccaacagggccctgggtagtcacatcttgtactcccctttgctgtcccggaggtagtggcaggagttgggccagcccccactaagtggcaggggaagactcacgattgggaagctacctctttgggaatcttggatgtggtgatctcaagttcccacaggccacctccttctggccactcactgctgggacccaggcacctcccttctccatcctctctggattgtcagtaatgtcctggaacagaagcctgtaggatggccttgggcacggagaagccctggggtcagtgtcgtgcacggatggcggcagtgttgaacccaggaggctgaacccggcccaccacggaagatgagtgcatggcaaccgcctgccttcacgtcgctccacttggtaaccccaaggtctgggctgttctaggtattgcttcacgtgccccagcaagcccttaacaagagggcctggttccctgaagaaccaatcccaaacctgggagtgcataggtactaaatcaagcagtgcaacttgtaattaagcagctgcagtgtttacatgtttcttaatgtgtcatcttttcaatggctgtattaaaagaagaacgtttgttttaatggtctttctgattaaagaaagcccctgtggctttggaggcattgtgcccacggtccaccaa

SEQ ID NO: 422613 - DNA, 1152 bp, Homo sapiens
ggccgccggaagcgcctcggtgcgttgcaccgccggaggctgggcagctcgcagcgctgctcggcgctggaccccacccggcaggcgcaggccacccacacccggctctgtgcggctgccccccgcagcattgcacggccgaccctcgcccgcccactgccaccggccgcgggactggctgggactggctcggccgagggcactgctcctcggtgcattgctgctcgggcgccgcagcccgcagccgccagcctcccccggccgtgcccctcccccgtggagccggctgtccgtcggcgcccactgcccggcggcagcggcggagccaggcagccccgcggcggccgagcgcgctcgcgcatcgggccctctggccttctttacctagggcagcccgcgccccggtgcgagggagcggtccttaccgagacccgcccggcccggcggtgcgatgagcttcttcggcttcgggcagagcgtggaggtggaaatccttctgaacgatgcagagagtaggaagcgggccgagcacaagacggaggacgggaagaaggagaaatatttcctcttctacgacggggagacggtctccgggaaggtgagccttgccctcaagaaccccaacaagcggctggagcaccagggcatcaagatcgagttcatcgggcagatcgaactctactacgatcgcgggaaccaccatgagtttgtgtccctggtgaaggacctggcccggcctggagagatcacccagtcgcaggccttcgactttgagtttacccacgtggagaagccgtatgagtcctacacagggcagaatgtgaagctacgctatttccttcgtgctaccatcagccgccgcctcaatgatgttgtcaaagagatggacattgtagttcacacactcagcacatacccagagctgaactcttccatcaagatggaggttgggattgaggactgtctgcacattgaatttgagtacaataaatccaacttcagctgtttcccgctactgctaagaacaatctcagaataccattccattatcatgtgctccctccatctgtgtcttcagaaatcaaagcgacgaaaccaaatattggccatgatttgctgcttcctccctgaactaaaatgaattatagcaaa

SEQ ID NO: 422614 - DNA, 715 bp, Homo sapiens
ggccgccggaagcgcctcggtgcgttgcaccgccggaggctgggcagctcgcagcgctgctcggcgctggaccccacccggcaggcgcaggccacccacacccggctctgtgcggctgccccccgcagcattgcacggccgaccctcgcccgcccactgccaccggccgcgggactggctgggactggctcggccgagggcactgctcctcggtgcattgctgctcgggcgccgcagcccgcagccgccagcctcccccggccgtgcccctcccccgtggagccggctgtccgtcggcgcccactgcccggcggcagcggcggagccaggcagccccgcggcggccgagcgcgctcgcgcatcgggccctctggccttctttacctagggcagcccgcgccccggtgcgagggagcggtccttaccgagacccgcccggcccggcggtgcgatgagcttcttcggcttcgggcagagcgtggaggtggaaatccttctgaacgatgcagagagtaggaagcgggccgagcacaagacggaggacgggaagaaggagaaatatttcctcttctacgacggggagacggtctccgggaaggtgagccttgccctcaagaaccccaacaagcggctggagcaccagggcatcaagatcgagttcatcgggcagatcggtgagtcgacccccgggaccccctcccccagcgccgacagc

SEQ ID NO: 422615 - DNA, 3664 bp, Homo sapiens
  misc_feature (386)..(386): n is a, c, g, or t
  misc_feature (399)..(399): n is a, c, g, or t
  misc_feature (409)..(409): n is a, c, g, or t
  misc_feature (413)..(413): n is a, c, g, or t
  misc_feature (427)..(427): n is a, c, g, or t
  misc_feature (505)..(505): n is a, c, g, or t
  misc_feature (514)..(514): n is a, c, g, or t
  misc_feature (560)..(560): n is a, c, g, or t
  misc_feature (563)..(563): n is a, c, g, or t
ggccgccggaagcgcctcggtgcgttgcaccgccggaggctgggcagctcgcagcgctgctcggcgctggaccccacccggcaggcgcaggccacccacacccggctctgtgcggctgccccccgcagcattgcacggccgaccctcgcccgcccactgccaccggccgcgggactggctgggactggctcggccgagggcactgctcctcggtgcattgctgctcgggcgccgcagcccgcagccgccagcctcccccggccgtgcccctcccccgtggagccggctgtccgtcggcgcccactgcccggcggcagcggcggagccaggcagccccgcggcggccgagcgcgctcgcgcatcgggccctctggccttctttaaanaaggaaaaaaganaaaaggtganaagnaaaggtaattaaanaaaaaagaaaggaaaggaggtgcgaaaaaattattaggcttagggaaaaaagtggaagtggaaaaaattataaaaaangaaaaaaanaaaaaaagggacgaaaaaaaaaaggaggaagggaaaaaaaaaaaanaantaatattataaaaaggggagacggtctccgggaaggtgagccttgccctcaagaaccccaacaagcggctggagcaccagggcatcaagatcgagttcatcgggcagatcgaactctactacgatcgcgggaaccaccatgagtttgtgtccctggtgaaggacctggcccggcctggagagatcacccagtcgcaggccttcgactttgagtttacccacgtggagaagccgtatgagtcctacacagggcagaatgtgaagctacgctatttccttcgtgctaccatcagccgccgcctcaatgatgttgtcaaagagatggacattgtagttcacacactcagcacatacccagagctgaactcttccatcaagatggaggttgggattgaggactgtctgcacattgaatttgagtacaataaatccaaataccacttgaaagatgtcattgtagggaagatatacttcctgctggtgagaatcaaaatcaagcacatggagatagacatcatcaagcgagaaacgacgggtacaggccccaacgtgtaccatgagaatgacacgatagccaagtacgagatcatggacggggcaccagtgcgaggagagtccatcccgatccggctcttcctggccgggtatgagctcacgcccaccatgcgggacatcaacaagaagttctctgtgcgctattacctcaacctggtgctgatagacgaggaggagcggcgctacttcaagcagcaggaagtggtgttgtggcggaagggtgacatcgtacggaagagcatgtcccaccaggcggccatcgcctcacagcgctttgagggcaccacctccctgggtgaggtgcggacccccagccagctgtctgacaacaactgcaggcagtaggcccccagggccgagaagatgctgggcacccacccagcacccccatctaccaacaccagcggctgggggcgggggcggaccttgtgaggctcagttgacccgttacttgcaacctgaaaacaaatcatgtttttgacttaaattcttttctctggagaacccaaggggcttggggtgggaagcagtctctccttgggattctgcggccgatgtgggatagaagaggtagcatcctggaagccagcctctctggggaacatgagcccccttcctcggggggctgccttgcgtcttagaggagggagagcagagagcacgcatccttggctcctggctctctgagcttcctgatacaggatctgagcatgtccctgggattctgagctgccaacagggccctgggtagtcacatcttgtactcccctttgctgtcccggaggtagtggcaggagttgggccagcccccactaagtggcaggggaagactcacgattgggaagctacctctttgggaatcttggatgtggtgatctcaagttcccacaggccacctccttctggccactcactgctgggacccaggcacctcccttctccatcctctctggattgtcagtaatgtcctggaacagaagcctgtaggatggccttgggcacggagaagccctggggtcagtgtcgtgcacggatggcggcagtgttgaacccaggaggctgaacccggcccaccacggaagatgagtgcatggcaaccgcctgccttcacgtcgctccacttggtaaccccaaggtctgggctgttctaggtattgcttcacgtgccccagcaagcccttaacaagagggcctggttccctgaagaaccaatcccaggaaggggccttgatccctccgccttgctgagagtgaaccctcgtctctcctcaccctccatttcatttctgggaattggggcttagtttcgaacctttggcaaggctgttcttactaatgcccaagcccctttacccctctccctataggttacacaggggagaccagggcctcggcagaagactgctgccacacttccgaatcattctgcttgccaaataggtcatcttcaccagttgactgacccaagtttaggaccattggtatcgtgtgtttaaaaaacacatataaaaaaactcttgtgaatattcttgttatgctagagaggaaggtacttctccctctacggctctgcgctggggcctatggtagtaaagttgtttactgtcctttttctgcttcccctggaaatgacaggcattactctcccattggcctcccttccctttatagaaagaccaagcaggccccactggccaagaggtacggtatttggcagtctgagttctcagtaatttggaaagttaaggagttggttcctgtgtcacctttcagttagtgtgggaaaggaagacttctgttttcctgagatcagtgcagtctcaggcctttggcagggctcatggatcagagctgagactggagggagaggcatttcgggtagcctaggagggcgactggcggcagcagaaccgaggaaggcaaggttgtttcccccacgctgtgtcctgtgttcaggtgcgacacacaatcctcatgggaacaggatcacccatgcgctgcccttgatgatcaaggttggggcttaagtggataagggaggcaagttctgggttccttgccttttcagagcatgaggtcaggctctgtatccctccttttcctagctgatattctaactagaagcatttgtcaattcctttgcctcccaactgacaacacacgttcattttccaaccttcctaacatcttaaacctttcttctgggagaactagaagacagaatttgctttgattctctcaggcgctgtgcacaagccaggtcttctgttttctctttcttactctacccacattcttgccttctctatccaactgtgaaagtgaggggaggctcctgtccccctctcttaaggtccccaaacctgggagtgcataggtactaaatcaagcagtgcaacttgtaattaagcagctgcagtgtttacatgtttcttaatgtgtcatcttttcaatggctgtattaaaagaagaacgtttgttttaatggtctttctgattaaagaaagcccctgtggctttggaggcattgtgcccacggtccaccaa

SEQ ID NO: 422616 - DNA, 3601 bp, Homo sapiens
ggccgccggaagcgcctcggtgcgttgcaccgccggaggctgggcagctcgcagcgctgctcggcgctggaccccacccggcaggcgcaggccacccacacccggctctgtgcggctgccccccgcagcattgcacggccgaccctcgcccgcccactgccaccggccgcgggactggctgggactggctcggccgagggcactgctcctcggtgcattgctgctcgggcgccgcagcccgcagccgccagcctcccccggccgtgcccctcccccgtggagccggctgtccgtcggcgcccactgcccggcggcagcggcggagccaggcagccccgcggcggccgagcgcgctcgcgcatcgggccctctggccttctttacctagggcagcccgcgccccggtgcgagggagcggtccttaccgagacccgcccggcccggcggtgcgatgagcttcttcggcttcgggcagagcgtggaggtggaaatccttctgaacgatgcagagagtaggaagcgggccgagcacaagacggaggacgggaagaaggagaaatatttcctcttctacgacggggagacggtctccgggaaggtgagccttgccctcaagaaccccaacaagcggctggagcaccagggcatcaagatcgagttcatcgggcagatcgaactctactacgatcgcgggaaccaccatgagtttgtgtccctggtgaaggacctggcccggcctggagagatcacccagtcgcaggccttcgactttgagtttacccacgtggagaagccgtatgagtcctacacagggcagaatgtgaagctacgctatttccttcgtgctaccatcagccgccgcctcaatgatgttgtcaaagagatggacattgtagttcacacactcagcacatacccagagctgaactcttccatcaagatggaggttgggattgaggactgtctgcacattgaatttgagtacaataaatccaaataccacttgaaagatgtcattgtagggaagatatacttcctgctggtgagaatcaaaatcaagcacatggagatagacatcatcaagcgagaaacgacgggtacaggccccaacgtgtaccatgagaatgacacgatagccaagtacgagatcatggacggggcaccagtgcgaggagagtccatcccgatccggctcttcctggccgggtatgagctcacgcccaccatgcgggacatcaacaagaagttctctgtgcgctattacctcaacctggtgctgatagacgaggaggagcggcgctacttcaagcagcaggaagtggtgttgtggcggaagggtgacatcgtacggaagagcatgtcccaccaggcggccatcgcctcacagcgctttgagggcaccacctccctgggtgaggtgcggacccccagccagctgtctgacaacaactgcaggcagtaggcccccagggccgagaagatgctgggcacccacccagcacccccatctaccaacaccagcggctgggggcgggggcggaccttgtgaggctcagttgacccgttacttgcaacctgaaaacaaatcatgtttttgacttaaattcttttctctggagaacccaaggggcttggggtgggaagcagtctctccttgggattctgcggccgatgtgggatagaagaggtagcatcctggaagccagcctctctggggaacatgagcccccttcctcggggggctgccttgcgtcttagaggagggagagcagagagcacgcatccttggctcctggctctctgagcttcctgatacaggatctgagcatgtccctgggattctgagctgccaacagggccctgggtagtcacatcttgtactcccctttgctgtcccggaggtagtggcaggagttgggccagcccccactaagtggcaggggaagactcacgattgggaagctacctctttgggaatcttggatgtggtgatctcaagttcccacaggccacctccttctggccactcactgctgggacccaggcacctcccttctccatcctctctggattgtcagtaatgtcctggaacagaagcctgtaggatggccttgggcacggagaagccctggggtcagtgtcgtgcacggatggcggcagtgttgaacccaggaggctgaacccggcccaccacggaagatgagtgcatggcaaccgcctgccttcacgtcgctccacttggtaaccccaaggtctgggctgttctaggtattgcttcacgtgccccagcaagcccttaacaagagggcctggttccctgaagaaccaatcccaggaaggggccttgatccctccgccttgctgagagtgaaccctcgtctctcctcaccctccatttcatttctgggaattggggcttagtttcgaacctttggcaaggctgttcttactaatgcccaagcccctttacccctctccctataggttacacaggggagaccagggcctcggcagaagactgctgccacacttccgaatcattctgcttgccaaataggtcatcttcaccagttgactgacccaagtttaggaccattggtatcgtgtgtttaaaaaacacatataaaaaaactcttgtgaatattcttgttatgctagagaggaaggtacttctccctctacggctctgcgctggggcctatggtagtaaagttgtttactgtcctttttctgcttcccctggaaatgacaggcattactctcccattggcctcccttccctttatagaaagaccaagcaggccccactggccaagaggtacggtatttggcagtctgagttctcagtaatttggaaagttaaggagttggttcctgtgtcacctttcagttagtgtgggaaaggaagacttctgttttcctgagatcagtgcagtctcaggcctttggcagggctcatggatcagagctgagactggagggagaggcatttcgggtagcctaggagggcgactggcggcagcagaaccgaggaaggcaaggttgtttcccccacgctgtgtcctgtgttcaggtgcgacacacaatcctcatgggaacaggatcacccatgcgctgcccttgatgatcaaggttggggcttaagtggataagggaggcaagttctgggttccttgccttttcagagcatgaggtcaggctctgtatccctccttttcctagctgatattctaactagaagcatttgtcaattcctttgcctcccaactgacaacacacgttcattttccaaccttcctaacatcttaaacctttcttctgggagaactagaagacagaatttgctttgattctctcaggcgctgtgcacaagccaggtcttctgttttctctttcttactctacccacattcttgccttctctatccaactgtgaaagtgaggggaggctcctgtccccctctcttaaggtccccaaacctgggagtgcataggtactaaatcaagcagtgcaacttgtaattaagcagctgcagtgtttacatgtttcttaatgtgtcatcttttcaatggctgtattaaaagaagaacgtttgtttta

SEQ ID NO: 422617 - DNA, 2437 bp, Homo sapiens
tacccggccaggaagagccggatcgggatggactctcctcgcactggtgctgatagacgaggaggagcggcgctacttcaagcagcaggaagtggtgttgtggcggaagggtgacatcgtacggaagagcatgtcccaccaggcggccatcgcctcacagcgctttgagggcaccacctccctgggtgaggtgcggacccccagccagctgtctgacaacaactgcaggcagtaggcccccagggccgagaagatgctgggcacccacccagcacccccatctaccaacaccagcggctgggggcgggggcggaccttgtgaggctcagttgacccgttacttgcaacctgaaaacaaatcatgtttttgacttaaattcttttctctggagaacccaaggggcttggggtgggaagcagtctctccttgggattctgcggccgatgtgggatagaagaggtagcatcctggaagccagcctctctggggaacatgagcccccttcctcggggggctgccttgcgtcttagaggagggagagcagagagcacgcatccttggctcctggctctctgagcttcctgatacaggatctgagcatgtccctgggattctgagctgccaacagggccctgggtagtcacatcttgtactcccctttgctgtcccggaggtagtggcaggagttgggccagcccccactaagtggcaggggaagactcacgattgggaagctacctctttgggaatcttggatgtggtgatctcaagttcccacaggccacctccttctggccactcactgctgggacccaggcacctcccttctccatcctctctggattgtcagtaatgtcctggaacagaagcctgtaggatggccttgggcacggagaagccctggggtcagtgtcgtgcacggatggcggcagtgttgaacccaggaggctgaacccggcccaccacggaagatgagtgcatggcaaccgcctgccttcacgtcgctccacttggtaaccccaaggtctgggctgttctaggtattgcttcacgtgccccagcaagcccttaacaagagggcctggttccctgaagaaccaatcccaggaaggggccttgatccctccgccttgctgagagtgaaccctcgtctctcctcaccctccatttcatttctgggaattggggcttagtttcgaacctttggcaaggctgttcttactaatgcccaagcccctttacccctctccctataggttacacaggggagaccagggcctcggcagaagactgctgccacacttccgaatcattctgcttgccaaataggtcatcttcaccagttgactgacccaagtttaggaccattggtatcgtgtgtttaaaaaacacatataaaaaaactcttgtgaatattcttgttatgctagagaggaaggtacttctccctctacggctctgcgctggggcctatggtagtaaagttgtttactgtcctttttctgcttcccctggaaatgacaggcattactctcccattggcctcccttccctttatagaaagaccaagcaggccccactggccaagaggtacggtatttggcagtctgagttctcagtaatttggaaagttaaggagttggttcctgtgtcacctttcagttagtgtgggaaaggaagacttctgttttcctgagatcagtgcagtctcaggcctttggcagggctcatggatcagagctgagactggagggagaggcatttcgggtagcctaggagggcgactggcggcagcagaaccgaggaaggcaaggttgtttcccccacgctgtgtcctgtgttcaggtgcgacacacaatcctcatgggaacaggatcacccatgcgctgcccttgatgatcaaggttggggcttaagtggataagggaggcaagttctgggttccttgccttttcagagcatgaggtcaggctctgtatccctccttttcctagctgatattctaactagaagcatttgtcaattcctttgcctcccaactgacaacacacgttcattttccaaccttcctaacatcttaaacctttcttctgggagaactagaagacagaatttgctttgattctctcaggcgctgtgcacaagccaggtcttctgttttctctttcttactctacccacattcttgccttctctatccaactgtgaaagtgaggggaggctcctgtccccctctcttaaggtccccaaacctgggagtgcataggtactaaatcaagcagtgcaacttgtaattaagcagctgcagtgtttacatgtttcttaatgtgtcatcttttcaatggctgtattaaaagaagaacgtttgttttaatggtctttctgattaaagaaagcccctgtggctttggaggcattgtgcccacggtccaccaa

SEQ ID NO: 422618 - DNA, 3082 bp, Homo sapiens
ggccgccggaagcgcctcggtgcgttgcaccgccggaggctgggcagctcgcagcgctgctcggcgctggaccccacccggcaggcgcaggccacccacacccggctctgtgcggctgccccccgcagcattgcacggccgaccctcgcccgcccactgccaccggccgcgggactggctgggactggctcggccgagggcactgctcctcggtgcattgctgctcgggcgccgcagcccgcagccgccagcctcccccggccgtgcccctcccccgtggagccggctgtccgtcggcgcccactgcccggcggcagcggcggagccaggcagccccgcggcggccgagcgcgctcgcgcatcgggccctctggccttctttacctagggcagcccgcgccccggtgcgagggagcggtccttaccgagacccgcccggcccggcggtgcgatgagcttcttcggcttcgggcagagcgtggaggtggaaatccttctgaacgatgcagagagtaggaagcgggccgagcacaagacggaggacgggaagaaggagaaatatttcctcttctacgacggggagacggtctccgggaaggtgagccttgccctcaagaaccccaacaagcggctggagcaccagggcatcaagatcgagttcatcgggcagatcgaactctactacgatcgcgggaaccaccatgagtttgtgtccctggtgaaggacctggcccggcctggagagatcacccagtcgcaggccttcgactttgagtttacccacgtggagaagccgtatgagtcctacacagggcagaatgtgaagctacgctatttccttcgtgctaccatcagccgccgcctcaatgatgttgtcaaagagatggacattgtagttcacacactcagcacatacccagagctgaactcttccatcaagatggaggttgggattgaggactgtctgcacattgaatttgagtacaataaatccaaataccacttgaaagatgtcattgtagggaagatatacttcctgctggtgagaatcaaaatcaagcacatggagatagacatcatcaagcgagaaacgacgggtacaggccccaacgtgtaccatgagaatgacacgatagccaagtacgagatcatggacggggcaccagtgcgaggagagtccatcccgatccggctcttcctggccgggtatgagctcacgcccaccatgcgggacatcaacaagaagttctctgtgcgctattacctcaacctggtgctgatagacgaggaggagcggcgctacttcaagcagcaggaagtggtgttgtggcggaagggtgacatcgtacggaagagcatgtcccaccaggcggccatcgcctcacagcgctttgagggcaccacctccctgggtgaggtgcggacccccagccagctgtctgacaacaactgcaggcagtaggcccccagggccgagaagatgctgggcacccacccagcacccccatctaccaacaccagcggctgggggcgggggcggaccttgtgaggctcagttgacccgttacttgcaacctgaaaacaaatcatgtttttgacttaaattcttttctctggagaacccaaggggcttggggtgggaagcagtctctccttgggattctgcggccgatgtgggatagaagaggtagcatcctggaagccagcctctctggggaacatgagcccccttcctcggggggctgccttgcgtcttagaggagggagagcagagagcacgcatccttggctcctggctctctgagcttcctgatacaggatctgagcatgtccctgggattctgagctgccaacagggccctgggtagtcacatcttgtactcccctttgctgtcccggaggtagtggcaggagttgggccagcccccactaagtggcaggggaagactcacgattgggaagctacctctttgggaatcttggatgtggtgatctcaagttcccacaggccacctccttctggccactcactgctgggacccaggcacctcccttctccatcctctctggattgtcagtaatgtcctggaacagaagcctgtaggatggccttgggcacggagaagccctggggtcagtgtcgtgcacggatggcggcagtgttgaacccaggaggctgaacccggcccaccacggaagatgagtgcatggcaaccgcctgccttcacgtcgctccacttggtaaccccaaggtctgggctgttctaggtattgcttcacgtgccccagcaagcccttaacaagagggcctggttccctgaagaaccaatcccaggaaggggccttgatccctccgccttgctgagagtgaaccctcgtctctcctcaccctccatttcatttctgggaattggggcttagtttcgaacctttggcaaggctgttcttactaatgcccaagcccctttacccctctccctataggttacacaggggagaccagggcctcggcagaagactgctgccacacttccgaatcattctgcttgccaaataggtcatcttcaccagttgactgacccaagtttaggaccattggtatcgtgtgtttaaaaaacacatataaaaaaactcttgtgaatattcttgttatgctagagaggaaggtacttctccctctacggctctgcgctggggcctatggtagtaaagttgtttactgtcctttttctgcttcccctggaaatgacaggcattactctcccattggcctcccttccctttatagaaagaccaagcaggccccactggccaagaggtacggtatttggcagtctgagttctcagtaatttggaaagttaaggagttggttcctgtgtcacctttcagttagtgtgggaaaggaagacttctgttttcctgagatcagtgcagtctcaggcctttggcagggctcatggatcagagctgagactggagggagaggcatttcgggtagcctaggagggcctcggcagaagactgctgccacaccttccgaatcattctgcttgccaaataggtcatcttcaccagttgagc

SEQ ID NO: 422619 - DNA, 1485 bp, Homo sapiens
ggccgccggaagcgcctcggtgcgttgcaccgccggaggctgggcagctcgcagcgctgctcggcgctggaccccacccggcaggcgcaggccacccacacccggctctgtgcggctgccccccgcagcattgcacggccgaccctcgcccgcccactgccaccggccgcgggactggctgggactggctcggccgagggcactgctcctcggtgcattgctgctcgggcgccgcagcccgcagccgccagcctcccccggccgtgcccctcccccgtggagccggctgtccgtcggcgcccactgcccggcggcagcggcggagccaggcagccccgcggcggccgagcgcgctcgcgcatcgggccctctggccttctttacctagggcagcccgcgccccggtgcgagggagcggtccttaccgagacccgcccggcccggcggtgcgatgagcttcttcggcttcgggcagagcgtggaggtggaaatccttctgaacgatgcagagagtaggaagcgggccgagcacaagacggaggacgggaagaaggagaaatatttcctcttctacgacggggagacggtctccgggaaggtgagccttgccctcaagaaccccaacaagcggctggagcaccagggcatcaagatcgagttcatcgggcagatcgaactctactacgatcgcgggaaccaccatgagtttgtgtccctggtgaaggacctggcccggcctggagagatcacccagtcgcaggccttcgactttgagtttacccacgtggagaagccgtatgagtcctacacagggcagaatgtgaagctacggtaagtgatgtctgctggttccccactgtaccctagaacctgccccatgtggacaaggacctgaggccgtccccactttgaggatcttcacagggatcccgagaaggaagagtgtcgcgagctgtggcgtgctggtaaaccattaaccgtgggccttctaggaggaaagtggccctaggttgtagcatgtgtcaatttctgtagtgtacatagccccgccatggccaatttcaagctacctaatgttcctaaatgtagaggtgggagagatgtgctattaccatcatatggagacacattccctcaagagcagagagcattgtaaagggccggaaaataggaagtgatgagattttcgcatgtcttacctttgtttttaacatgattcatttaattgtgagtttatataatttaactttaaataattgctgtgtttaacagccaggtcataaaattcctgaaagttcaacgtcagccacccccagcacactcctgctggctgggtgtcaggagatcctgacctgctgtccggctctgccacacagctgcagtgtgaccttgagctctgtaactcagctttctcacttcaaagtgggtaatggacttggattctaattctagatgtcctcttcttttgggggtgataagaaaata

SEQ ID NO: 422620 - DNA, 4837 bp, Homo sapiens
agcgtcgtttctaggcaaccgcagactccgggtccttagccgggcctgatggccctgaggcagttcggatgtgtcccaggaagtgcccatgtgtggtccgccgtccattccacacctctgagcgcctttgtcctctgaacttctcaccagttctagcgagtaaaattgcgtcccagatgttgtggaactgtccctggatctatagctcttcaccgtctctactttcttccttctaagagatcctgaaacctctgtcatggaaaagtaccacgtgttggagatgattggagaaggctcttttgggagggtgtacaagggtcgaagaaaatacagtgctcaggtcgtggccctgaagttcatcccaaaattggggcgctcagagaaggagctgaggaatttgcaacgagagattgaaataatgcggggtctgcggcatcccaacattgtgcatatgcttgacagctttgaaactgataaagaggtggtggtggtgacagactatgctgagggagagctctttcagatcctagaagatgacggaaaacttcctgaagaccaggttcaggccattgctgcccagttggtgtcagccctgtactatctgcattcccaccgcatcctacaccgagatatgaagcctcagaacatcctcctcgccaagggtggtggcatcaagctctgtgactttggatttgcccgggctatgagcaccaatacaatggtgctgacatccatcaaaggcacaccactctatatgtctccagagctggtggaggagcgaccatacgaccacacagcggacctctggtctgttggctgcatactatatgaactggcagtaggcacccctcccttctatgctacaagcatctttcagctggtcagcctcattctcaaggaccctgtgcgctggccctcaaccatcagtccctgctttaagaacttcctgcagggactgctcaccaaagacccacggcagcgactgtcctggccagacctcttatatcacccctttattgctggtcatgtcaccataataactgagccagcaggcccagatttggggaccccattcaccagccgcctacccccagaacttcaggtcctaaaggacgaacaggcccatcggttggcccccaagggtaatcagtctcgcatcttgactcaggcctataaacgcatggctgaggaggccatgcagaagaaacatcagaacacaggacctgcccttgagcaagaggacaagaccagcaaggtggctcctggcacagcccctctgcccagactcggggccactcctcaggaatcaagcctcctggccgggatcttagcctcagaattgaagagcagctgggctaaatcagggactggagaggtgccctctgcacctcgggaaaaccggaccaccccagattgtgaacgagcattcccagaggagaggccagaggtgctgggccagcggagcactgatgtagtggacctggaaaatgaggagccagacagtgacaatgagtggcagcacctgctagagaccactgagcctgtgcctattcaactgaaggctcctctcaccttgctgtgtaatcctgacttctgccagcgcatccagagtcagctgcatgaagctggagggcagatcctgaaaggcatcttggagggtgcttcccacatcctgcctgcattccgggtcctgagcagtcttctctccagctgcagtgattctgttgccttgtattccttctgccgggaggcagggcttcctgggctgctgctgagtctactcaggcacagtcaggagagcaacagcctccagcagcaatcttggtatgggaccttcttacaggacctgatggctgtgattcaggcctactttgcctgtaccttcaatctggagaggagccagacaagtgacagcctgcaggtgtttcaggaggctgccaacctttttctggacctgttggggaaactgctggcccaaccagatgactctgagcagactttgcggagggacagccttatgtgctttactgtcctgtgcgaagccatggatgggaacagccgggccatctccaaagccttttactccagcttgctgacgacacagcaggttgtcttggatgggctccttcatggcttgacagttccacagctccctgtccacactccccaaggagccccgcaagtgagccagccactgcgagagcagagtgaggatatacctggagccatttcctctgccctggcagccatatgcactgctcctgtgggactgcccgactgctgggatgccaaggagcaggtctgttggcatttggcaaatcagctaactgaagacagcagccagctcaggccatccctcatctctggcctgcagcatcccatcctgtgcctgcaccttctcaaggttctatactcctgctgccttgtcagtgagggcctgtgccgtcttctggggcaggagcccctggccttggaatccctgtttatgttgattcagggcaaggtaaaagtagtagattgggaagagtctactgaagtgacactctacttcctctcccttcttgtctttcggctccaaaacctgccttgtggaatggagaagctaggcagtgacgttgctactctctttacccattcgcatgtcgtctctcttgtgagtgcagcagcctgtctattgggacagcttggtcagcaaggggtgacctttgacctccagcccatggaatggatggctgcagccacacatgccttgtctgcccctgcagagcaggggaaggctagcctaatcagggatatgtccagttcagaaatgtggaccgttttgtggcaccgcttctccatggtcctgaggctccccgaggaggcatctgcacaggaaggggagctttcgctatccagtccaccaagccctgagccagactggacactgatttctccccagggcatggcagccctgctgagcctggccatggccacctttacccaggagccccagttatgcctgagctgcctgtcccagcatggaagtatcctcatgtccatcctgaagcatctgctttgccccagcttcctgaatcaactgcgccaggcgcctcatgggtctgagtttctccctgtcgtggtgctctctgtctgccagctcctttgcttcccctttgcgctggacatggatgctgacctccttataggtgtcttggccgacctcagggactcagaagttgcagcccatctgctgcaggtctgctgctaccatcttccgttgatgcaagtggagctgcccatcagccttctcacacgcctggccctcatggatcccacctctctcaaccagtttgtgaacacagtgtctgcctcccctagaaccatcgtctcgtttctctcagttgccctcctgagtgaccagccactgttgacctccgaccttctctctctgctggcccatactgccagggtcctgtctcccagccacttgtcctttatccaagagcttctggctggctctgatgaatcctatcggcccctgcgcagcctcctgggccacccagagaattctgtgcgggcacacacttataggctcctgggacacttgctccaacacagcatggccctgcgtggggcactgcagagccagtctggactgctcagccttctgctgcttgggcttggagacaaggatcctgttgtgcggtgcagtgccagctttgctgtgggcaatgcagcctaccaggctggtcctctgggacctgccctggcagctgcagtgcccagtatgacccagctgcttggagatcctcaggctggtatccggcgcaatgttgcatcagctctgggcaacttgggacctgaaggtttgggagaggagctgttacagtgcgaagtaccccagcggctcctagaaatggcatgtggagacccccagccaaatgtgaaggaggctgccctcattgccctccggagcctgcaacaggagcctggcatccatcaggtactggtgtccctgggtgccagtgagaaactatccttgctctctctggggaatcagtcactgccacacagcagtcctaggcctgcctctgccaaacactgcaggaaactcattcacctcctgaggccagcccatagcatgtgattccagattcctgcggtccagcctccaactttggttgccagctctttcttattctactacacaagccgccaactcaactgagagctaaagagactagaaaagagataagctgccaactcaactgagaacaagaaactagaagagatttatatataaagcttcttccttctcccagatgcaggatgttttcaaccagtaaattttattgctgttggtgccagagaagagtcctttcttctctacatccaggggccttttctccaataatgtgcctttaactctagggacctgcctcacggaccttagggaaaaacctcaacctgaaagatctcttcctttctggagctcctttaatcttcccagcaggtttttgccttagacgtgctggccccaggacagtgatgaagacagagcctgtctcagctctaggctgtggggatcaatgccatcagtccctgttattgagggattatcccttagccaacattcctatctgtgggtgggcgtggagagtgtatctttttttggggtgtgtgtgtatatgtgtgtgtgtatgtgtgtgtgtgtttaatagttctgtttgtaaactcttttaataaaagttgtgcctcaccatacttgaagctcccaggacaagggttgagaggctcaacccctctttcagcttctatgtggtgttggaggtgctggtatcgtgttcacacaaga

SEQ ID NO: 422621 - DNA, 490 bp, Homo sapiens
gggcgtctagaggctccctcctgcgttcagtggtagtcttgctgccagtcggggaacgtggctgacccctcctccaggtagacctctgaaatatggatgtgtctgaaagatctcttcctttctggagctcctttaatcttcccagcaggtttttgccttagacgtgctggccccaggacagtgatgaagacagagcctgtctcagctctaggctgtggggatcaatgccatcagtccctgttattgagggattatcccttagccaacattcctatctgtgggtgggcgtggagagtgtatctttttttggggtgtgtgtgtatatgtgtgtgtgtatgtgtgtgtgtgtttaatagttctgtttgtaaactcttttaataaaagttgtgcctcaccatacttgaagctcccaggacaagggttgagaggctcaacccctctttcagcttctatgtggtgttggaggtgctggtatcgtgttcacacaaga

SEQ ID NO: 422622 - DNA, 450 bp, Homo sapiens
aagtttttagagggcatgatcaagagcagctcatctgctgtgaggatggatgtgggattcttggtttgctagttctgctgatagagagagacttaagggaagggaaagaatgactgatggaatattttttctctctgtagaacttcctgcagggactgctcaccaaagacccacggcagcgactgtcctggccagacctcttatatcacccctttattgctggtcatgtcaccagtgagtcatcagggttcccagggctcttggacttcccagtacttcctctaaactacttccctttcacttccccgaccatctagatataacatgtcgtctttcctccagcagcttgaactttcttcctagcccttcacttaacctttgccacttcccttacaacccactctctctctgtcactttttcaaaatgatcttctgcccacagaagcctgg

SEQ ID NO: 422623 - DNA, 635 bp, Homo sapiens
  misc_feature (19)..(19): n is a, c, g, or t
  misc_feature (164)..(164): n is a, c, g, or t
aacatggcttcctgatagnccagctccacctcttctctggagaccaccatctgtactgtattccatctttcaggattatccacccattggtggccattgacagcaacctgggttcctaacggtttggttaacaccagcacgtccccaacgacggcgctgtccgncattatgaactcatttggttggcatactacagtggcaactccaccgattataatccaagggttgaccaccgtttgcccaccggtcactgccgtccctccttctctctccactcccgggagtggagagagaatgactgatggaatattttttctctctgtagaacttcctgcagggactgctcaccaaagacccacggcagcgactgtcctggccagacctcttatatcacccctttattgctggtcatgtcaccagtgagtcatcagggttcccagggctcttggacttcccagtacttcctctaaactacttccctttcacttccccgaccatctagatataacatgtcgtctttcctccagcagcttgaactttcttcctagcccttcacttaacctttgccacttcccttacaacccactctctctctgtcactttttcaaaatgatcttctgcccacagaagcctgg

SEQ ID NO: 422624 - DNA, 4912 bp, Homo sapiens
agcgtcgtttctaggcaaccgcagactccgggtccttagccgggcctgatggccctgaggcagttcggatgtgtcccaggaagtgcccatgtgtggtccgccgtccattccacacctctgagcgcctttgtcctctgaacttctcaccagttctagcgagtaaaattgcgtcccagatgttgtggaactgtccctggatctatagctcttcaccgtctctactttcttccttctaagagatcctgaaacctctgtcatggaaaagtaccacgtgttggagatgattggagaaggctcttttgggagggtgtacaagggtcgaagaaaatacagtgctcaggtcgtggccctgaagttcatcccaaaattggggcgctcagagaaggagctgaggaatttgcaacgagagattgaaataatgcggggtctgcggcatcccaacattgtgcatatgcttgacagctttgaaactgataaagaggtggtggtggtgacagactatgctgagggagagctctttcagatcctagaagatgacggaaaacttcctgaagaccaggttcaggccattgctgcccagttggtgtcagccctgtactatctgcattcccaccgcatcctacaccgagatatgaagcctcagaacatcctcctcgccaagggtggtggcatcaagctctgtgactttggatttgcccgggctatgagcaccaatacaatggtgctgacatccatcaaaggcacaccactctatatgtctccagagctggtggaggagcgaccatacgaccacacagcggacctctggtctgttggctgcatactatatgaactggcagtaggcacccctcccttctatgctacaagcatctttcagctggtcagcctcattctcaaggaccctgtgcgctggccctcaaccatcagtccctgctttaagaacttcctgcagggactgctcaccaaagacccacggcagcgactgtcctggccagacctcttatatcacccctttattgctggtcatgtcaccataataactgagccagcaggcccagatttggggaccccattcaccagccgcctacccccagaacttcaggtcctaaaggacgaacaggcccatcggttggcccccaagggtaatcagtctcgcatcttgactcaggcctataaacgcatggctgaggaggccatgcagaagaaacatcagaacacaggacctgcccttgagcaagaggacaagaccagcaaggtggctcctggcacagcccctctgcccagactcggggccactcctcaggaatcaagcctcctggccgggatcttagcctcagaattgaagagcagctgggctaaatcagggactggagaggtgccctctgcacctcgggaaaaccggaccaccccagattgtgaacgagcattcccagaggagaggccagaggtgctgggccagcggagcactgatgtagtggacctggaaaatgaggagccagacagtgacaatgagtggcagcacctgctagagaccactgagcctgtgcctattcaactgaaggctcctctcaccttgctgtgtaatcctgacttctgccagcgcatccagagtcagctgcatgaagctggagggcagatcctgaaaggcatcttggagggtgcttcccacatcctgcctgcattccgggtcctgagcagtcttctctccagctgcagtgattctgttgccttgtattccttctgccgggaggcagggcttcctgggctgctgctgagtctactcaggcacagtcaggagagcaacagcctccagcagcaatcttggtatgggaccttcttacaggacctgatggctgtgattcaggcctactttgcctgtaccttcaatctggagaggagccagacaagtgacagcctgcaggtgtttcaggaggctgccaacctttttctggacctgttggggaaactgctggcccaaccagatgactctgagcagactttgcggagggacagccttatgtgctttactgtcctgtgcgaagccatggatgggaacagccgggccatctccaaagccttttactccagcttgctgacgacacagcaggttgtcttggatgggctccttcatggcttgacagttccacagctccctgtccacactccccaaggagccccgcaagtgagccagccactgcgagagcagagtgaggatatacctggagccatttcctctgccctggcagccatatgcactgctcctgtgggactgcccgactgctgggatgccaaggagcaggtctgttggcatttggcaaatcagctaactgaagacagcagccagctcaggccatccctcatctctggcctgcagcatcccatcctgtgcctgcaccttctcaaggttctatactcctgctgccttgtcagtgagggcctgtgccgtcttctggggcaggagcccctggccttggaatccctgtttatgttgattcagggcaaggtaaaagtagtagattgggaagagtctactgaagtgacactctacttcctctcccttcttgtctttcggctccaaaacctgccttgtggaatggagaagctaggcagtgacgttgctactctctttacccattcgcatgtcgtctctcttgtgagtgcagcagcctgtctattgggacagcttggtcagcaaggggtgacctttgacctccagcccatggaatggatggctgcagccacacatgccttgtctgcccctgcagaggttcggttgactccaccaggtagttgtggattctatgatggcctccttatccttctgttgcagctcctcactgagcaggggaaggctagcctaatcagggatatgtccagttcagaaatgtggaccgttttgtggcaccgcttctccatggtcctgaggctccccgaggaggcatctgcacaggaaggggagctttcgctatccagtccaccaagccctgagccagactggacactgatttctccccagggcatggcagccctgctgagcctggccatggccacctttacccaggagccccagttatgcctgagctgcctgtcccagcatggaagtatcctcatgtccatcctgaagcatctgctttgccccagcttcctgaatcaactgcgccaggcgcctcatgggtctgagtttctccctgtcgtggtgctctctgtctgccagctcctttgcttcccctttgcgctggacatggatgctgacctccttataggtgtcttggccgacctcagggactcagaagttgcagcccatctgctgcaggtctgctgctaccatcttccgttgatgcaagtggagctgcccatcagccttctcacacgcctggccctcatggatcccacctctctcaaccagtttgtgaacacagtgtctgcctcccctagaaccatcgtctcgtttctctcagttgccctcctgagtgaccagccactgttgacctccgaccttctctctctgctggcccatactgccagggtcctgtctcccagccacttgtcctttatccaagagcttctggctggctctgatgaatcctatcggcccctgcgcagcctcctgggccacccagagaattctgtgcgggcacacacttataggctcctgggacacttgctccaacacagcatggccctgcgtggggcactgcagagccagtctggactgctcagccttctgctgcttgggcttggagacaaggatcctgttgtgcggtgcagtgccagctttgctgtgggcaatgcagcctaccaggctggtcctctgggacctgccctggcagctgcagtgcccagtatgacccagctgcttggagatcctcaggctggtatccggcgcaatgttgcatcagctctgggcaacttgggacctgaaggtttgggagaggagctgttacagtgcgaagtaccccagcggctcctagaaatggcatgtggagacccccagccaaatgtgaaggaggctgccctcattgccctccggagcctgcaacaggagcctggcatccatcaggtactggtgtccctgggtgccagtgagaaactatccttgctctctctggggaatcagtcactgccacacagcagtcctaggcctgcctctgccaaacactgcaggaaactcattcacctcctgaggccagcccatagcatgtgattccagattcctgcggtccagcctccaactttggttgccagctctttcttattctactacacaagccgccaactcaactgagagctaaagagactagaaaagagataagctgccaactcaactgagaacaagaaactagaagagatttatatataaagcttcttccttctcccagatgcaggatgttttcaaccagtaaattttattgctgttggtgccagagaagagtcctttcttctctacatccaggggccttttctccaataatgtgcctttaactctagggacctgcctcacggaccttagggaaaaacctcaacctgaaagatctcttcctttctggagctcctttaatcttcccagcaggtttttgccttagacgtgctggccccaggacagtgatgaagacagagcctgtctcagctctaggctgtggggatcaatgccatcagtccctgttattgagggattatcccttagccaacattcctatctgtgggtgggcgtggagagtgtatctttttttggggtgtgtgtgtatatgtgtgtgtgtatgtgtgtgtgtgtttaatagttctgtttgtaaactcttttaataaaagttgtgcctcaccatacttgaagctcccaggacaagggttgagaggctcaacccctctttcagcttctatgtggtgttggaggtgctggtatcgtgttcacacaaga

SEQ ID NO: 422625 - DNA, 4799 bp, Homo sapiens
aacgccagggaatccgtcccttggcctgaggagcttggagctcctaggctgggggcgtcccagatgttgtggaactgtccctggatctatagctcttcaccgtctctactttcttccttctaagagatcctgaaacctctgtcatggaaaagtaccacgtgttggagatgattggagaaggctcttttgggagggtgtacaagggtcgaagaaaatacagtgctcaggtcgtggccctgaagttcatcccaaaattggggcgctcagagaaggagctgaggaatttgcaacgagagattgaaataatgcggggtctgcggcatcccaacattgtgcatatgcttgacagctttgaaactgataaagaggtggtggtggtgacagactatgctgagggagagctctttcagatcctagaagatgacggaaaacttcctgaagaccaggttcaggccattgctgcccagttggtgtcagccctgtactatctgcattcccaccgcatcctacaccgagatatgaagcctcagaacatcctcctcgccaagggtggtggcatcaagctctgtgactttggatttgcccgggctatgagcaccaatacaatggtgctgacatccatcaaaggcacaccactctatatgtctccagagctggtggaggagcgaccatacgaccacacagcggacctctggtctgttggctgcatactatatgaactggcagtaggcacccctcccttctatgctacaagcatctttcagctggtcagcctcattctcaaggaccctgtgcgctggccctcaaccatcagtccctgctttaagaacttcctgcagggactgctcaccaaagacccacggcagcgactgtcctggccagacctcttatatcacccctttattgctggtcatgtcaccataataactgagccagcaggcccagatttggggaccccattcaccagccgcctacccccagaacttcaggtcctaaaggacgaacaggcccatcggttggcccccaagggtaatcagtctcgcatcttgactcaggcctataaacgcatggctgaggaggccatgcagaagaaacatcagaacacaggacctgcccttgagcaagaggacaagaccagcaaggtggctcctggcacagcccctctgcccagactcggggccactcctcaggaatcaagcctcctggccgggatcttagcctcagaattgaagagcagctgggctaaatcagggactggagaggtgccctctgcacctcgggaaaaccggaccaccccagattgtgaacgagcattcccagaggagaggccagaggtgctgggccagcggagcactgatgtagtggacctggaaaatgaggagccagacagtgacaatgagtggcagcacctgctagagaccactgagcctgtgcctattcaactgaaggctcctctcaccttgctgtgtaatcctgacttctgccagcgcatccagagtcagctgcatgaagctggagggcagatcctgaaaggcatcttggagggtgcttcccacatcctgcctgcattccgggtcctgagcagtcttctctccagctgcagtgattctgttgccttgtattccttctgccgggaggcagggcttcctgggctgctgctgagtctactcaggcacagtcaggagagcaacagcctccagcagcaatcttggtatgggaccttcttacaggacctgatggctgtgattcaggcctactttgcctgtaccttcaatctggagaggagccagacaagtgacagcctgcaggtgtttcaggaggctgccaacctttttctggacctgttggggaaactgctggcccaaccagatgactctgagcagactttgcggagggacagccttatgtgctttactgtcctgtgcgaagccatggatgggaacagccgggccatctccaaagccttttactccagcttgctgacgacacagcaggttgtcttggatgggctccttcatggcttgacagttccacagctccctgtccacactccccaaggagccccgcaagtgagccagccactgcgagagcagagtgaggatatacctggagccatttcctctgccctggcagccatatgcactgctcctgtgggactgcccgactgctgggatgccaaggagcaggtctgttggcatttggcaaatcagctaactgaagacagcagccagctcaggccatccctcatctctggcctgcagcatcccatcctgtgcctgcaccttctcaaggttctatactcctgctgccttgtcagtgagggcctgtgccgtcttctggggcaggagcccctggccttggaatccctgtttatgttgattcagggcaaggtaaaagtagtagattgggaagagtctactgaagtgacactctacttcctctcccttcttgtctttcggctccaaaacctgccttgtggaatggagaagctaggcagtgacgttgctactctctttacccattcgcatgtcgtctctcttgtgagtgcagcagcctgtctattgggacagcttggtcagcaaggggtgacctttgacctccagcccatggaatggatggctgcagccacacatgccttgtctgcccctgcagaggttcggttgactccaccaggtagttgtggattctatgatggcctccttatccttctgttgcagctcctcactgagcaggggaaggctagcctaatcagggatatgtccagttcagaaatgtggaccgttttgtggcaccgcttctccatggtcctgaggctccccgaggaggcatctgcacaggaaggggagctttcgctatccagtccaccaagccctgagccagactggacactgatttctccccagggcatggcagccctgctgagcctggccatggccacctttacccaggagccccagttatgcctgagctgcctgtcccagcatggaagtatcctcatgtccatcctgaagcatctgctttgccccagcttcctgaatcaactgcgccaggcgcctcatgggtctgagtttctccctgtcgtggtgctctctgtctgccagctcctttgcttcccctttgcgctggacatggatgctgacctccttataggtgtcttggccgacctcagggactcagaagttgcagcccatctgctgcaggtctgctgctaccatcttccgttgatgcaagtggagctgcccatcagccttctcacacgcctggccctcatggatcccacctctctcaaccagtttgtgaacacagtgtctgcctcccctagaaccatcgtctcgtttctctcagttgccctcctgagtgaccagccactgttgacctccgaccttctctctctgctggcccatactgccagggtcctgtctcccagccacttgtcctttatccaagagcttctggctggctctgatgaatcctatcggcccctgcgcagcctcctgggccacccagagaattctgtgcgggcacacacttataggctcctgggacacttgctccaacacagcatggccctgcgtggggcactgcagagccagtctggactgctcagccttctgctgcttgggcttggagacaaggatcctgttgtgcggtgcagtgccagctttgctgtgggcaatgcagcctaccaggctggtcctctgggacctgccctggcagctgcagtgcccagtatgacccagctgcttggagatcctcaggctggtatccggcgcaatgttgcatcagctctgggcaacttgggacctgaaggtttgggagaggagctgttacagtgcgaagtaccccagcggctcctagaaatggcatgtggagacccccagccaaatgtgaaggaggctgccctcattgccctccggagcctgcaacaggagcctggcatccatcaggtactggtgtccctgggtgccagtgagaaactatccttgctctctctggggaatcagtcactgccacacagcagtcctaggcctgcctctgccaaacactgcaggaaactcattcacctcctgaggccagcccatagcatgtgattccagattcctgcggtccagcctccaactttggttgccagctctttcttattctactacacaagccgccaactcaactgagagctaaagagactagaaaagagataagctgccaactcaactgagaacaagaaactagaagagatttatatataaagcttcttccttctcccagatgcaggatgttttcaaccagtaaattttattgctgttggtgccagagaagagtcctttcttctctacatccaggggccttttctccaataatgtgcctttaactctagggacctgcctcacggaccttagggaaaaacctcaacctgaaagatctcttcctttctggagctcctttaatcttcccagcaggtttttgccttagacgtgctggccccaggacagtgatgaagacagagcctgtctcagctctaggctgtggggatcaatgccatcagtccctgttattgagggattatcccttagccaacattcctatctgtgggtgggcgtggagagtgtatctttttttggggtgtgtgtgtatatgtgtgtgtgtatgtgtgtgtgtgtttaatagttctgtttgtaaactcttttaataaaagttgtgcctcaccatacttgaagctcccaggacaagggttgagaggctcaacccctctttcagcttctatgtggtgttggaggtgctggtatcgtgttcacacaaga

SEQ ID NO: 422626 - DNA, 4863 bp, Homo sapiens
agcgtcgtttctaggcaaccgcagactccgggtccttagccgggcctgatggccctgaggcagttcggatgtgtcccaggaagtgcccatgtgtggtccgccgtccattccacacctctgagcgcctttgtcctctgaacttctcaccagttctagcgagtaaaattgcgtcccagatgttgtggaactgtccctggatctatagctcttcaccgtctctactttcttccttctaagagatcctgaaacctctgtcatggaaaagtaccacgtgttggagatgattggagaaggctcttttgggagggtgtacaagggtcgaagaaaatacagtgctcaggtcgtggccctgaagttcatcccaaaattggggcgctcagagaaggagctgaggaatttgcaacgagagattgaaataatgcggggtctgcggcatcccaacattgtgcatatgcttgacagctttgaaactgataaagaggtggtggtggtgacagactatgctgagggagagctctttcagatcctagaagatgacggaaaacttcctgaagaccaggttcaggccattgctgcccagttggtgtcagccctgtactatctgcattcccaccgcatcctacaccgagatatgaagcctcagaacatcctcctcgccaagggtggtggcatcaagctctgtgactttggatttgcccgggctatgagcaccaatacaatggtgctgacatccatcaaaggcacaccactctatatgtctccagagctggtggaggagcgaccatacgaccacacagcggacctctggtctgttggctgcatactatatgaactggcagtaggcacccctcccttctatgctacaagcatctttcagctggtcagcctcattctcaaggaccctgtgcgctggccctcaaccatcagtccctgctttaagaacttcctgcagggactgctcaccaaagacccacggcagcgactgtcctggccagacctcttatatcacccctttattgctggtcatgtcaccataataactgagccagcaggcccagatttggggaccccattcaccagccgcctacccccagaacttcaggtcctaaaggacgaacaggcccatcggttggcccccaagggtaatcagtctcgcatcttgactcaggcctataaacgcatggctgaggaggccatgcagaagaaacatcagaacacaggacctgcccttgagcaagaggacaagaccagcaaggtggctcctggcacagcccctctgcccagactcggggccactcctcaggaatcaagcctcctggccgggatcttagcctcagaattgaagagcagctgggctaaatcagggactggagaggtgccctctgcacctcgggaaaaccggaccaccccagattgtgaacgagcattcccagaggagaggccagaggtgctgggccagcggagcactgatgtagtggacctggaaaatgaggagccagacagtgacaatgagtggcagcacctgctagagaccactgagcctgtgcctattcaactgaaggctcctctcaccttgctgtgtaatcctgacttctgccagcgcatccagagtcagctgcatgaagctggagggcagatcctgaaaggcatcttggagggtgcttcccacatcctgcctgcattccgggtcctgagcagtcttctctccagctgcagtgattctgttgccttgtattccttctgccgggaggcagggcttcctgggctgctgctgagtctactcaggcacagtcaggagagcaacagcctccagcagcaatcttggtatgggaccttcttacaggacctgatggctgtgattcaggcctactttgcctgtaccttcaatctggagaggagccagacaagtgacagcctgcaggtgtttcaggaggctgccaacctttttctggacctgttggggaaactgctggcccaaccagatgactctgagcagactttgcggagggacagccttatgtgctttactgtcctgtgcgaagccatggatgggaacagccgggccatctccaaagccttttactccagcttgctgacgacacagcaggttgtcttggatgggctccttcatggcttgacagttccacagctccctgtccacactccccaaggagccccgcaagtgagccagccactgcgagagcagagtgaggatatacctggagccatttcctctgccctggcagccatatgcactgctcctgtgggactgcccgactgctgggatgccaaggagcaggtctgttggcatttggcaaatcagctaactgaagacagcagccagctcaggccatccctcatctctggcctgcagcatcccatcctgtgcctgcaccttctcaaggttctatactcctgctgccttgtcagtgagggcctgtgccgtcttctggggcaggagcccctggccttggaatccctgtttatgttgattcagggcaaggtaaaagtagtagattgggaagagtctactgaagtgacactctacttcctctcccttcttgtctttcggctccaaaacctgccttgtggaatggagaagctaggcagtgacgttgctactctctttacccattcgcatgtcgtctctcttgtgagtgcagcagcctgtctattgggacagcttggtcagcaaggggtgacctttgacctccagcccatggaatggatggctgcagccacacatgccttgtctgcccctgcagaggttcggttgactccaccaggtagttgtggattctatgatggcctccttatccttctgttgcagctcctcactgagcaggggaaggctagcctaatcagggatatgtccagttcagaaatgtggaccgttttgtggcaccgcttctccatggtcctgaggctccccgaggaggcatctgcacaggaaggggagctttcgctatccagtccaccaagccctgagccagactggacactgatttctccccagggcatggcagccctgctgagcctggccatggccacctttacccaggagccccagttatgcctgagctgcctgtcccagcatggaagtatcctcatgtccatcctgaagcatctgctttgccccagcttcctgaatcaactgcgccaggcctcctttgcttcccctttgcgctggacatggatgctgacctccttataggtgtcttggccgacctcagggactcagaagttgcagcccatctgctgcaggtctgctgctaccatcttccgttgatgcaagtggagctgcccatcagccttctcacacgcctggccctcatggatcccacctctctcaaccagtttgtgaacacagtgtctgcctcccctagaaccatcgtctcgtttctctcagttgccctcctgagtgaccagccactgttgacctccgaccttctctctctgctggcccatactgccagggtcctgtctcccagccacttgtcctttatccaagagcttctggctggctctgatgaatcctatcggcccctgcgcagcctcctgggccacccagagaattctgtgcgggcacacacttataggctcctgggacacttgctccaacacagcatggccctgcgtggggcactgcagagccagtctggactgctcagccttctgctgcttgggcttggagacaaggatcctgttgtgcggtgcagtgccagctttgctgtgggcaatgcagcctaccaggctggtcctctgggacctgccctggcagctgcagtgcccagtatgacccagctgcttggagatcctcaggctggtatccggcgcaatgttgcatcagctctgggcaacttgggacctgaaggtttgggagaggagctgttacagtgcgaagtaccccagcggctcctagaaatggcatgtggagacccccagccaaatgtgaaggaggctgccctcattgccctccggagcctgcaacaggagcctggcatccatcaggtactggtgtccctgggtgccagtgagaaactatccttgctctctctggggaatcagtcactgccacacagcagtcctaggcctgcctctgccaaacactgcaggaaactcattcacctcctgaggccagcccatagcatgtgattccagattcctgcggtccagcctccaactttggttgccagctctttcttattctactacacaagccgccaactcaactgagagctaaagagactagaaaagagataagctgccaactcaactgagaacaagaaactagaagagatttatatataaagcttcttccttctcccagatgcaggatgttttcaaccagtaaattttattgctgttggtgccagagaagagtcctttcttctctacatccaggggccttttctccaataatgtgcctttaactctagggacctgcctcacggaccttagggaaaaacctcaacctgaaagatctcttcctttctggagctcctttaatcttcccagcaggtttttgccttagacgtgctggccccaggacagtgatgaagacagagcctgtctcagctctaggctgtggggatcaatgccatcagtccctgttattgagggattatcccttagccaacattcctatctgtgggtgggcgtggagagtgtatctttttttggggtgtgtgtgtatatgtgtgtgtgtatgtgtgtgtgtgtttaatagttctgtttgtaaactcttttaataaaagttgtgcctcaccatacttgaagctcccaggacaagggttgagaggctcaacccctctttcagcttctatgtggtgttggaggtgctggtatcgtgttcacacaaga

SEQ ID NO: 422627 - DNA, 4276 bp, Homo sapiens
cactgggactgaaggtttgggagaggagctgttacagtgcgaagtaccccagcggctcctagaaatggcatgtggagacccccagccaaatgtgaaggaggcggccctcattgccctccggagcctgcaacaggagcctgacatccatcaaaggcacaccactctatatgtctccagagctggtggaggagcgaccatacgaccacacagcggacctctggtctgttggctgcatactatatgaactggcagtaggcacccctcccttctatgctacaagcatctttcagctggtcagcctcattctcaaggaccctgtgcgctggccctcaaccatcagtccctgctttaagaacttcctgcagggactgctcaccaaagacccacggcagcgactgtcctggccagacctcttatatcacccctttattgctggtcatgtcaccataataactgagccagcaggcccagatttggggaccccattcaccagccgcctacccccagaacttcaggtcctaaaggacgaacaggcccatcggttggcccccaagggtaatcagtctcgcatcttgactcaggcctataaacgcatggctgaggaggccatgcagaagaaacatcagaacacaggacctgcccttgagcaagaggacaagaccagcaaggtggctcctggcacagcccctctgcccagactcggggccactcctcaggaatcaagcctcctggccgggatcttagcctcagaattgaagagcagctgggctaaatcagggactggagaggtgccctctgcacctcgggaaaaccggaccaccccagattgtgaacgagcattcccagaggagaggccagaggtgctgggccagcggagcactgatgtagtggacctggaaaatgaggagccagacagtgacaatgagtggcagcacctgctagagaccactgagcctgtgcctattcaactgaaggctcctctcaccttgctgtgtaatcctgacttctgccagcgcatccagagtcagctgcatgaagctggagggcagatcctgaaaggcatcttggagggtgcttcccacatcctgcctgcattccgggtcctgagcagtcttctctccagctgcagtgattctgttgccttgtattccttctgccgggaggcagggcttcctgggctgctgctgagtctactcaggcacagtcaggagagcaacagcctccagcagcaatcttggtatgggaccttcttacaggacctgatggctgtgattcaggcctactttgcctgtaccttcaatctggagaggagccagacaagtgacagcctgcaggtgtttcaggaggctgccaacctttttctggacctgttggggaaactgctggcccaaccagatgactctgagcagactttgcggagggacagccttatgtgctttactgtcctgtgcgaagccatggatgggaacagccgggccatctccaaagccttttactccagcttgctgacgacacagcaggttgtcttggatgggctccttcatggcttgacagttccacagctccctgtccacactccccaaggagccccgcaagtgagccagccactgcgagagcagagtgaggatatacctggagccatttcctctgccctggcagccatatgcactgctcctgtgggactgcccgactgctgggatgccaaggagcaggtctgttggcatttggcaaatcagctaactgaagacagcagccagctcaggccatccctcatctctggcctgcagcatcccatcctgtgcctgcaccttctcaaggttctatactcctgctgccttgtcagtgagggcctgtgccgtcttctggggcaggagcccctggccttggaatccctgtttatgttgattcagggcaaggtaaaagtagtagattgggaagagtctactgaagtgacactctacttcctctcccttcttgtctttcggctccaaaacctgccttgtggaatggagaagctaggcagtgacgttgctactctctttacccattcgcatgtcgtctctcttgtgagtgcagcagcctgtctattgggacagcttggtcagcaaggggtgacctttgacctccagcccatggaatggatggctgcagccacacatgccttgtctgcccctgcagaggttcggttgactccaccaggtagttgtggattctatgatggcctccttatccttctgttgcagctcctcactgagcaggggaaggctagcctaatcagggatatgtccagttcagaaatgtggaccgttttgtggcaccgcttctccatggtcctgaggctccccgaggaggcatctgcacaggaaggggagctttcgctatccagtccaccaagccctgagccagactggacactgatttctccccagggcatggcagccctgctgagcctggccatggccacctttacccaggagccccagttatgcctgagctgcctgtcccagcatggaagtatcctcatgtccatcctgaagcatctgctttgccccagcttcctgaatcaactgcgccaggcctcctttgcttcccctttgcgctggacatggatgctgacctccttataggtgtcttggccgacctcagggactcagaagttgcagcccatctgctgcaggtctgctgctaccatcttccgttgatgcaagtggagctgcccatcagccttctcacacgcctggccctcatggatcccacctctctcaaccagtttgtgaacacagtgtctgcctcccctagaaccatcgtctcgtttctctcagttgccctcctgagtgaccagccactgttgacctccgaccttctctctctgctggcccatactgccagggtcctgtctcccagccacttgtcctttatccaagagcttctggctggctctgatgaatcctatcggcccctgcgcagcctcctgggccacccagagaattctgtgcgggcacacacttataggctcctgggacacttgctccaacacagcatggccctgcgtggggcactgcagagccagtctggactgctcagccttctgctgcttgggcttggagacaaggatcctgttgtgcggtgcagtgccagctttgctgtgggcaatgcagcctaccaggctggtcctctgggacctgccctggcagctgcagtgcccagtatgacccagctgcttggagatcctcaggctggtatccggcgcaatgttgcatcagctctgggcaacttgggacctgaaggtttgggagaggagctgttacagtgcgaagtaccccagcggctcctagaaatggcatgtggagacccccagccaaatgtgaaggaggctgccctcattgccctccggagcctgcaacaggagcctggcatccatcaggtactggtgtccctgggtgccagtgagaaactatccttgctctctctggggaatcagtcactgccacacagcagtcctaggcctgcctctgccaaacactgcaggaaactcattcacctcctgaggccagcccatagcatgtgattccagattcctgcggtccagcctccaactttggttgccagctctttcttattctactacacaagccgccaactcaactgagagctaaagagactagaaaagagataagctgccaactcaactgagaacaagaaactagaagagatttatatataaagcttcttccttctcccagatgcaggatgttttcaaccagtaaattttattgctgttggtgccagagaagagtcctttcttctctacatccaggggccttttctccaataatgtgcctttaactctagggacctgcctcacggaccttagggaaaaacctcaacctgaaagatctcttcctttctggagctcctttaatcttcccagcaggtttttgccttagacgtgctggccccaggacagtgatgaagacagagcctgtctcagctctaggctgtggggatcaatgccatcagtccctgttattgagggattatcccttagccaacattcctatctgtgggtgggcgtggagagtgtatctttttttggggtgtgtgtgtatatgtgtgtgtgtatgtgtgtgtgtgtttaatagttctgtttgtaaactcttttaataaaagttgtgcctcaccatacttgaagctcccaggacaagggttgagaggctcaacccctctttcagcttctatgtggtgttggaggtgctggtatcgtgttcacacaaga

SEQ ID NO: 422628 - DNA, 4246 bp, Homo sapiens
tattcacaagaattagttaatttttaacaagaacttactgttagcgtcctggcatcaagctctgtgactttggatttgcccgggctatgagcaccaatacaatggtgctgacatccatcaaaggcacaccactctatatgtctccagagctggtggaggagcgaccatacgaccacacagcggacctctggtctgttggctgcatactatatgaactggcagtaggcacccctcccttctatgctacaagcatctttcagctggtcagcctcattctcaaggaccctgtgcgctggccctcaaccatcagtccctgctttaagaacttcctgcagggactgctcaccaaagacccacggcagcgactgtcctggccagacctcttatatcacccctttattgctggtcatgtcaccataataactgagccagcaggcccagatttggggaccccattcaccagccgcctacccccagaacttcaggtcctaaaggacgaacaggcccatcggttggcccccaagggtaatcagtctcgcatcttgactcaggcctataaacgcatggctgaggaggccatgcagaagaaacatcagaacacaggacctgcccttgagcaagaggacaagaccagcaaggtggctcctggcacagcccctctgcccagactcggggccactcctcaggaatcaagcctcctggccgggatcttagcctcagaattgaagagcagctgggctaaatcagggactggagaggtgccctctgcacctcgggaaaaccggaccaccccagattgtgaacgagcattcccagaggagaggccagaggtgctgggccagcggagcactgatgtagtggacctggaaaatgaggagccagacagtgacaatgagtggcagcacctgctagagaccactgagcctgtgcctattcaactgaaggctcctctcaccttgctgtgtaatcctgacttctgccagcgcatccagagtcagctgcatgaagctggagggcagatcctgaaaggcatcttggagggtgcttcccacatcctgcctgcattccgggtcctgagcagtcttctctccagctgcagtgattctgttgccttgtattccttctgccgggaggcagggcttcctgggctgctgctgagtctactcaggcacagtcaggagagcaacagcctccagcagcaatcttggtatgggaccttcttacaggacctgatggctgtgattcaggcctactttgcctgtaccttcaatctggagaggagccagacaagtgacagcctgcaggtgtttcaggaggctgccaacctttttctggacctgttggggaaactgctggcccaaccagatgactctgagcagactttgcggagggacagccttatgtgctttactgtcctgtgcgaagccatggatgggaacagccgggccatctccaaagccttttactccagcttgctgacgacacagcaggttgtcttggatgggctccttcatggcttgacagttccacagctccctgtccacactccccaaggagccccgcaagtgagccagccactgcgagagcagagtgaggatatacctggagccatttcctctgccctggcagccatatgcactgctcctgtgggactgcccgactgctgggatgccaaggagcaggtctgttggcatttggcaaatcagctaactgaagacagcagccagctcaggccatccctcatctctggcctgcagcatcccatcctgtgcctgcaccttctcaaggttctatactcctgctgccttgtcagtgagggcctgtgccgtcttctggggcaggagcccctggccttggaatccctgtttatgttgattcagggcaaggtaaaagtagtagattgggaagagtctactgaagtgacactctacttcctctcccttcttgtctttcggctccaaaacctgccttgtggaatggagaagctaggcagtgacgttgctactctctttacccattcgcatgtcgtctctcttgtgagtgcagcagcctgtctattgggacagcttggtcagcaaggggtgacctttgacctccagcccatggaatggatggctgcagccacacatgccttgtctgcccctgcagaggttcggttgactccaccaggtagttgtggattctatgatggcctccttatccttctgttgcagctcctcactgagcaggggaaggctagcctaatcagggatatgtccagttcagaaatgtggaccgttttgtggcaccgcttctccatggtcctgaggctccccgaggaggcatctgcacaggaaggggagctttcgctatccagtccaccaagccctgagccagactggacactgatttctccccagggcatggcagccctgctgagcctggccatggccacctttacccaggagccccagttatgcctgagctgcctgtcccagcatggaagtatcctcatgtccatcctgaagcatctgctttgccccagcttcctgaatcaactgcgccaggcctcctttgcttcccctttgcgctggacatggatgctgacctccttataggtgtcttggccgacctcagggactcagaagttgcagcccatctgctgcaggtctgctgctaccatcttccgttgatgcaagtggagctgcccatcagccttctcacacgcctggccctcatggatcccacctctctcaaccagtttgtgaacacagtgtctgcctcccctagaaccatcgtctcgtttctctcagttgccctcctgagtgaccagccactgttgacctccgaccttctctctctgctggcccatactgccagggtcctgtctcccagccacttgtcctttatccaagagcttctggctggctctgatgaatcctatcggcccctgcgcagcctcctgggccacccagagaattctgtgcgggcacacacttataggctcctgggacacttgctccaacacagcatggccctgcgtggggcactgcagagccagtctggactgctcagccttctgctgcttgggcttggagacaaggatcctgttgtgcggtgcagtgccagctttgctgtgggcaatgcagcctaccaggctggtcctctgggacctgccctggcagctgcagtgcccagtatgacccagctgcttggagatcctcaggctggtatccggcgcaatgttgcatcagctctgggcaacttgggacctgaaggtttgggagaggagctgttacagtgcgaagtaccccagcggctcctagaaatggcatgtggagacccccagccaaatgtgaaggaggctgccctcattgccctccggagcctgcaacaggagcctggcatccatcaggtactggtgtccctgggtgccagtgagaaactatccttgctctctctggggaatcagtcactgccacacagcagtcctaggcctgcctctgccaaacactgcaggaaactcattcacctcctgaggccagcccatagcatgtgattccagattcctgcggtccagcctccaactttggttgccagctctttcttattctactacacaagccgccaactcaactgagagctaaagagactagaaaagagataagctgccaactcaactgagaacaagaaactagaagagatttatatataaagcttcttccttctcccagatgcaggatgttttcaaccagtaaattttattgctgttggtgccagagaagagtcctttcttctctacatccaggggccttttctccaataatgtgcctttaactctagggacctgcctcacggaccttagggaaaaacctcaacctgaaagatctcttcctttctggagctcctttaatcttcccagcaggtttttgccttagacgtgctggccccaggacagtgatgaagacagagcctgtctcagctctaggctgtggggatcaatgccatcagtccctgttattgagggattatcccttagccaacattcctatctgtgggtgggcgtggagagtgtatctttttttggggtgtgtgtgtatatgtgtgtgtgtatgtgtgtgtgtgtttaatagttctgtttgtaaactcttttaataaaagttgtgcctcaccatacttgaagctcccaggacaagggttgagaggctcaacccctctttcagcttctatgtggtgttggaggtgctggtatcgtgttcacacaaga

SEQ ID NO: 422629 - DNA, 1690 bp, Homo sapiens
agcgtcgtttctaggcaaccgcagactccgggtccttagccgggcctgatggccctgaggcagttcggatgtgtcccaggaagtgcccatgtgtggtccgccgtccattccacacctctgagcgcctttgtcctctgaacttctcacacgcctggccctcatggatcccacctctctcaaccagtttgtgaacacagtgtctgcctcccctagaaccatcgtctcgtttctctcagttgccctcctgagtgaccagccactgttgacctccgaccttctctctctgctggcccatactgccagggtcctgtctcccagccacttgtcctttatccaagagcttctggctggctctgatgaatcctatcggcccctgcgcagcctcctgggccacccagagaattctgtgcgggcacacacttataggctcctgggacacttgctccaacacagcatggccctgcgtggggcactgcagagccagtctggactgctcagccttctgctgcttgggcttggagacaaggatcctgttgtgcggtgcagtgccagctttgctgtgggcaatgcagcctaccaggctggtcctctgggacctgccctggcagctgcagtgcccagtatgacccagctgcttggagatcctcaggctggtatccggcgcaatgttgcatcagctctgggcaacttgggacctgaaggtttgggagaggagctgttacagtgcgaagtaccccagcggctcctagaaatggcatgtggagacccccagccaaatgtgaaggaggctgccctcattgccctccggagcctgcaacaggagcctggcatccatcaggtactggtgtccctgggtgccagtgagaaactatccttgctctctctggggaatcagtcactgccacacagcagtcctaggcctgcctctgccaaacactgcaggaaactcattcacctcctgaggccagcccatagcatgtgattccagattcctgcggtccagcctccaactttggttgccagctctttcttattctactacacaagccgccaactcaactgagagctaaagagactagaaaagagataagctgccaactcaactgagaacaagaaactagaagagatttatatataaagcttcttccttctcccagatgcaggatgttttcaaccagtaaattttattgctgttggtgccagagaagagtcctttcttctctacatccaggggccttttctccaataatgtgcctttaactctagggacctgcctcacggaccttagggaaaaacctcaacctgaaagatctcttcctttctggagctcctttaatcttcccagcaggtttttgccttagacgtgctggccccaggacagtgatgaagacagagcctgtctcagctctaggctgtggggatcaatgccatcagtccctgttattgagggattatcccttagccaacattcctatctgtgggtgggcgtggagagtgtatctttttttggggtgtgtgtgtatatgtgtgtgtgtatgtgtgtgtgtgtttaatagttctgtttgtaaactcttttaataaaagttgtgcctcaccatacttgaagctcccaggacaagggttgagaggctcaacccctctttcagcttctatgtggtgttggaggtgctggtatcgtgttcacacaaga

SEQ ID NO: 422630 - DNA, 273 bp, Homo sapiens
gcctcatgggtctgagtttctccctgtcgtggtgctctctgtctgccagctcctttgcttcccctttgcgctggacatggatgctgacctccttataggtgtcttggccgacctcagggactcagaagttgcagcccatctgctgcaggtacttgggcagctagcatgaaggtgggagaggaagatagccaaccttgtatcctctaatttacttcccagcagctccagggctcttctaggcccctgtaagcatggaacagctggcttgactca

SEQ ID NO: 422631 - DNA, 445 bp, Homo sapiens
gttttttctattctttgtttccatccttcacattgcccttactctcttctccttttcctgggcagcaatcttggtatgggaccttcttacaggacctgatggctgtgattcaggcctactttgcctgtaccttcaatctggagaggagccagacaagtgacaggtaggataagaagtgcttttgcattgttggcaagtttggcttctgtttctaccccaagtgcccttcccatttaggaacaggccaagtatgaagaagctgtgatttgttacaggtttaggaatcagctgagtggccactcatagtccttttaaggaccctaagacagctccaacttggcctcaagacttacagtttctaagagtcagcagtcaccatggtcctaaaatggaagggtcaagatgtgaataacctattccaggaagccaattggattaaagaaag

SEQ ID NO: 422632 - DNA, 6980 bp, Homo sapiens
cttgaacttattgagaaactcctccagaacagaattacaattgtggatagatttcttaattcttcaaatgatcataggtttcaggctcttcaagacaattgtaaaaaaattttaggagaaaatgctaaacccaattatggttgtcaagtcactattcagtctgaacaagaaaagcagttaatgaaacaatatcgacgtgaagaaaaaagaattgccagacgagaaaaaaaggctggagaagatttagaagtttcagaaggacttatgtgctttgatcctaaggaattgcggatacaaagagaacaggcacttctgaatgctagaagtgttccaattctgagcaggcagagagatgcagacgttgaaaaaatacattatccccatgtgtatgattcccaggctgaagccatgaaaacatcagcatttattgctggtgcaaagatgattttgccagaaggaatccaaagagagaataacaagctttatgaagaagtaaggattccctacagcgaaccaatgccactcagctttgaggaaaagccagtttatatccaagacttagatgagatcggacagctggcttttaaaggaatgaagagactcaatagaatccagtcaatagtgtttgagactgcctacaacaccaatgagaacatgctgatttgtgcccctacaggagctggaaaaaccaacattgcaatgctgacagtcttgcatgaaattcgccaacattttcaacaaggtgttatcaaaaagaatgaatttaagattgtatatgttgctccaatgaaagccttggcagctgaaatgacagattacttcagcagacgtctagagccactaggcatcattgtgaaagaattgactggtgacatgcagttgtccaaaagtgaaattttacgaactcagatgcttgtgaccacaccagaaaaatgggatgtagtgacaagaaagagtgttggggatgtagctctttcccagattgtaaggctccttattcttgatgaagttcatttgctgcatgaagatagaggaccagtattagaaagcatagttgcccgtactttacggcaggtggaatccacacagagtatgataaggattctcggactgtctgcaactttacctaactacctcgatgttgccacatttttacatgttaatccatacattggacttttcttctttgatggccgttttcgaccagtacctcttggacagacatttttggggattaaatgtgcaaataagatgcagcagttgaataacatggatgaagtatgttatgaaaatgttttgaagcaagtaaaggctggacaccaggtgatggtgtttgtacatgctcgaaatgccactgtaagaacagctatgtctctaatagaaagagcaaaaaattgtggccatattcccttcttttttcctacccaaggacatgactatgtacttgcagaaaaacaggtacaaaggtcgagaaataagcaagtacgagaattattcccagatggttttagtattcatcatgcaggaatgcttcggcaggacagaaatttagttgaaaacttgttttctaatgggcatatcaaagtcctagtgtgtacagctacgttagcctggggtgtcaatcttcccgcccatgctgttattattaagggaacacaaatatatgctgcaaaaagaggctcctttgttgaccttggaattttagatgtcatgcagatatttggtcgagctggacgaccacaatttgacaaatttggggaaggaataattataacaacgcatgataaactcagccattacctcactttgctcactcaacgaaacccaattgagagtcagtttctggaaagccttgcagataacctaaatgcagagattgctctgggaacagttactaatgtggaagaagcagtgaagtggataagttacacttatctttatgtacggatgagagcaaatccattagcatatggcatcagtcacaaggcttatcagattgacccaacattaagaaagcatcgagaacagttggtcattgaagttggacgaaaactagacaaagctcagatgattcgttttgaggagcgaactggatatttttcctcaactgatttgggtagaactgccagccattactatattaaatacaacaccattgagacctttaatgaactctttgatgctcacaaaacagaaggtgatatctttgccatagtctccaaagctgaagaatttgatcaaattaaggtcagagaagaggaaatagaggagttagataccttattaagcaatttttgtgaactctccactcctggaggtgtagagaatagttatgggaaaataaacatcttacttcaaacttatatcagccgaggagaaatggacagtttctcccttatatcagattctgcatatgttgcacagaatgcagctagaattgtccgtgctctttttgaaattgctctgaggaaacgttggcctaccatgacctacaggctcctgaatcttagtaaagtcattgacaagaggctttggggttgggctagccctttgagacaattttcaatcctaccaccacacatcctaacaagattagaagaaaaaaagcttactgtggataagctgaaagacatgaggaaagatgaaataggtcacattttacatcatgtgaatattggactgaaggtcaaacaatgtgttcatcagattccttctgttatgatggaagcatccattcagcccatcacaaggactgtcctccgagtgacactcagcatctatgctgatttcacttggaatgatcaggtacatgggacagtaggagaaccttggtggatttgggtagaagatcctacaaatgatcatatttatcattcagagtattttctagctctaaaaaaacaagtcattagtaaagaagcccaactactggtatttacaatccctatttttgagcctttgccttcccaatactacatccgagcagtgtctgatagatggttgggtgctgaggcagtatgtattatcaactttcaacatctaattctaccagagagacatcctcctcatacagaattactggatcttcagcctttaccaatcacagctttgggatgtaaagcatatgaagccctgtacaacttcagccactttaaccctgtacagacacaaatatttcatacattgtatcacacggattgtaatgtcctacttggagcacctactggatcgggaaagactgttgcagctgaattagccattttcagagtcttcaacaaataccctacttcaaaggcggtatatattgcacccctaaaagccctagtacgtgaaagaatggatgattggaaagttagaatagaagaaaaacttggtaaaaaagttattgaactaacaggggatgtgactcctgatatgaaatccattgccaaggctgaccttatcgtcactacgccagagaagtgggatggagtcagcagaagctggcaaaataggaactatgttcagcaagtcactattctcatcatagatgagatccatctgcttggggaggaaagaggccctgttctagaggtcattgtatctcgaacaaattttatctcatcacacacagaaaagcctgttagaatagttggactatctactgcattagctaatgccagagaccttgctgattggctcaatattaagcagatgggcttgtttaacttccgaccatcagtacgcccagttccactggaagttcacattcaaggctttccaggtcaacattactgtcctcgtatggctagtatgaacaagcctgcatttcaggcaattagaagccattctccagccaaacctgttttgatatttgtctcatcaagacgtcaaactcgtcttactgctttggaattgatcgccttcctggctactgaagaagatccaaagcagtggttaaacatggatgaaagagagatggagaacatcattgcaacagtaagagattccaacctcaagctgacccttgctttcgggataggaatgcatcatgctggactacatgagagggaccgaaaaacagtagaggaactatttgtaaactgtaaagttcaggttcttattgctacaagcacattagcctggggtgtaaactttccagctcatttagtaattattaagggaacagaatactatgatggaaaaacaagacgttatgtggattttcccattacagatgtcctccagatgatggggcgtgctgggaggccgcagttcgatgaccaaggcaaagctgtaattctagttcatgacataaagaaagacttttataaaaaatttctttatgaacctttcccagtagaatcaagtttattaggagtgctctctgaccacttaaatgcagagattgctggtggtacaattacatctaagcaagatgcattggattatatcacctggacttactttttccgacgtcttatcatgaatcccagctattacaatttgggtgatgtgagccatgattctgtgaacaagtttctgtcccatctgattgagaagtccctgattgaattggaactttcctactgtattgaaattggagaggataatcgcagcattgaacctctaacttatggccgaattgcctcctattactatttgaagcatcaaacagttaaaatgttcaaggaccgcttgaagcctgaatgcagtactgaagaactgctttcaattctaagtgatgcagaagaatatacagatttgccagtgagacacaatgaagatcatatgaatagtgaactggcaaaatgtcttcccattgaatcaaatcctcattcatttgacagccctcacaccaaagcacatctcctgctacaggcacatctcagccgagccatgctaccctgcccagattatgacactgataccaaaacagtcttggaccaagctctcagagtatgtcaggcaatgctggacgtggctgcaaaccagggctggctggtgactgtcctgaatatcaccaacctgattcagatggtgatccagggtcggtggttaaaggactcttctcttcttacactaccaaacatagaaaaccatcatcttcaccttttcaagaaatggaagccgattatgaagggcccacatgctaggggtcggacctccatcgagtgccttcctgaactgatccatgcctgtggagggaaagaccatgtatttagctccatggtagaaagtgagctacatgctgcaaaaacgaaacaggcatggaatttcttatctcacttgccagtgataaatgttggcataagtgttaaaggctcgtgggatgacttagttgaaggacataatgaactctctgtctcaactctgactgcagacaaacgagatgacaacaaatggatcaaattgcatgctgaccaagagtatgtgcttcaagtgagcttgcagagagtccactttgggttccacaagggaaagccagagagctgtgcagttactcctcgatttcccaaatcaaaagacgaaggatggtttttgatattaggagaagtggataagagagaacttattgctttgaaaagagtaggatatattcgaaatcatcatgttgcttccctttctttttatacccctgaaatacctggaaggtatatctacacattatatttcatgagtgactgctaccttggcctggaccagcagtatgacatctatctcaacgttacacaagcgagtctttctgcacaggtcaacaccaaggtctctgattccctgactgacctggcattaaagtaacttgacctgaacaatccatttgaaaggagtggctaagaattctctctgttcagtcatctagacaaatcgaattacttgatgtttgccttgaaagaatcaacttctaacctcaaccatccaggaaattgacagtggctgcagtattgactccagtgacataaagttaaccacagtggccttttaacaaatgttgccttttataatgttatctttatgagtttcttgatatgtaagatgaaaaagcatttagaataatcttttaatttgtgtatatttgggatgatatttaggagctatcaatcaaattttacatctcacaatgtactgtttacatggatattggctgctttttttaaggaaaaccacattgagatgtgacaagtgttaggacttgtcacagatttctaactctgccgcataaactataaatctgtaaggtggtacacagcgtgtcttgttagcaaaatttatactttgatatgatcacatgtagaagtagcttcaagaatttcttgtagtcataaatgtttaataatatatgatgtaaaattatattatggagcctaatgatgataacaaagaaaacaatatactgatcttagaaaatgtagacatggttaactgggaaataaaatatagagtggcacttcaagacaagctgactcaatgttttcttctgcttcctttaaataatatccccttactcatctgttcttcttttctttcccttctacttcaaggctttatttctattatctttctgacatatttatttacagaagtagagaagtataatctaattcatgttgtagcacttacagatcatatagtacaattatttgtctttatgctctccaggaaaaatctgagacagaaaatttttcacccctatggataggttttcacctgtaataaagaaaatttctctatgtccaaacaaattccttcttgaaaaatactttttcaaactaaaaacttgttaaaattcaatgttcatataatatgcattctagtggaatgaaattctacctttgtgaaataatttcagttttcttagccctaaaatgaattattttaaaacattttccaatgtcattgttacaaatactagaatttaagtgtttctgaaattggaatgtattgcttgtatatatccttttccatgcttaaataaaaaagaagaagaaataaatgtaggt

SEQ ID NO: 422633 - DNA, 6456 bp, Homo sapiens
cttgaacttattgagaaactcctccagaacagaattacaattgtggatagatttcttaattcttcaaatgatcataggtttcaggctcttcaagacaattgtaaaaaaattttaggagaaaatgctaaacccaattatggttgtcaagtcactattcagtctgaacaagaaaagcagttaatgaaacaatatcgacgtgaagaaaaaagaattgccagacgagaaaaaaaggctggagaagatttagaagtttcagaaggacttatgtgctttgatcctaaggaattgcggatacaaagagaacaggcacttctgaatgctagaagtgttccaattctgagcaggcagagagatgcagacgttgaaaaaatacattatccccatgtgtatgattcccaggctgaagccatgaaaacatcagcatttattgctggtgcaaagatgattttgccagaaggaatccaaagagagaataacaagctttatgaagaagtaaggattccctacagcgaaccaatgccactcagctttgaggaaaagccagtttatatccaagacttagatgagatcggacagctggcttttaaaggaatgaagagactcaatagaatccagtcaatagtgtttgagactgcctacaacaccaatgagaacatgctgatttgtgcccctacaggagctggaaaaaccaacattgcaatgctgacagtcttgcatgaaattcgccaacattttcaacaaggtgttatcaaaaagaatgaatttaagattgtatatgttgctccaatgaaagccttggcagctgaaatgacagattacttcagcagacgtctagagccactaggcatcattgtgaaagaattgactggtgacatgcagttgtccaaaagtgaaattttacgaactcagatgcttgtgaccacaccagaaaaatgggatgtagtgacaagaaagagtgttggggatgtagctctttcccagattgtaaggctccttattcttgatgaagttcatttgctgcatgaagatagaggaccagtattagaaagcatagttgcccgtactttacggcaggtggaatccacacagagtatgataaggattctcggactgtctgcaactttacctaactacctcgatgttgccacatttttacatgttaatccatacattggacttttcttctttgatggccgttttcgaccagtacctcttggacagacatttttggggattaaatgtgcaaataagatgcagcagttgaataacatggatgaagtatgttatgaaaatgttttgaagcaagtaaaggctggacaccaggtgatggtgtttgtacatgctcgaaatgccactgtaagaacagctatgtctctaatagaaagagcaaaaaattgtggccatattcccttcttttttcctacccaaggacatgactatgtacttgcagaaaaacaggtacaaaggtcgagaaataagcaagtacgagaattattcccagatggttttagtattcatcatgcaggaatgcttcggcaggacagaaatttagttgaaaacttgttttctaatgggcatatcaaagtcctagtgtgtacagctacgttagcctggggtgtcaatcttcccgcccatgctgttattattaagggaacacaaatatatgctgcaaaaagaggctcctttgttgaccttggaattttagatgtcatgcagatatttggtcgagctggacgaccacaatttgacaaatttggggaaggaataattataacaacgcatgataaactcagccattacctcactttgctcactcaacgaaacccaattgagagtcagtttctggaaagccttgcagataacctaaatgcagagattgctctgggaacagttactaatgtggaagaagcagtgaagtggataagttacacttatctttatgtacggatgagagcaaatccattagcatatggcatcagtcacaaggcttatcagattgacccaacattaagaaagcatcgagaacagttggtcattgaagttggacgaaaactagacaaagctcagatgattcgttttgaggagcgaactggatatttttcctcaactgatttgggtagaactgccagccattactatattaaatacaacaccattgagacctttaatgaactctttgatgctcacaaaacagaaggtgatatctttgccatagtctccaaagctgaagaatttgatcaaattaaggtcagagaagaggaaatagaggagttagataccttattaagcaatttttgtgaactctccactcctggaggtgtagagaatagttatgggaaaataaacatcttacttcaaacttatatcagccgaggagaaatggacagtttctcccttatatcagattctgcatatgttgcacagaatgcagctagaattgtccgtgctctttttgaaattgctctgaggaaacgttggcctaccatgacctacaggctcctgaatcttagtaaagtcattgacaagaggctttggggttgggctagccctttgagacaattttcaatcctaccaccacacatcctaacaagattagaagaaaaaaagcttactgtggataagctgaaagacatgaggaaagatgaaataggtcacattttacatcatgtgaatattggactgaaggtcaaacaatgtgttcatcagattccttctgttatgatggaagcatccattcagcccatcacaaggactgtcctccgagtgacactcagcatctatgctgatttcacttggaatgatcaggtacatgggacagtaggagaaccttggtggatttgggtagaagatcctacaaatgatcatatttatcattcagagtattttctagctctaaaaaaacaagtcattagtaaagaagcccaactactggtatttacaatccctatttttgagcctttgccttcccaatactacatccgagcagtgtctgatagatggttgggtgctgaggcagtatgtattatcaactttcaacatctaattctaccagagagacatcctcctcatacagaattactggatcttcagcctttaccaatcacagctttgggatgtaaagcatatgaagccctgtacaacttcagccactttaaccctgtacagacacaaatatttcatacattgtatcacacggattgtaatgtcctacttggagcacctactggatcgggaaagactgttgcagctgaattagccattttcagagtcttcaacaaataccctacttcaaaggcggtatatattgcacccctaaaagccctagtacgtgaaagaatggatgattggaaagttagaatagaagaaaaacttggtaaaaaagttattgaactaacaggggatgtgactcctgatatgaaatccattgccaaggctgaccttatcgtcactacgccagagaagtgggatggagtcagcagaagctggcaaaataggaactatgttcagcaagtcactattctcatcatagatgagatccatctgcttggggaggaaagaggccctgttctagaggtcattgtatctcgaacaaattttatctcatcacacacagaaaagcctgttagaatagttggactatctactgcattagctaatgccagagaccttgctgattggctcaatattaagcagatgggcttgtttaacttccgaccatcagtacgcccagttccactggaagttcacattcaaggctttccaggtcaacattactgtcctcgtatggctagtatgaacaagcctgcatttcaggcaattagaagccattctccagccaaacctgttttgatatttgtctcatcaagacgtcaaactcgtcttactgctttggaattgatcgccttcctggctactgaagaagatccaaagcagtggttaaacatggatgaaagagagatggagaacatcattgcaacagtaagagattccaacctcaagctgacccttgctttcgggataggaatgcatcatgctggactacatgagagggaccgaaaaacagtagaggaactatttgtaaactgtaaagttcaggttcttattgctacaagcacattagcctggggtgtaaactttccagctcatttagtaattattaagggaacagaatactatgatggaaaaacaagacgttatgtggattttcccattacagatgtcctccagatgatggggcgtgctgggaggccgcagttcgatgaccaaggcaaagctgtaattctagttcatgacataaagaaagacttttataaaaaatttctttatgaacctttcccagtagaatcaagtttattaggagtgctctctgaccacttaaatgcagagattgctggtggtacaattacatctaagcaagatgcattggattatatcacctggacttactttttccgacgtcttatcatgaatcccagctattacaatttgggtgatgtgagccatgattctgtgaacaagtttctgtcccatctgattgagaagtccctgattgaattggaactttcctactgtattgaaattggagaggataatcgcagcattgaacctctaacttatggccgaattgcctcctattactatttgaagcatcaaacagttaaaatgttcaaggaccgcttgaagcctgaatgcagtactgaagaactgctttcaattctaagtgatgcagaagaatatacagatttgccagtgagacacaatgaagatcatatgaatagtgaactggcaaaatgtcttcccattgaatcaaatcctcattcatttgacagccctcacaccaaagcacatctcctgctacaggcacatctcagccgagccatgctaccctgcccagattatgacactgataccaaaacagtcttggaccaagctctcagagtatgtcaggcaatgctggacgtggctgcaaaccagggctggctggtgactgtcctgaatatcaccaacctgattcagatggtgatccagggtcggtggttaaaggactcttctcttcttacactaccaaacatagaaaaccatcatcttcaccttttcaagaaatggaagccgattatgaagggcccacatgctaggggtcggacctccatcgagtgccttcctgaactgatccatgcctgtggagggaaagaccatgtatttagctccatggtagaaagtgagctacatgctgcaaaaacgaaacaggcatggaatttcttatctcacttgccagtgataaatgttggcataagtgttaaaggctcgtgggatgacttagttgaaggacataatgaactctctgtctcaactctgactgcagacaaacgagatgacaacaaatggatcaaattgcatgctgaccaagagtatgtgcttcaagtgagcttgcagagagtccactttgggttccacaagggaaagccagagagctgtgcagttactcctcgatttcccaaatcaaaagacgaaggatggtttttgatattaggagaagtggataagagagaacttattgctttgaaaagagtaggatatattcgaaatcatcatgttgcttccctttctttttatacccctgaaatacctggaaggtatatctacacattatatttcatgagtgactgctaccttggcctggaccagcagtatgacatctatctcaacgttacacaagcgagtctttctgcacaggtcaacaccaaggtctctgattccctgactgacctggcattaaagtaacttgacctgaacaatccatttgaaaggagtggctaagaattctctctgttcagtcatctagacaaatcgaattacttgatgtttgccttgaaagaatcaacttctaacctcaaccatccaggaaattgacagtggctgcagtattgactccagtgacataaagttaaccacagtggccttttaacaaatgttgccttttataatgttatctttatgagtttcttgatatgtaagatgaaaaagcatttagaataatcttttaatttgtgtatatttgggatgatatttaggagctatcaatcaaattttacatctcacaatgtactgtttacatggatattggctgctttttttaaggaaaaccacattgagatgtgacaagtgttaggacttgtcacagatttctaactctgccgcataaactataaatctgtaaggtggtacacagcgtgtcttgttagcaaaatttatactttgatatgatcacatgtagaagtagcttcaagaatttcttgtagtcataaatgtttaataatatatgatgtaaaattatattatggagcctaatgatgataacaaagaaaacaatatactgatcttagaaaatgtagacatggttaactgggaaataaaatatagagtggcacttcaagacaagctgactcaatgttttct

SEQ ID NO: 422634 - DNA, 2552 bp, Homo sapiens
  misc_feature (2071)..(2071): n is a, c, g, or t
gtggcggtcgcacctgcgcgagttgggggaaggaggaggggcgaggtgacgcaggcgtaataatagagaaggtgccagaaagatccaaaacaagtggctgcggccgtcgcccaggagtcatcggacgccagaatctggccgggttctgagcttgttccgcctccctcccccgggaatggcgctatccgggtcgaccccggccccgtgctgggaggaggatgagtgcctggactactacgggatgctgtcgcttcaccgtatgttcgaggtggtgggcgggcaactgaccgagtgcgagctggagctcctggcctttctgctggatgaggctcctggcgccgccggaggcttagcccgggcccgcagcggcctagagctcctgctggagctggagcgccgcgggcagtgcgacgagagcaacctgcggctgctggggcaactcctgcgcgtgctggcccgccacgacctgctgccgcacctggcgcgcaagcggcgccggccagtgtctccagaacgctatagctatggcacctccagctcttcaaagaggacagagggtagctgccgtcgccgtcggcagtcaagcagttctgcaaattctcagcagggtcagtgggagacaggctcccccccaaccaagcggcagcggcggagtcggggccggcccagtggtggtgccagacggcggcggagaggggccccagccgcaccccagcagcagtcagagcccgccagaccttcctctgaaggcaaagtgacctgtgacatccggctccgggttcgagcagagtactgcgagcatgggccagccttggagcagggcgtggcatcccggcggccccaggcgctggcgcggcagctggacgtgtttgggcaggccaccgcagtgctgcgctcaagggacctgggctctgtggtttgtgacatcaagttctcagagctctcctatctggacgccttctggggcgactacctgagtggcgccctgctgcaggccctgcggggcgtgttcctgactgaggccctgcgagaggctgtgggccgggaggctgttcgcctgctggtcagtgtggatgaggctgactatgaggctggccggcgccgcctgttgctgatggaggaggaaggggggcggcgcccgacagaggcctcctgatccaggactggcaggattgatcccacctccaagtctccgggccaccttctcctgggaggacgaccatctctacccctagaggactgtcactctagcatctttgaggactgcgacaggaccgggacagcaggccccttgacagcccctcccacaggatgtgggctctgaggcctaaaccatttccagctgagtttccttcccagactcctcctacccccaggtgtgcccccttagcctccggaggcgggggctgggcctgtatctcagaagggaggggcacagctacacactcaccaaaggcccccctgcacattgtatctctgatcttgggctgtctgcactgtcacaggtgcacacactcgctcatgctcacactgcccctgctgagatcttccctgggcctctgccctggcctgcttcccagcacacacttctttggcctaagggcttctctctcaggacctctaatttgaccacaaccaacctgggcttcagccacatcagtgggcactggagctggggtgcacatggggcctgctcaccttgcccacacatctccagccagccagggccctgcccagcttcaatttacagacctgactctcctcaccttcccccctgctgtccagagctgaacatagacttgcacttggatgtcacctggagtgtcacatgggagtgttatggcagcatcataccaaggcctactgttgcacatggggccaaaaccagtaaacagccaccttcttggaaagggaatgcaaaggctttgggggtgatggaaaagaccttttacaaatgataccaattaaactgccctggaaagggcataggtgggaaaaaaaaaaaaaaaaaaaaaaaaaaaaaaaccccggagcgccacaccagggcgagcgggcgcggagaaaaagaganaggcaaaggacaagagggccacaggggcacaacacacgcggcaccgcggccacccacaccccgtggccaaaaaggggcgacaacacgcggcgcgggccactaccacacacacacagagaggagacccaaaatacacatcatcgccaaagacaggacgcccgagagcgatcaaccaccgagcgcacaccagggaacccagacgaacacaaacaacacaaaccacgacgtggagacagattgacatccacacgcccgcgtccctccactcctccgagttcgcggggacggtgggacacctctcaccactcggatgcagggaatcaacgacagatcagagaagtgacggaccatcaatacgaggacgcaagagcgaacatccatccgattcgttggtagaggtgaatgggcgcaatgaataaaacacttcgcgggcgagctcgttcgaggtgacaggagcaccacacaaaacacaagacgcccc

SEQ ID NO: 422635 - DNA, 2027 bp, Homo sapiens
  misc_feature (1998)..(1998): n is a, c, g, or t
gtggcggtcgcacctgcgcgagttgggggaaggaggaggggcgaggtgacgcaggcgtaataatagagaaggtgccagaaagatccaaaacaagtggctgcggccgtcgcccaggagtcatcggacgccagaatctggccgggttctgagcttgttccgcctccctcccccgggaatggcgctatccgggtcgaccccggccccgtgctgggaggaggatgagtgcctggactactacgggatgctgtcgcttcaccgtatgttcgaggtggtgggcgggcaactgaccgagtgcgagctggagctcctggcctttctgctggatgaggctcctggcgccgccggaggcttagcccgggcccgcagcggcctagagctcctgctggagctggagcgccgcgggcagtgcgacgagagcaacctgcggctgctggggcaactcctgcgcgtgctggcccgccacgacctgctgccgcacctggcgcgcaagcggcgccggccagtgtctccagaacgctatagctatggcacctccagctcttcaaagaggacagagggtagctgccgtcgccgtcggcagtcaagcagttctgcaaattctcagcagggtcagtgggagacaggctcccccccaaccaagcggcagcggcggagtcggggccggcccagtggtggtgccagacggcggcggagaggggccccagccgcaccccagcagcagtcagagcccgccagaccttcctctgaaggcaaagtgacctgtgacatccggctccgggttcgagcagagtactgcgagcatgggccagccttggagcagggcgtggcatcccggcggccccaggcgctggcgcggcagctggacgtgtttgggcaggccaccgcagtgctgcgctcaagggacctgggctctgtggtttgtgacatcaagttctcagagctctcctatctggacgccttctggggcgactacctgagtggcgccctgctgcaggccctgcggggcgtgttcctgactgaggccctgcgagaggctgtgggccgggaggctgttcgcctgctggtcagtgtggatgaggctgactatgaggctggccggcgccgcctgttgctgatggaggaggaaggggggcggcgcccgacagaggcctcctgatccaggactggcaggattgatcccacctccaagtctccgggccaccttctcctgggaggacgaccatctctacccctagaggactgtcactctagcatctttgaggactgcgacaggaccgggacagcaggccccttgacagcccctcccacaggatgtgggctctgaggcctaaaccatttccagctgagtttccttcccagactcctcctacccccaggtgtgcccccttagcctccggaggcgggggctgggcctgtatctcagaagggaggggcacagctacacactcaccaaaggcccccctgcacattgtatctctgatcttgggctgtctgcactgtcacaggtgcacacactcgctcatgctcacactgcccctgctgagatcttccctgggcctctgccctggcctgcttcccagcacacacttctttggcctaagggcttctctctcaggacctctaatttgaccacaaccaacctgggcttcagccacatcagtgggcactggagctggggtgcacatggggcctgctcaccttgcccacacatctccagccagccagggccctgcccagcttcaatttacagacctgactctcctcaccttcccccctgctgtccagagctgaacatagacttgcacttggatgtcacctggagtgtcacatgggagtgttatggcagcatcataccaaggcctactgttgcacatggggccaaaaccagtaaacagccaccttcttggaaagggaatgcaaaggctttgggggtgatggaaaagaccttttacaaatgataccaattaaactgccctggaaagggcataggtgggaaanaaaaactaaaaatgaaattgaaaaactag

SEQ ID NO: 422636 - DNA, 2483 bp, Homo sapiens
  misc_feature (18)..(18): n is a, c, g, or t
  misc_feature (2002)..(2002): n is a, c, g, or t
agcaggcttgtacgcccnggagttatggctgcggccgtcgcccaggagtcatcggacgccagaatctggccgggttctgagcttgttccgcctccctcccccgggaatggcgctatccgggtcgaccccggccccgtgctgggaggaggatgagtgcctggactactacgggatgctgtcgcttcaccgtatgttcgaggtggtgggcgggcaactgaccgagtgcgagctggagctcctggcctttctgctggatgaggctcctggcgccgccggaggcttagcccgggcccgcagcggcctagagctcctgctggagctggagcgccgcgggcagtgcgacgagagcaacctgcggctgctggggcaactcctgcgcgtgctggcccgccacgacctgctgccgcacctggcgcgcaagcggcgccggccagtgtctccagaacgctatagctatggcacctccagctcttcaaagaggacagagggtagctgccgtcgccgtcggcagtcaagcagttctgcaaattctcagcagggtcagtgggagacaggctcccccccaaccaagcggcagcggcggagtcggggccggcccagtggtggtgccagacggcggcggagaggggccccagccgcaccccagcagcagtcagagcccgccagaccttcctctgaaggcaaagtgacctgtgacatccggctccgggttcgagcagagtactgcgagcatgggccagccttggagcagggcgtggcatcccggcggccccaggcgctggcgcggcagctggacgtgtttgggcaggccaccgcagtgctgcgctcaagggacctgggctctgtggtttgtgacatcaagttctcagagctctcctatctggacgccttctggggcgactacctgagtggcgccctgctgcaggccctgcggggcgtgttcctgactgaggccctgcgagaggctgtgggccgggaggctgttcgcctgctggtcagtgtggatgaggctgactatgaggctggccggcgccgcctgttgctgatggaggaggaaggggggcggcgcccgacagaggcctcctgatccaggactggcaggattgatcccacctccaagtctccgggccaccttctcctgggaggacgaccatctctacccctagaggactgtcactctagcatctttgaggactgcgacaggaccgggacagcaggccccttgacagcccctcccacaggatgtgggctctgaggcctaaaccatttccagctgagtttccttcccagactcctcctacccccaggtgtgcccccttagcctccggaggcgggggctgggcctgtatctcagaagggaggggcacagctacacactcaccaaaggcccccctgcacattgtatctctgatcttgggctgtctgcactgtcacaggtgcacacactcgctcatgctcacactgcccctgctgagatcttccctgggcctctgccctggcctgcttcccagcacacacttctttggcctaagggcttctctctcaggacctctaatttgaccacaaccaacctgggcttcagccacatcagtgggcactggagctggggtgcacatggggcctgctcaccttgcccacacatctccagccagccagggccctgcccagcttcaatttacagacctgactctcctcaccttcccccctgctgtccagagctgaacatagacttgcacttggatgtcacctggagtgtcacatgggagtgttatggcagcatcataccaaggcctactgttgcacatggggccaaaaccagtaaacagccaccttcttggaaagggaatgcaaaggctttgggggtgatggaaaagaccttttacaaatgataccaattaaactgccctggaaagggcataggtgggaaaaaaaaaaaaaaaaaaaaaaaaaaaaaaaccccggagcgccacaccagggcgagcgggcgcggagaaaaagaganaggcaaaggacaagagggccacaggggcacaacacacgcggcaccgcggccacccacaccccgtggccaaaaaggggcgacaacacgcggcgcgggccactaccacacacacacagagaggagacccaaaatacacatcatcgccaaagacaggacgcccgagagcgatcaaccaccgagcgcacaccagggaacccagacgaacacaaacaacacaaaccacgacgtggagacagattgacatccacacgcccgcgtccctccactcctccgagttcgcggggacggtgggacacctctcaccactcggatgcagggaatcaacgacagatcagagaagtgacggaccatcaatacgaggacgcaagagcgaacatccatccgattcgttggtagaggtgaatgggcgcaatgaataaaacacttcgcgggcgagctcgttcgaggtgacaggagcaccacacaaaacacaagacgcccc

SEQ ID NO: 422637 - DNA, 2186 bp, Homo sapiens
  misc_feature (1705)..(1705): n is a, c, g, or t
gtggcggtcgcacctgcgcgagttgggggaaggaggaggggcgaggtgacgcaggcgtaataatagagaaggtgccagaaagatccaaaacaagtggctgcggccgtcgcccaggagtcatcggacgccagaatctgtgtctccagaacgctatagctatggcacctccagctcttcaaagaggacagagggtagctgccgtcgccgtcggcagtcaagcagttctgcaaattctcagcagggtcagtgggagacaggctcccccccaaccaagcggcagcggcggagtcggggccggcccagtggtggtgccagacggcggcggagaggggccccagccgcaccccagcagcagtcagagcccgccagaccttcctctgaaggcaaagtgacctgtgacatccggctccgggttcgagcagagtactgcgagcatgggccagccttggagcagggcgtggcatcccggcggccccaggcgctggcgcggcagctggacgtgtttgggcaggccaccgcagtgctgcgctcaagggacctgggctctgtggtttgtgacatcaagttctcagagctctcctatctggacgccttctggggcgactacctgagtggcgccctgctgcaggccctgcggggcgtgttcctgactgaggccctgcgagaggctgtgggccgggaggctgttcgcctgctggtcagtgtggatgaggctgactatgaggctggccggcgccgcctgttgctgatggaggaggaaggggggcggcgcccgacagaggcctcctgatccaggactggcaggattgatcccacctccaagtctccgggccaccttctcctgggaggacgaccatctctacccctagaggactgtcactctagcatctttgaggactgcgacaggaccgggacagcaggccccttgacagcccctcccacaggatgtgggctctgaggcctaaaccatttccagctgagtttccttcccagactcctcctacccccaggtgtgcccccttagcctccggaggcgggggctgggcctgtatctcagaagggaggggcacagctacacactcaccaaaggcccccctgcacattgtatctctgatcttgggctgtctgcactgtcacaggtgcacacactcgctcatgctcacactgcccctgctgagatcttccctgggcctctgccctggcctgcttcccagcacacacttctttggcctaagggcttctctctcaggacctctaatttgaccacaaccaacctgggcttcagccacatcagtgggcactggagctggggtgcacatggggcctgctcaccttgcccacacatctccagccagccagggccctgcccagcttcaatttacagacctgactctcctcaccttcccccctgctgtccagagctgaacatagacttgcacttggatgtcacctggagtgtcacatgggagtgttatggcagcatcataccaaggcctactgttgcacatggggccaaaaccagtaaacagccaccttcttggaaagggaatgcaaaggctttgggggtgatggaaaagaccttttacaaatgataccaattaaactgccctggaaagggcataggtgggaaaaaaaaaaaaaaaaaaaaaaaaaaaaaaaccccggagcgccacaccagggcgagcgggcgcggagaaaaagaganaggcaaaggacaagagggccacaggggcacaacacacgcggcaccgcggccacccacaccccgtggccaaaaaggggcgacaacacgcggcgcgggccactaccacacacacacagagaggagacccaaaatacacatcatcgccaaagacaggacgcccgagagcgatcaaccaccgagcgcacaccagggaacccagacgaacacaaacaacacaaaccacgacgtggagacagattgacatccacacgcccgcgtccctccactcctccgagttcgcggggacggtgggacacctctcaccactcggatgcagggaatcaacgacagatcagagaagtgacggaccatcaatacgaggacgcaagagcgaacatccatccgattcgttggtagaggtgaatgggcgcaatgaataaaacacttcgcgggcgagctcgttcgaggtgacaggagcaccacacaaaacacaagacgcccc

SEQ ID NO: 422638 - DNA, 2522 bp, Homo sapiens
  misc_feature (2041)..(2041): n is a, c, g, or t
gtggcggtcgcacctgcgcgagttgggggaaggaggaggggcgaggtgacgcaggcgtaataatagagaaggtgccagaaagatccaaaacaagtggctgcggccgtcgcccaggagtcatcggacgccagaatctggccgggttctgagcttgttccgcctccctcccccgggaatggcgctatccgggtcgaccccggccccgtgctgggaggaggatgagtgcctggactactacgggatgctgtcgcttcaccgtatgttcgaggtggtgggcgggcaactgaccgagtgcgagctggagctcctggcctttctgctggatgaggctcctggcgccgccggaggcttagcccgggcccgcagcggcctagagctcctgctggagctggagcgccgcgggcagtgcgacgagagcaacctgcggctgctggggcaactcctgcgcgtgctggcccgccacgacctgctgccgcacctggcgcgcaagcggcgccggccagtgtctccagaacgctatagctatggcacctccagctcttcaaagaggacagagggtagctgccgtcgccgtcggcagtcaagcagttctgcaaattctcagcagggtcagtgggagacaggctcccccccaaccaagcggcagcggcggagtcggggccggcccagtggtggtgccagacggcggcggagaggggccccagccgcaccccagcagcagtcagagcccgccagaccttcctctgaaggcaaagtgacctgtgacatccggctccgggttcgagcagagtactgcgagcatgggccagccttggagcagggcgtggcatcccggcggccccaggcgctggcgcggcagctggacgtgtttgggcaggccaccgcagtgctgcgctcaagggacctgggctctgtggtttgtgacatcaagttctcagagctctcctatctggacgccttctggggcgactacctgagtggcgccctgctgcaggccctgcggggcgtgttcctgactgaggccctgcgagaggctgtgggccgggaggctgttcgcctgctggtcagtgtggatgaggctgactatgaggctggccggcgccgcctgttgctgatggaggaggaaggggggcggcgcccgacagaggcctcctgatccaggactggcaggattgatcccacctccaagtctccgggccaccttctcctgggaggacgaccatctctacccctagaggactgtcactctagcatctttgaggactgcgacaggaccgggacagcaggccccttgacagcccctcccacaggatgtgggctctgaggcctaaaccatttccagctgagtttccttcccagactcctcctacccccaggtgtgcccccttagcctccggaggcgggggctgggcctgtatctcagaagggaggggcacagctacacactcaccaaaggcccccctgcacattgtatctctgatcttgggctgtctgcactgtcacaggtgcacacactcgctcatgctcacactgcccctgctgagatcttccctgggcctctgccctggcctgcttcccagcacacacttctttggcctaagggcttctctctcaggacctctaatttgaccacaaccaacctgggcttcagccacatcagtgggcactggagctggggtgcacatggggcctgctcaccttgcccacacatctccagccagccagggccctgcccagcttcaatttacagacctgactctcctcaccttcccccctgctgtccagagctgaacatagacttgcacttggatgtcacctggagtgtcacatgggagtgttatggcagcatcataccaaggcctactgttgcacatggggccaaaaccagtaaacagccaccttcttggaaagggaatgcaaaggctttgggggtgatggaaaagaccttttacaaatgataccaaaaaaaaaaaaaaaaaaaaaaaaaaaaaaaaaccccggagcgccacaccagggcgagcgggcgcggagaaaaagaganaggcaaaggacaagagggccacaggggcacaacacacgcggcaccgcggccacccacaccccgtggccaaaaaggggcgacaacacgcggcgcgggccactaccacacacacacagagaggagacccaaaatacacatcatcgccaaagacaggacgcccgagagcgatcaaccaccgagcgcacaccagggaacccagacgaacacaaacaacacaaaccacgacgtggagacagattgacatccacacgcccgcgtccctccactcctccgagttcgcggggacggtgggacacctctcaccactcggatgcagggaatcaacgacagatcagagaagtgacggaccatcaatacgaggacgcaagagcgaacatccatccgattcgttggtagaggtgaatgggcgcaatgaataaaacacttcgcgggcgagctcgttcgaggtgacaggagcaccacacaaaacacaagacgcccc

SEQ ID NO: 422639 - DNA, 2313 bp, Homo sapiens
  misc_feature (1832)..(1832): n is a, c, g, or t
gtggcggtcgcacctgcgcgagttgggggaaggaggaggggcgaggtgacgcaggcgtaataatagagaaggtgccagaaagatccaaaacaagtggctgcggccgtcgcccaggagtcatcggacgccagaatctggccgggttctgagcttgttccgcctccctcccccgggaatggcgctatccgggtcgaccccggccccgtgctgggaggaggatgagtgcctggactactacgggatgctgtcgcttcaccgtatgttcgaggtggtgggcgggcaactgaccgagtgcgagctggagctcctggcctttctgctggatgaggctcctggcgccgccggaggcttagcccgggcccgcagcggcctagagctcctgctggagctggagcgccgcgggcagtgcgacgagagcaacctgcggctgctggggcaactcctgcgcgtgctggcccgccacgacctgctgccgcacctggcgcgcaagcggcgccggccagtgtctccagaacgctatagctatggcacctccagctcttcaaagaggacagagggtagctgccgtcgccgtcggcagtcaagcagttctgcaaattctcagcagggtcagtgggagacaggctcccccccaaccaagcggcagcggcggagtcggggccggcccagtggtggtgccagacggcggcggagaggggccccagccgcaccccagcagcagtcagagcccgccagaccttcctctgaaggcaaagtgacctgtgacatccggctccgggttcgagcagagtactgcgagcatgggccagccttggagcagggcgtggcatcccggcggccccaggcgctggcgcggcagctggacgtgtttgggcaggccaccgcagtgctgcgctcaagggacctgggctctgtggtttgtgacatcaagttctcagagctctcctatctggacgccttctggggcgactacctgagtggcgccctgctgcaggccctgcggggcgtgttcctgactgaggccctgcgagaggctgtgggccgggaggctgttcgcctgctggtcagtgtggatgaggctgactatgaggctggccggcgccgcctgttgctgatggaggaggaaggggggcggcgcccgacagaggcctcctgatccaggactggcaggattgatcccacctccaagtctccgggccaccttctcctgggaggacgaccatctctacccctagaggactgtcactctagcatctttgaggactgcgacaggaccgggacagcaggccccttgacagcccctcccacaggatgtgggctctgaggcctaaaccatttccagacacacttctttggcctaagggcttctctctcaggacctctaatttgaccacaaccaacctgggcttcagccacatcagtgggcactggagctggggtgcacatggggcctgctcaccttgcccacacatctccagccagccagggccctgcccagcttcaatttacagacctgactctcctcaccttcccccctgctgtccagagctgaacatagacttgcacttggatgtcacctggagtgtcacatgggagtgttatggcagcatcataccaaggcctactgttgcacatggggccaaaaccagtaaacagccaccttcttggaaagggaatgcaaaggctttgggggtgatggaaaagaccttttacaaatgataccaattaaactgccctggaaagggcataggtgggaaaaaaaaaaaaaaaaaaaaaaaaaaaaaaaccccggagcgccacaccagggcgagcgggcgcggagaaaaagaganaggcaaaggacaagagggccacaggggcacaacacacgcggcaccgcggccacccacaccccgtggccaaaaaggggcgacaacacgcggcgcgggccactaccacacacacacagagaggagacccaaaatacacatcatcgccaaagacaggacgcccgagagcgatcaaccaccgagcgcacaccagggaacccagacgaacacaaacaacacaaaccacgacgtggagacagattgacatccacacgcccgcgtccctccactcctccgagttcgcggggacggtgggacacctctcaccactcggatgcagggaatcaacgacagatcagagaagtgacggaccatcaatacgaggacgcaagagcgaacatccatccgattcgttggtagaggtgaatgggcgcaatgaataaaacacttcgcgggcgagctcgttcgaggtgacaggagcaccacacaaaacacaagacgcccc

SEQ ID NO: 422640 - DNA, 2661 bp, Homo sapiens
  misc_feature (2180)..(2180): n is a, c, g, or t
gtggcggtcgcacctgcgcgagttgggggaaggaggaggggcgaggtgacgcaggcgtaataatagagaaggtgccagaaagatccaaaacaagtggctgcggccgtcgcccaggagtcatcggacgccagaatctggccgggttctgagcttgttccgcctccctcccccgggaatggcgctatccgggtcgaccccggccccgtgctgggaggaggatgagtgcctggactactacgggatgctgtcgcttcaccgtatgttcgaggtggtgggcgggcaactgaccgagtgcgagctggagctcctggcctttctgctggatgaggctcctggcgccgccggaggcttagcccgggcccgcagcggcctagagctcctgctggagctggagcgccgcgggcagtgcgacgagagcaacctgcggctgctggggcaactcctgcgcgtgctggcccgccacgacctgctgccgcacctggcgcgcaagcggcgccggccagtgtctccagaacgctatagctatggcacctccagctcttcaaagaggacagagggtagctgccgtcgccgtcggcagtcaagcagttctgcaaattctcagcagggtcagtgggagacaggctcccccccaaccaagcggcagcggcggagtcggggccggcccagtggtggtgccagacggcggcggagaggggccccagccgcaccccagcagcagtcagagcccgccagaccttcctctgaaggcaaagtgacctgtgctgtacaagaaagcagggtggcagcaatctgctatctgtggacggaccatccggaaagccttcaattcatggctggcaagggcaaggggagccaggctcggcaccagtgacatccggctccgggttcgagcagagtactgcgagcatgggccagccttggagcagggcgtggcatcccggcggccccaggcgctggcgcggcagctggacgtgtttgggcaggccaccgcagtgctgcgctcaagggacctgggctctgtggtttgtgacatcaagttctcagagctctcctatctggacgccttctggggcgactacctgagtggcgccctgctgcaggccctgcggggcgtgttcctgactgaggccctgcgagaggctgtgggccgggaggctgttcgcctgctggtcagtgtggatgaggctgactatgaggctggccggcgccgcctgttgctgatggaggaggaaggggggcggcgcccgacagaggcctcctgatccaggactggcaggattgatcccacctccaagtctccgggccaccttctcctgggaggacgaccatctctacccctagaggactgtcactctagcatctttgaggactgcgacaggaccgggacagcaggccccttgacagcccctcccacaggatgtgggctctgaggcctaaaccatttccagctgagtttccttcccagactcctcctacccccaggtgtgcccccttagcctccggaggcgggggctgggcctgtatctcagaagggaggggcacagctacacactcaccaaaggcccccctgcacattgtatctctgatcttgggctgtctgcactgtcacaggtgcacacactcgctcatgctcacactgcccctgctgagatcttccctgggcctctgccctggcctgcttcccagcacacacttctttggcctaagggcttctctctcaggacctctaatttgaccacaaccaacctgggcttcagccacatcagtgggcactggagctggggtgcacatggggcctgctcaccttgcccacacatctccagccagccagggccctgcccagcttcaatttacagacctgactctcctcaccttcccccctgctgtccagagctgaacatagacttgcacttggatgtcacctggagtgtcacatgggagtgttatggcagcatcataccaaggcctactgttgcacatggggccaaaaccagtaaacagccaccttcttggaaagggaatgcaaaggctttgggggtgatggaaaagaccttttacaaatgataccaattaaactgccctggaaagggcataggtgggaaaaaaaaaaaaaaaaaaaaaaaaaaaaaaaccccggagcgccacaccagggcgagcgggcgcggagaaaaagaganaggcaaaggacaagagggccacaggggcacaacacacgcggcaccgcggccacccacaccccgtggccaaaaaggggcgacaacacgcggcgcgggccactaccacacacacacagagaggagacccaaaatacacatcatcgccaaagacaggacgcccgagagcgatcaaccaccgagcgcacaccagggaacccagacgaacacaaacaacacaaaccacgacgtggagacagattgacatccacacgcccgcgtccctccactcctccgagttcgcggggacggtgggacacctctcaccactcggatgcagggaatcaacgacagatcagagaagtgacggaccatcaatacgaggacgcaagagcgaacatccatccgattcgttggtagaggtgaatgggcgcaatgaataaaacacttcgcgggcgagctcgttcgaggtgacaggagcaccacacaaaacacaagacgcccc

SEQ ID NO: 422641 - DNA, 2381 bp, Homo sapiens
  misc_feature (1900)..(1900): n is a, c, g, or t
gtggcggtcgcacctgcgcgagttgggggaaggaggaggggcgaggtgacgcaggcgtaataatagagaaggtgccagaaagatccaaaacaagtggctgcggccgtcgcccaggagtcatcggacgccagaatctgtgtctccagaacgctatagctatggcacctccagctcttcaaagaggacagagggtagctgccgtcgccgtcggcagtcaagcagttctgcaaattctcagcagggtcagtgggagacaggctggagtgcaatggcacaatctcggctcaccgcaacctccgcctcccgggttcaagcgattctcctgcctcagcctcctgagtagctgggattacaggctcccccccaaccaagcggcagcggcggagtcggggccggcccagtggtggtgccagacggcggcggagaggggccccagccgcaccccagcagcagtcagagcccgccagaccttcctctgaaggcaaagtgacctgtgctgtacaagaagcagggtgccagcatctgcttctgttgaggacctccggaagcttccattcatggtggaaggccaaggggagcaggcttgtcacatgacatccggctccgggttcgagcagagtactgcgagcatgggccagccttggagcagggcgtggcatcccggcggccccaggcgctggcgcggcagctggacgtgtttgggcaggccaccgcagtgctgcgctcaagggacctgggctctgtggtttgtgacatcaagttctcagagctctcctatctggacgccttctggggcgactacctgagtggcgccctgctgcaggccctgcggggcgtgttcctgactgaggccctgcgagaggctgtgggccgggaggctgttcgcctgctggtcagtgtggatgaggctgactatgaggctggccggcgccgcctgttgctgatggaggaggaaggggggcggcgcccgacagaggcctcctgatccaggactggcaggattgatcccacctccaagtctccgggccaccttctcctgggaggacgaccatctctacccctagaggactgtcactctagcatctttgaggactgcgacaggaccgggacagcaggccccttgacagcccctcccacaggatgtgggctctgaggcctaaaccatttccagctgagtttccttcccagactcctcctacccccaggtgtgcccccttagcctccggaggcgggggctgggcctgtatctcagaagggaggggcacagctacacactcaccaaaggcccccctgcacattgtatctctgatcttgggctgtctgcactgtcacaggtgcacacactcgctcatgctcacactgcccctgctgagatcttccctgggcctctgccctggcctgcttcccagcacacacttctttggcctaagggcttctctctcaggacctctaatttgaccacaaccaacctgggcttcagccacatcagtgggcactggagctggggtgcacatggggcctgctcaccttgcccacacatctccagccagccagggccctgcccagcttcaatttacagacctgactctcctcaccttcccccctgctgtccagagctgaacatagacttgcacttggatgtcacctggagtgtcacatgggagtgttatggcagcatcataccaaggcctactgttgcacatggggccaaaaccagtaaacagccaccttcttggaaagggaatgcaaaggctttgggggtgatggaaaagaccttttacaaatgataccaattaaactgccctggaaagggcataggtgggaaaaaaaaaaaaaaaaaaaaaaaaaaaaaaaccccggagcgccacaccagggcgagcgggcgcggagaaaaagaganaggcaaaggacaagagggccacaggggcacaacacacgcggcaccgcggccacccacaccccgtggccaaaaaggggcgacaacacgcggcgcgggccactaccacacacacacagagaggagacccaaaatacacatcatcgccaaagacaggacgcccgagagcgatcaaccaccgagcgcacaccagggaacccagacgaacacaaacaacacaaaccacgacgtggagacagattgacatccacacgcccgcgtccctccactcctccgagttcgcggggacggtgggacacctctcaccactcggatgcagggaatcaacgacagatcagagaagtgacggaccatcaatacgaggacgcaagagcgaacatccatccgattcgttggtagaggtgaatgggcgcaatgaataaaacacttcgcgggcgagctcgttcgaggtgacaggagcaccacacaaaacacaagacgcccc

SEQ ID NO: 422642 - DNA, 1811 bp, Homo sapiens
gtggcggtcgcacctgcgcgagttgggggaaggaggaggggcgaggtgacgcaggcgtaataatagagaaggtgccagaaagatccaaaacaagtggctgcggccgtcgcccaggagtcatcggacgccagaatctggccgggttctgagcttgttccgcctccctcccccgggaatggcgctatccgggtcgaccccggccccgtgctgggaggaggatgagtgcctggactactacgggatgctgtcgcttcaccgtatgttcgaggtggtgggcgggcaactgaccgagtgcgagctggagctcctggcctttctgctggatgaggctcctggcgccgccggaggcttagcccgggcccgcagcggcctagagctcctgctggagctggagcgccgcgggcagtgcgacgagagcaacctgcggctgctggggcaactcctgcgcgtgctggcccgccacgacctgctgccgcacctggcgcgcaagcggcgccggccagtgtctccagaacgctatagctatggcacctccagctcttcaaagaggacagagggtagctgccgtcgccgtcggcagtcaagcagttctgcaaattctcagcagggtcagtgggagacaggctcccccccaaccaagcggcagcggcggagtcggggccggcccagtggtggtgccagacggcggcggagaggggccccagccgcaccccagcagcagtcagagcccgccagaccttcctctgaaggcaaagtgacctgtgacatccggctccgggttcgagcagagtactgcgagcatgggccagccttggagcagggcgtggcatcccggcggccccaggcgctggcgcggcagctggacgtgtttgggcaggccaccgcagtgctgcgctcaagggacctgggctctgtggtttgtgacatcaagttctcagagctctcctatctggacgccttctggggcgactacctgagtggcgccctgctgcaggccctgcggggcgtgttcctgactgaggccctgcgagaggctgtgggccgggaggctgttcgcctgctggtcagtgtggatgaggctgactatgaggctggccggcgccgcctgttgctgatggaggaggaaggggggcggcgcccgacagaggcctcctgatccaggactggcaggattgatcccacctccaagtctccgggccaccttctcctgggaggacgaccatctctacccctagaggactgtcactctagcatctttgaggactgcgacaggaccgggacagcaggccccttgacagcccctcccacaggatgtgggctctgaggcctaaaccatttccagctgagtttccttcccagactcctcctacccccaggtgtgcccccttagcctccggaggcgggggctgggcctgtatctcagaagggaggggcacagctacacactcaccaaaggcccccctgcacattgtatctctgatcttgggctgtctgcactgtcacaggtgcacacactcgctcatgctcacactgcccctgctgagatcttccctgggcctctgccctggcctgcttcccagcacacacttctttggcctaagggcttctctctcaggacctctaatttgaccacaaccaacctgggcttcagccacatcagtgggcactggagctggggtgcacatggggcctgctcaccttgcccacacatctccagccagccagggccctgcccagcttcaatttacagacctgactctcctcaccttcccccctgctgtcgggctatcggggagggatcctctagatca

SEQ ID NO: 422643 - DNA, 1325 bp, Homo sapiens
gtggcggtcgcacctgcgcgagttgggggaaggaggaggggcgaggtgacgcaggcgtaataatagagaaggtgccagaaagatccaaaacaagtggctgcggccgtcgcccaggagtcatcggacgccagaatctggccgggttctgagcttgttccgcctccctcccccgggaatggcgctatccgggtcgaccccggccccgtgctgggaggaggatgagtgcctggactactacgggatgctgtcgcttcaccgtatgttcgaggtggtgggcgggcaactgaccgagtgcgagctggagctcctggcctttctgctggatgaggctcctggcgccgccggaggcttagcccgggcccgcagcggcctagagctcctgctggagctggagcgccgcgggcagtgcgacgagagcaacctgcggctgctggggcaactcctgcgcgtgctggcccgccacgacctgctgccgcacctggcgcgcaagcggcgccggccagtgtctccagaacgctatagctatggcacctccagctcttcaaagaggacagagggtagctgccgtcgccgtcggcagtcaagcagttctgcaaattctcagcagggtcagtgggagacaggctcccccccaaccaagcggcagcggcggagtcggggccggcccagtggtggtgccagacggcggcggagaggggccccagccgcaccccagcagcagtcagagcccgccagaccttcctctgaaggcaaagtgacctgtgacatccggctccgggttcgagcagagtactgcgagcatgggccagccttggagcagggcgtggcatcccggcggccccaggcgctggcgcggcagctggacgtgtttgggcaggccaccgcagtgctgcgctcaagggacctgggctctgtggtttgtgacatcaagttctcagagctctcctatctggacgccttctggggcgactacctgagtggcgccctgctgcaggccctgcggggcgtgttcctgactgaggccctgcgagaggctgtgggccgggaggctgttcgcctgctggtcagtgtggatgaggctgactatgaggctggccggcgccgcctgttgctgatggaggaggaaggggggcggcgcccgacagaggcctcctgatccaggactggcaggattgatcccacctccaagtctccgggccaccttctcctgggaggacgaccatctctacccctagaggactgtcactctagcatctttgaggactgcgacaggaccgggacagcagccggtgacagacacctgggcaagatcctctagagtaccc

SEQ ID NO: 422644 - DNA, 1178 bp, Homo sapiens
gtggcggtcgcacctgcgcgagttgggggaaggaggaggggcgaggtgacgcaggcgtaataatagagaaggtgccagaaagatccaaaacaagtggctgcggccgtcgcccaggagtcatcggacgccagaatctggccgggttctgagcttgttccgcctccctcccccgggaatggcgctatccgggtcgaccccggccccgtgctgggaggaggatgagtgcctggactactacgggatgctgtcgcttcaccgtatgttcgaggtggtgggcgggcaactgaccgagtgcgagctggagctcctggcctttctgctggatgaggctcctggcgccgccggaggcttagcccgggcccgcagcggcctagagctcctgctggagctggagcgccgcgggcagtgcgacgagagcaacctgcggctgctggggcaactcctgcgcgtgctggcccgccacgacctgctgccgcacctggcgcgcaagcggcgccggccagtgtctccagaacgctatagctatggcacctccagctcttcaaagaggacagagggtagctgccgtcgccgtcggcagtcaagcagttctgcaaattctcagcagggtcagtgggagacaggctcccccccaaccaagcggcagcggcggagtcggggccggcccagtggtggtgccagacggcggcggagaggggccccagccgcaccccagcagcagtcagagcccgccagaccttcctctgaaggcaaagtgacctgtgacatccggctccgggttcgagcagagtactgcgagcatgggccagccttggagcagggcgtggcatcccggcggccccaggcgctggcgcggcagctggacgtgtttgggcaggccaccgcagtgctgcgctcaagggacctgggctctgtggtttgtgacatcaagttctcagagctctcctatctggacgccttctggggcgactacctgagtggcgccctgctgcaggccctgcggggcgtgttcctgactgaggccctgcgagaggctgtgggccgggaggctgttcgcctgctggtcagtgtggatgaggctgactatgaggctggccggcgccgcctgttgctgatgagagaggggcgccacagagctctatcagactgcagatgatcactcagttcgcactctctga

SEQ ID NO: 422645 - DNA, 1602 bp, Homo sapiens
  misc_feature (1121)..(1121): n is a, c, g, or t
gtggcggtcgcacctgcgcgagttgggggaaggaggaggggcgaggtgacgcaggcgtaataatagagaaggtgccagaaagatccaaaacaagtggctgcggccgtcgcccaggagtcatcggacgccagaatctggccgggttctgagcttgttccgcctccctcccccgggaatggcgctatccgggtcgaccccggccccgtgctgggaggaggatgagtgcctggactactacgggatgctgtcgcttcaccgtatgttcgaggtggtgggcgggcaactgaccgagtgcgagctggagctcctggcctttctgctggatgaggctcctggcgccgccggaggcttagcccgggcccgcagcggcctagagctcctgctggagctggagcgccgcgggcagtgcgacgagagcaacctgcggctgctggggcaactcctgcgcgtgctggcccgccacgacctgctgccgcacctggcgcgcaagcggcgccggccagtgtctccagaacgctatagctatggcacctccagctcttcaaagaggacagagggtagctgccgtcgccgtcggcagtcaagcagtttgagatcttccctgggcctctgccctggcctgcttcccagcacacacttctttggcctaagggcttctctctcaggacctctaatttgaccacaaccaacctgggcttcagccacatcagtgggcactggagctggggtgcacatggggcctgctcaccttgcccacacatctccagccagccagggccctgcccagcttcaatttacagacctgactctcctcaccttcccccctgctgtccagagctgaacatagacttgcacttggatgtcacctggagtgtcacatgggagtgttatggcagcatcataccaaggcctactgttgcacatggggccaaaaccagtaaacagccaccttcttggaaagggaatgcaaaggctttgggggtgatggaaaagaccttttacaaatgataccaattaaactgccctggaaagggcataggtgggaaaaaaaaaaaaaaaaaaaaaaaaaaaaaaaccccggagcgccacaccagggcgagcgggcgcggagaaaaagaganaggcaaaggacaagagggccacaggggcacaacacacgcggcaccgcggccacccacaccccgtggccaaaaaggggcgacaacacgcggcgcgggccactaccacacacacacagagaggagacccaaaatacacatcatcgccaaagacaggacgcccgagagcgatcaaccaccgagcgcacaccagggaacccagacgaacacaaacaacacaaaccacgacgtggagacagattgacatccacacgcccgcgtccctccactcctccgagttcgcggggacggtgggacacctctcaccactcggatgcagggaatcaacgacagatcagagaagtgacggaccatcaatacgaggacgcaagagcgaacatccatccgattcgttggtagaggtgaatgggcgcaatgaataaaacacttcgcgggcgagctcgttcgaggtgacaggagcaccacacaaaacacaagacgcccc

SEQ ID NO: 422646 - DNA, 1686 bp, Homo sapiens
  misc_feature (1205)..(1205): n is a, c, g, or t
gtggcggtcgcacctgcgcgagttgggggaaggaggaggggcgaggtgacgcaggcgtaataatagagaaggtgccagaaagatccaaaacaagtggctgcggccgtcgcccaggagtcatcggacgccagaatctggccgggttctgagcttgttccgcctccctcccccgggaatggcgctatccgggtcgaccccggccccgtgctgggaggaggatgagtgcctggactactacgggatgctgtcgcttcaccgtatgttcgaggtggtgggcgggcaactgaccgagtgcgagctggagctcctggcctttctgctggatgaggctcctggcgccgccggaggcttagcccgggcccgcagcggcctagagctcctgctggagctggagcgccgcgggcagtgcgacgagagcaacctgcggctgctggggcaactcctgcgcgtgctggcccgccacgacctgctgccgcacctggcgcgcaagcggcgccggccagtgtctccagaacgctatagctatggcacctccagctcttcaaagaggacagagggtagctgccgtcgccgtcggcagtcaagcagttctgcaaattctcagcagggtcagtgggagacaggctcccccccaaccaagcggcagcggcggagtcggggccggcccagtggtggtgccagacggcggcggagaggggccccagccgcaccccagcagcagtcagagcccgccagaccttcctctgaaggcaaagtgacctgtgcacaaccaacctgggcttcagccacatcagtgggcactggagctggggtgcacatggggcctgctcaccttgcccacacatctccagccagccagggccctgcccagcttcaatttacagacctgactctcctcaccttcccccctgctgtccagagctgaacatagacttgcacttggatgtcacctggagtgtcacatgggagtgttatggcagcatcataccaaggcctactgttgcacatggggccaaaaccagtaaacagccaccttcttggaaagggaatgcaaaggctttgggggtgatggaaaagaccttttacaaatgataccaattaaactgccctggaaagggcataggtgggaaaaaaaaaaaaaaaaaaaaaaaaaaaaaaaccccggagcgccacaccagggcgagcgggcgcggagaaaaagaganaggcaaaggacaagagggccacaggggcacaacacacgcggcaccgcggccacccacaccccgtggccaaaaaggggcgacaacacgcggcgcgggccactaccacacacacacagagaggagacccaaaatacacatcatcgccaaagacaggacgcccgagagcgatcaaccaccgagcgcacaccagggaacccagacgaacacaaacaacacaaaccacgacgtggagacagattgacatccacacgcccgcgtccctccactcctccgagttcgcggggacggtgggacacctctcaccactcggatgcagggaatcaacgacagatcagagaagtgacggaccatcaatacgaggacgcaagagcgaacatccatccgattcgttggtagaggtgaatgggcgcaatgaataaaacacttcgcgggcgagctcgttcgaggtgacaggagcaccacacaaaacacaagacgcccc

SEQ ID NO: 422647 - DNA, 1572 bp, Homo sapiens
  misc_feature (1091)..(1091): n is a, c, g, or t
gtggcggtcgcacctgcgcgagttgggggaaggaggaggggcgaggtgacgcaggcgtaataatagagaaggtgccagaaagatccaaaacaagtggctgcggccgtcgcccaggagtcatcggacgccagaatctggccgggttctgagcttgttccgcctccctcccccgggaatggcgctatccgggtcgaccccggccccgtgctgggaggaggatgagtgcctggactactacgggatgctgtcgcttcaccgtatgttcgaggtggtgggcgggcaactgaccgagtgcgagctggagctcctggcctttctgctggatgaggctcctggcgccgccggaggcttagcccgggcccgcagcggcctagagctcctgctggagctggagcgccgcgggcagtgcgacgagagcaacctgcggctgctggggcaactcctgcgcgtgctggcccgccacgacctgctgccgcacctggcgcgcaagcggcgccggccagtgtctccagaacgctatagctatggcacctccagctcttcaaagaggacagagggtagctgccgtcgccgtcggcagtcaagcagttctgcaaattctcagcagggtcagtgggagacaggctcccccccaaccaagcggcagcggcggagtcggggccggcccagtggtggtgccagacggcggcggagaggggtgcacatggggcctgctcaccttgcccacacatctccagccagccagggccctgcccagcttcaatttacagacctgactctcctcaccttcccccctgctgtccagagctgaacatagacttgcacttggatgtcacctggagtgtcacatgggagtgttatggcagcatcataccaaggcctactgttgcacatggggccaaaaccagtaaacagccaccttcttggaaagggaatgcaaaggctttgggggtgatggaaaagaccttttacaaatgataccaattaaactgccctggaaagggcataggtgggaaaaaaaaaaaaaaaaaaaaaaaaaaaaaaaccccggagcgccacaccagggcgagcgggcgcggagaaaaagaganaggcaaaggacaagagggccacaggggcacaacacacgcggcaccgcggccacccacaccccgtggccaaaaaggggcgacaacacgcggcgcgggccactaccacacacacacagagaggagacccaaaatacacatcatcgccaaagacaggacgcccgagagcgatcaaccaccgagcgcacaccagggaacccagacgaacacaaacaacacaaaccacgacgtggagacagattgacatccacacgcccgcgtccctccactcctccgagttcgcggggacggtgggacacctctcaccactcggatgcagggaatcaacgacagatcagagaagtgacggaccatcaatacgaggacgcaagagcgaacatccatccgattcgttggtagaggtgaatgggcgcaatgaataaaacacttcgcgggcgagctcgttcgaggtgacaggagcaccacacaaaacacaagacgcccc

SEQ ID NO: 422648 - DNA, 1420 bp, Homo sapiens
  misc_feature (939)..(939): n is a, c, g, or t
gtggcggtcgcacctgcgcgagttgggggaaggaggaggggcgaggtgacgcaggcgtaataatagagaaggtgccagaaagatccaaaacaagtggctgcggccgtcgcccaggagtcatcggacgccagaatctggccgggttctgagcttgttccgcctccctcccccgggaatggcgctatccgggtcgaccccggccccgtgctgggaggaggatgagtgcctggactactacgggatgctgtcgcttcaccgtatgttcgaggtggtgggcgggcaactgaccgagtgcgagctggagctcctggcctttctgctggatgaggctcctggcgccgccggaggcttagcccgggcccgcagcggcctagagctcctgctggagctggagcgccgcgggcagtgcgacgagagcaacctgcggctgctggggcaactcctgcgcgtgctggcccgccacgacctgctgccgcacctggcgcgcaagcggcgccggccagtgtctccagaacgctatagctatggcacctccagctcttcaaagaggacagagggtagctgccgtcgccgtcggcagtcaagcagttctgcaaattctcagcagggtcagtgggagacaggctcccccccaaccaagcggcagcggcggagtcggggccggcccagtggtggtgccagacggcggcggagaggggccccagccgcaccccacatcataccaaggcctactgttgcacatggggccaaaaccagtaaacagccaccttcttggaaagggaatgcaaaggctttgggggtgatggaaaagaccttttacaaatgataccaattaaactgccctggaaagggcataggtgggaaaaaaaaaaaaaaaaaaaaaaaaaaaaaaaccccggagcgccacaccagggcgagcgggcgcggagaaaaagaganaggcaaaggacaagagggccacaggggcacaacacacgcggcaccgcggccacccacaccccgtggccaaaaaggggcgacaacacgcggcgcgggccactaccacacacacacagagaggagacccaaaatacacatcatcgccaaagacaggacgcccgagagcgatcaaccaccgagcgcacaccagggaacccagacgaacacaaacaacacaaaccacgacgtggagacagattgacatccacacgcccgcgtccctccactcctccgagttcgcggggacggtgggacacctctcaccactcggatgcagggaatcaacgacagatcagagaagtgacggaccatcaatacgaggacgcaagagcgaacatccatccgattcgttggtagaggtgaatgggcgcaatgaataaaacacttcgcgggcgagctcgttcgaggtgacaggagcaccacacaaaacacaagacgcccc

SEQ ID NO: 422649 - DNA, 421 bp, Homo sapiens
tggaatctatcccaatctaaaggagcttctgccaaaggacaggagattacttatgctgcctgaaatggattatccccaaacccttgtcatttcccccagtgagctctgatttctagactgctttgaaaatgctgtattcattttgctaacttagtatttgggtaccctgctctttggctgttctttttttggagcccttctcagtcaagtctgccggatgtctttctttacctacccctcagttttccttaaaacgcgcacacaactctagagagtgttaagaataatgttacttggttaatgtgttatttattgagtattgtttgtgctaagcattgtgttagatttaaaaaattagtggattgactccactttgttgtgttgttttcattgttgaaaataaatataactttgtattcga

SEQ ID NO: 422650 - DNA, 2182 bp, Homo sapiens
ggagagggggcgggcactctcgatgcgccgcggctgctgctgcgcaggcccagtgctgcgcttcgcggcagaggcgtctgcggtgacagctcagtcagttgagctctgtgtgccaggcgctcgcgagggggtagctcttctagtagtgctcggcgtcagacatggcggaggcgatggatttgggcaaagaccccaacgggcccacccattcctcgactctgttcgtgagggacgacggcagctccatgtccttctacgtgcggcccagcccggccaagcgtcggctgtcgacgctcatcctgcacggcggcggcaccgtgtgccgagtgcaggagcccggggccgtgctgctggcccagcccggggaggcgctggccgaggcctcgggtgatttcatctccacgcagtacatcctggactgcgtggagcgcaacgagaggctggagctggaggcctatcggctgggccccgcctcggcggcggacaccggctcggaagcaaagcccggggccctggccgagggcgccgcggagccggagccgcagcggcacgccgggcggatcgccttcacggatgcggacgacgtagccatccttacctacgtgaaggaaaatgcccgctcgcccagctccgtcaccggtaacgccttgtggaaagcgatggagaagagctcgctcacgcagcactcgtggcagtccctgaaggaccgctacctcaagcacctgcggggccaggagcataagtacctgctgggggacgcgccggtgagcccctcctcccagaagctcaagcggaaggcggaggaggacccggaggccgcggatagcggggaaccacagaataagagaactccagatttgcctgaagaagagtatgtgaaggaagaaatccaggagaatgaagaagcagtcaaaaagatgcttgtggaagccacccgggagtttgaggaggttgtggtggatgagagccctcctgattttgaaatacatataactatgtgtgatgatgatccacccacacctgaggaagactcagaaacacagcctgatgaggaggaagaagaagaagaagaaaaagtttctcaaccagaggtgggagctgccattaagatcattcggcagttaatggagaagtttaacttggatctatcaacagttacacaggccttcctaaaaaatagtggtgagctggaggctacttccgccttcttagcgtctggtcagagagctgatggatatcccatttggtcccgacaagatgacatagatttgcaaaaagatgatgaggataccagagaggcattggtcaaaaaatttggtgctcagaatgtagctcggaggattgaatttcgaaagaaataattggcaagataatgagaaaagaaaaaagtcatggtaggtgaggtggttaaaaaaaattgtgaccaatgaactttagagagttcttgcattggaactggcacttattttctgaccatcgctgctgttgctctgtgagtcctagatttttgtagccaagcagagttgtagagggggataaaaagaaaagaaattggatgtatttacagctgtccttgaacaagtatcaatgtgtttatgaaaggaagatctaaatcagacaggagttggtctacatagtagtaatccattgttggaatggaacccttgctatagtagtgacaaagtgaaaggaaatttaggaggcataggccatttcaggcagcataagtaatctcctgtcctttggcagaagctcctttagattgggatagattccaaataaagaatctagaaataggagaagatttaattatgaggccttgaacacggattatccccaaacccttgtcatttcccccagtgagctctgatttctagactgctttgaaaatgctgtattcattttgctaacttagtatttgggtaccctgctctttggctgttctttttttggagcccttctcagtcaagtctgccggatgtctttctttacctacccctcagttttccttaaaacgcgcacacaactctagagagtgttaagaataatgttacttggttaatgtgttatttattgagtattgtttgtgctaagcattgtgttagatttaaaaaattagtggattgactccactttgttgtgttgttttcattgttgaaaataaatataactttgtattcga

SEQ ID NO: 422651 - DNA, 2323 bp, Homo sapiens
ggagagggggcgggcactctcgatgcgccgcggctgctgctgcgcaggcccagtgctgcgcttcgcggcagaggcgtctgcggtgacagctcagtcagttgagctctgtgtgccaggcgctcgcgagggggtagctcttctagtagtgctcggcgtcagacatggcggaggcgatggatttgggcaaagaccccaacgggcccacccattcctcgactctgttcgtgagggacgacggcagctccatgtccttctacgtgcggcccagcccggccaagcgtcggctgtcgacgctcatcctgcacggcggcggcaccgtgtgccgagtgcaggagcccggggccgtgctgctggcccagcccggggaggcgctggccgaggcctcgggtgatttcatctccacgcagtacatcctggactgcgtggagcgcaacgagaggctggagctggaggcctatcggctgggccccgcctcggcggcggacaccggctcggaagcaaagcccggggccctggccgagggcgccgcggagccggagccgcagcggcacgccgggcggatcgccttcacggatgcggacgacgtagccatccttacctacgtgaaggaaaatgcccgctcgcccagctccgtcaccggtaacgccttgtggaaagcgatggagaagagctcgctcacgcagcactcgtggcagtccctgaaggaccgctacctcaagcacctgcggggccaggagcataagtacctgctgggggacgcgccggtgagcccctcctcccagaagctcaagcggaaggcggaggaggacccggaggccgcggatagcggggaaccacagaataagagaactccagatttgcctgaagaagagtatgtgaaggaagaaatccaggagaatgaagaagcagtcaaaaagatgcttgtggaagccacccgggagtttgaggaggttgtggtggatgagagccctcctgattttgaaatacatataactatgtgtgatgatgatccacccacacctgaggaagactcagaaacacagcctgatgaggaggaagaagaagaagaagaaaaagtttctcaaccagaggtgggagctgccattaagatcattcggcagttaatggagaagtttaacttggatctatcaacagttacacaggccttcctaaaaaatagtggtgagctggaggctacttccgccttcttagcgtctggtcagagagctgatggatatcccatttggtcccgacaagatgacatagatttgcaaaaagatgatgaggataccagagaggcattggtcaaaaaatttggtgctcagaatgtagctcggaggattgaatttcgaaagaaataattggcaagataatgagaaaagaaaaaagtcatggtaggtgaggtggttaaaaaaaattgtgaccaatgaactttagagagttcttgcattggaactggcacttattttctgaccatcgctgctgttgctctgtgagtcctagatttttgtagccaagcagagttgtagagggggataaaaagaaaagaaattggatgtatttacagctgtccttgaacaagtatcaatgtgtttatgaaaggaagatctaaatcagacaggagttggtctacatagtagtaatccattgttggaatggaacccttgctatagtagtgacaaagtgaaaggaaatttaggaggcataggccatttcaggcagcataagtaatctcctgtcctttggcagaagctcctttagattgggatagattccaaataaagaatctagaaataggagaagatttaattatgaggccttgaacacggattatccccaaacccttgtcatttcccccagtgagctctgatttctagactgctttgaaaatgctgtattcattttgctaacttagtatttgggtaccctgctctttggctgttctttttttggagcccttctcagtcaagtctgccggatgtctttctttacctacccctcagttttccttaaaacgcgcacacaactctagagagtgttaagaataatgttacttggttaatgtgttatttattgagtattgtttgtgctaagcattgtgttagatttaaaaaattagtggattgactccactttgttgtgttgttttcattgttgaaaataaatataactttgtattcgaaaaaaaaaaaaaaaaaagggggggggctaaaaaatcccggggccagttaggtaccggtttttgacagggcccaagggggattaagaaacaggggggtaaaagggagggaaaggctggttcggaggccccttggggaaggac

SEQ ID NO: 422652 - DNA, 372 bp, Homo sapiens
  misc_feature (14)..(15): n is a, c, g, or t
tacctgtgcatgannatcactgcaatctatgtcgtctggtcagagagctgatggatatcccatttggtcccgacaagatgacatagatttgcaaaaagatgatgaggataccagagaggcattggtcaaaaaatttggtgctcagaatgtagctcggaggattgaatttcgaaagaaataattggcaagataatgagaaaagaaaaaagtcatggtaggtgaggtggttaaaaaaaattgtgaccaatgaactttagagagttcttgcattggaactggcacttattttctgaccatcgctgctgttgctctgtgagtcctagatttttgtagccaagcagattgcagtgatggtcatgctagcacgccgcc

SEQ ID NO: 422653 - DNA, 1324 bp, Homo sapiens
gctcggtacccagttcgacggagactctcatccacccgggagttgaggaggttgtggtggatgagagccctcctgattttgaaatacatataactatgtgtgatgatgatccacccacacctgaggaagactcagaaacacagcctgatgaggaggaagaagaagaagaagaaaaagtttctcaaccagaggtgtccatctcttcacagtcatggctgatcttgtcatccacttttgggagattctactgtatctgggcagggtatgccttctctacatcaggatctcactcccatcacccagaatgcagtgctgtggcacgatcacagctctctgcagcctcaatttcccaggctcaagcaattctcccacctcagcctcccgagaagctggaactacaggaatgtgccaccgcatcgggctaatgttttgtatttttggtagagacagggtttagccatgttgcccaggctggtctcgaattcttgggctcaagcaatcctctcacctcagcctcctaaagtgcttggactagaggtgcaaatcaccatgcctgaccctttatctctacttttggccagaagcaatccagttaacactctatcatatattattcctcctactgttttctcctctctaaattcttcagctttggctgtttgcccattagtcactgcctgggagttttcaacttttaaaatttgtgacaacattgttaggtcattaagatgggtcctcatccgatgtaactggcgttcttacaagaagcagggaaatgacgtggcggagacacaggagggggaaataccgcgtgatgatggagttaaagacaggagttatgcagctgcaagccaagaacaccaagggctgctggtgacagcaagcgaggagggagcctggccctgctggcatcttgattcagacttccagcccctaccactctgagagaataaattcctgttgttttaagccacccagtttagggtgctttgttgcagccgccttaagaaaggaatacatcgtatcattcccagaaactgcttgagtcccagggtttgagactggaaagtgctgagcctccctcactaccagatgccaccttggcgagggtgagtaggtaggaaaggctgagcagtgaccccacattcatgtgctatggcacatttgagaacataccaaacaggaaatgaaactgatgtgaaacagaaatttccgtcataaaaacaatttgcatgaaacgttcactgtactaaaaaagtagatgatttaggacaattttaacttttaccctgaaaataaatgtttaaaccattcatgatgaaaa

SEQ ID NO: 422654 - DNA, 2136 bp, Homo sapiens
ggagagggggcgggcactctcgatgcgccgcggctgctgctgcgcaggcccagtgctgcgcttcgcggcagaggcgtctgcggtgacagctcagtcagttgagctctgtgtgccaggcgctcgcgagggggtagctcttctagtagtgctcggcgtcagacatggcggaggcgatggatttgggcaaagaccccaacgggcccacccattcctcgactctgttcgtgagggacgacggcagctccatgtccttctacgtgcggcccagcccggccaagcgtcggctgtcgacgctcatcctgcacggcggcggcaccgtgtgccgagtgcaggagcccggggccgtgctgctggcccagcccggggaggcgctggccgaggcctcgggtgatttcatctccacgcagtacatcctggactgcgtggagcgcaacgagaggctggagctggaggcctatcggctgggccccgcctcggcggcggacaccggctcggaagcaaagcccggggccctggccgagggcgccgcggagccggagccgcagcggcacgccgggcggatcgccttcacggatgcggacgacgtagccatccttacctacgtgaaggaaaatgcccgctcgcccagctccgtcaccggtaacgccttgtggaaagcgatggagaagagctcgctcacgcagcactcgtggcagtccctgaaggaccgctacctcaagcacctgcggggccaggagcataagtacctgctgggggacgcgccggtgagcccctcctcccagaagctcaagcggaaggcggaggaggacccggaggccgcggatagcggggaaccacagaataagagaactccagatttgcctgaagaagagtatgtgaaggaagaaatccaggagaatgaagaagcagtcaaaaagatgcttgtggaagccacccgggagtttgaggaggttgtggtggatgagagccctcctgattttgaaatacatataactatgtgtgatgatgatccacccacacctgaggaagactcagaaacacagcctgatgaggaggaagaagaagaagaagaaaaagtttctcaaccagaggtgggagctgccattaagatcattcggcagttaatggagaagtttaacttggatctatcaacagttacacaggccttcctaaaaaatagtggtgagctggaggctacttccgccttcttagcgtctggtcagagagctgatggatatcccatttggtcccgacaagatgacatagatttgcaaaaagatgatgaggataccagagaggcattggtcaaaaaatttggtgctcagaatgtagctcggaggattgaatttcgaaagaaataattggcaagataatgagaaaagaaaaaagtcatggtaggtgaggtggttaaaaaaaattgtgaccaatgaactttagagagttcttgcattggaactggcacttattttctgaccatcgctgctgttgctctgtgagtcctagatttttgtagccaagcagagttgtagagggggataaaaagaaaagaaattggagaagatctaaatcagacaggagttggtctacatagtagtaatccattgttggaatggaacccttgctatagtagtgacaaagtgaaaggaaatttaggaggcataggccatttcaggcagcataagtaatctcctgtcctttggcagaagctcctttagattgggatagattccaaataaagaatctagaaataggagaagatttaattatgaggccttgaacacggattatccccaaacccttgtcatttcccccagtgagctctgatttctagactgctttgaaaatgctgtattcattttgctaacttagtatttgggtaccctgctctttggctgttctttttttggagcccttctcagtcaagtctgccggatgtctttctttacctacccctcagttttccttaaaacgcgcacacaactctagagagtgttaagaataatgttacttggttaatgtgttatttattgagtattgtttgtgctaagcattgtgttagatttaaaaaattagtggattgactccactttgttgtgttgttttcattgttgaaaataaatataactttgtattcga

SEQ ID NO: 422655 - DNA, 2150 bp, Homo sapiens
ggagagggggcgggcactctcgatgcgccgcggctgctgctgcgcaggcccagtgctgcgcttcgcggcagaggcgtctgcggtgacagctcagtcagttgagctctgtgtgccaggcgctcgcgagggggtagctcttctagtagtgctcggcgtcagacatggcggaggcgatggatttgggcaaagaccccaacgggcccacccattcctcgactctgttcgtgagggacgacggcagctccatgtccttctacgtgcggcccagcccggccaagcgtcggctgtcgacgctcatcctgcacggcggcggcaccgtgtgccgagtgcaggagcccggggccgtgctgctggcccagcccggggaggcgctggccgaggcctcgggtgatttcatctccacgcagtacatcctggactgcgtggagcgcaacgagaggctggagctggaggcctatcggctgggccccgcctcggcggcggacaccggctcggaagcaaagcccggggccctggccgagggcgccgcggagccggagccgcagcggcacgccgggcggatcgccttcacggatgcggacgacgtagccatccttacctacgtgaaggaaaatgcccgctcgcccagctccgtcaccggtaacgccttgtggaaagcgatggagaagagctcgctcacgcagcactcgtggcagtccctgaaggaccgctacctcaagcacctgcggggccaggagcataagtacctgctgggggacgcgccggtgagcccctcctcccagaagctcaagcggaaggcggaggaggacccggaggccgcggatagcggggaaccacagaataagagaactccagatttgcctgaagaagagtatgtgaaggaagaaatccaggagaatgaagaagcagtcaaaaagatgcttgtggaagccacccgggagtttgaggaggttgtggtggatgagagccctcctgattttgaaatacatataactatgtgtgatgatgatccacccacacctgaggaagactcagaaacacagcctgatgaggaggaagaagaagaagaagaaaaagtttctcaaccagaggtgggagctgccattaagatcattcggcagttaatggagaagtttaacttggatctatcaacagttacacaggccttcctaaaaaatagtggtgagctggaggctacttccgccttcttagcgtctggtcagagagctgatggatatcccatttggtcccgacaagatgacatagatttgcaaaaagatgatgaggataccagagaggcattggtcaaaaaatttggtgctcagaatgtagctcggaggattgaatttcgaaagaaataattggcaagataatgagaaaaaaaattgtgaccaatgaactttagagagttcttgcattggaactggcacttattttctgaccatcgctgctgttgctctgtgagtcctagatttttgtagccaagcagagttgtagagggggataaaaagaaaagaaattggatgtatttacagctgtccttgaacaagtatcaatgtgtttatgaaaggaagatctaaatcagacaggagttggtctacatagtagtaatccattgttggaatggaacccttgctatagtagtgacaaagtgaaaggaaatttaggaggcataggccatttcaggcagcataagtaatctcctgtcctttggcagaagctcctttagattgggatagattccaaataaagaatctagaaataggagaagatttaattatgaggccttgaacacggattatccccaaacccttgtcatttcccccagtgagctctgatttctagactgctttgaaaatgctgtattcattttgctaacttagtatttgggtaccctgctctttggctgttctttttttggagcccttctcagtcaagtctgccggatgtctttctttacctacccctcagttttccttaaaacgcgcacacaactctagagagtgttaagaataatgttacttggttaatgtgttatttattgagtattgtttgtgctaagcattgtgttagatttaaaaaattagtggattgactccactttgttgtgttgttttcattgttgaaaataaatataactttgtattcga

SEQ ID NO: 422656 - DNA, 2228 bp, Homo sapiens
ggagagggggcgggcactctcgatgcgccgcggctgctgctgcgcaggcccagtgctgcgcttcgcggcagaggcgtctgcggtgacagctcagtcagttgagctctgtgtgccaggcgctcgcgagggggtagctcttctagtagtgctcggcgtcagacatggcggaggcgatggatttgggcaaagaccccaacgggcccacccattcctcgactctgttcgtgagggacgacggcagctccatgtccttctacgtgcggcccagcccggccaagcgtcggctgtcgacgctcatcctgcacggcggcggcaccgtgtgccgagtgcaggagcccggggccgtgctgctggcccagcccggggaggcgctggccgaggcctcgggtgatttcatctccacgcagtacatcctggactgcgtggagcgcaacgagaggctggagctggaggcctatcggctgggccccgcctcggcggcggacaccggctcggaagcaaagcccggggccctggccgagggcgccgcggagccggagccgcagcggcacgccgggcggatcgccttcacggatgcggacgacgtagccatccttacctacgtgaaggaaaatgcccgctcgcccagctccgtcaccggtaacgccttgtggaaagcgatggagaagagctcgctcacgcagcactcgtggcagtccctgaaggaccgctacctcaagcacctgcggggccaggagcataagtacctgctgggggacgcgccggtgagcccctcctcccagaagctcaagcggaaggcggaggaggacccggaggccgcggatagcggggaaccacagaataagagaactccagatttgcctgaagaagagtatgtgaaggaagaaatccaggagaatgaagaagcagtcaaaaagatgcttgtggaagccacccgggagtttgaggaggttgtggtggatgagagccctcctgattttgaaatacatataactatgtgtgatgatgatccacccacacctgaggaagactcagaaacacagcctgatgaggaggaagaagaagaagaagaaaaagtttctcaaccagaggtgggagctgccattaagatcattcggcagttaatggagaagtttaacttggatctatcaacagttacacaggccttcctaaaaaatagtggtgagctggaggctacttccgccttcttagcgtctggtcagagagctgatggatatcccatttggtcccgacaagatgacatagatttgcaaaaagatgatgaggataccagagaggcattggtcaaaaaatttggtgctcagaatgtagctcggaggattgaatttcgaaagaaataattggcaagataatgagaaaagaaaaaagtcatggtaggtgaggtggttaaaaaaaattgtgaccaatgaactttagagagttcttgcattggaactggcacttattttctgaccatcgctgctgttgctctgtgagtcctagatttttgtagccaagcagagttgtagagggggataaaaagaaaagaaattggatgtatttacagctgtccttgaacaagtatcaatgtgtttatgaaaggaagatctaaatcagacaggagttggtctacatagtagtaatccattgttggaatggaacccttgctatagtagtgacaaagtgaaaggaaatttaggaggcataggccatttcaggcagcataagtaatctcctgtcctttggcagaagctcctttagattgggatagattccaaataaagaatctagaaataggagaagatttaattatgaggccttgaacacggattatccccaaacccttgtcatttcccccagtgagctctgatttctagactgctttgaaaatgctgtattcattttgctaacttagtatttgggtaccctgctctttggctgttctttttttggagcccttctcagtcaagtctgccggatgtctttctttacctacccctcagttttccttaaaacgcgcacacaactctagagagtgttaagaataatgttacttggttaatgtgttatttattgagtattgtttgtgctaagcattgtgttagatttaaaaaattagtggattgactccactttgttgtgttgttttcattgttgaaaataaatataactttgtattcgaaaaaaaaagtcgaccggccgcgaatttagtagtagtagtaggcggc

SEQ ID NO: 422657 - DNA, 2231 bp, Homo sapiens
ggagagggggcgggcactctcgatgcgccgcggctgctgctgcgcaggcccagtgctgcgcttcgcggcagaggcgtctgcggtgacagctcagtcagttgagctctgtgtgccaggcgctcgcgagggggtagctcttctagtagtgctcggcgtcagacatggcggaggcgatggatttgggcaaagaccccaacgggcccacccattcctcgactctgttcgtgagggacgacggcagctccatgtccttctacgtgcggcccagcccggccaagcgtcggctgtcgacgctcatcctgcacggcggcggcaccgtgtgccgagtgcaggagcccggggccgtgctgctggcccagcccggggaggcgctggccgaggcctcgggtgatttcatctccacgcagtacatcctggactgcgtggagcgcaacgagaggctggagctggaggcctatcggctgggccccgcctcggcggcggacaccggctcggaagcaaagcccggggccctggccgagggcgccgcggagccggagccgcagcggcacgccgggcggatcgccttcacggatgcggacgacgtagccatccttacctacgtgaaggaaaatgcccgctcgcccagctccgtcaccggtaacgccttgtggaaagcgatggagaagagctcgctcacgcagcactcgtggcagtccctgaaggaccgctacctcaagcacctgcggggccaggagcataagtacctgctgggggacgcgccggtgagcccctcctcccagaagctcaagcggaaggcggaggaggacccggaggccgcggatagcggggaaccacagaataagagaactccagatttgcctgaagaagagtatgtgaaggaagaaatccaggagaatgaagaagcagtcaaaaagatgcttgtggaagccacccgggagtttgaggaggttgtggtggatgagagccctcctgattttgaaatacatataactatgtgtgatgatgatccacccacacctgaggaagactcagaaacacagcctgatgaggaggaagaagaagaagaagaaaaagtttctcaaccagaggtgggagctgccattaagatcattcggcagttaatggagaagtttaacttggatctatcaacagttacacaggccttcctaaaaaatagtggtgagctggaggctacttccgccttcttagcgtctggtcagagagctgatggatatcccatttggtcccgacaagatgacatagatttgcaaaaagatgatgaggataccagagaggcattggtcaaaaaatttggtgctcagaatgtagctcggaggattgaatttcgaaagaaataattggcaagataatgagaaaagaaaaaagtcatggtaggtgaggtggttaaaaaaaattgtgaccaatgaactttagagagttcttgcattggaactggcacttattttctgaccatcgctgctgttgctctgtgagtcctagatttttgtagccaagcagagttgtagagggggataaaaagaaaagaaattggatgtatttacagctgtccttgaacaagtatcaatgtgtttatgaaaggaagatctaaatcagacaggagttggtctacatagtagtaatccattgttggaatggaacccttgctatagtagtgacaaagtgaaaggaaatttaggaggcataggccatttcaggcagcataagtaatctcctgtcctttggcagaagctcctttagattgggatagattccaaataaagaatctagaaataggagaagatttaattatgaggccttgaacacggattatccccaaacccttgtcatttcccccagtgagctctgatttctagactgctttgaaaatgctgtattcattttgctaacttagtatttgggtaccctgctctttggctgttctttttttggagcccttctcagtcaagtctgccggatgtctttctttacctacccctcagttttccttaaaacgcgcacacaactctagagagtgttaagaataatgttacttggttaatgtgttatttattgagtattgtttgtgctaagcattgtgttagatttaaaaaattagtggattgactccactttgttgtgttgttttcattgttgaaaataaatataactttgtattcgaaaaaacaaaacaacacaaaacaaaacaacacaaacacaaaaaaaagggg

SEQ ID NO: 422658 - DNA, 1379 bp, Homo sapiens
cttggccccgccccctgttgacatccggaaccacagaataagagaactccagatttgcctgaagaagagtatgtgaaggaagaaatccaggagaatgaagaagcagtcaaaaagatgcttgtggaagccacccgggagtttgaggaggttgtggtggatgagagccctcctgattttgaaatacatataactatgtgtgatgatgatccacccacacctgaggaagactcagaaacacagcctgatgaggaggaagaagaagaagaagaaaaagtttctcaaccagaggtgggagctgccattaagatcattcggcagttaatggagaagtttaacttggatctatcaacagttacacaggccttcctaaaaaatagtggtgagctggaggctacttccgccttcttagcgtctggtcagagagctgatggatatcccatttggtcccgacaagatgacatagatttgcaaaaagatgatgaggataccagagaggcattggtcaaaaaatttggtgctcagaatgtagctcggaggattgaatttcgaaagaaataattggcaagataatgagaaaagaaaaaagtcatggtaggtgaggtggttaaaaaaaattgtgaccaatgaactttagagagttcttgcattggaactggcacttattttctgaccatcgctgctgttgctctgtgagtcctagatttttgtagccaagcagagttgtagagggggataaaaagaaaagaaattggatgtatttacagctgtccttgaacaagtatcaatgtgtttatgaaaggaagatctaaatcagacaggagttggtctacatagtagtaatccattgttggaatggaacccttgctatagtagtgacaaagtgaaaggaaatttaggaggcataggccatttcaggcagcataagtaatctcctgtcctttggcagaagctcctttagattgggatagattccaaataaagaatctagaaataggagaagatttaattatgaggccttgaacacggattatccccaaacccttgtcatttcccccagtgagctctgatttctagactgctttgaaaatgctgtattcattttgctaacttagtatttgggtaccctgctctttggctgttctttttttggagcccttctcagtcaagtctgccggatgtctttctttacctacccctcagttttccttaaaacgcgcacacaactctagagagtgttaagaataatgttacttggttaatgtgttatttattgagtattgtttgtgctaagcattgtgttagatttaaaaaattagtggattgactccactttgttgtgttgttttcattgttgaaaataaatataactttgtattcga

SEQ ID NO: 422659 - DNA, 1282 bp, Homo sapiens
gctcggtacccagttcgacggagactctcatccacccgggagttgaggaggttgtggtggatgagagccctcctgattttgaaatacatataactatgtgtgatgatgatccacccacacctgaggaagactcagaaacacagcctgatgaggaggaagaagaagaagaagaaaaagtttctcaaccagaggtgggagctgccattaagatcattcggcagttaatggagaagtttaacttggatctatcaacagttacacaggccttcctaaaaaatagtggtgagctggaggctacttccgccttcttagcgtctggtcagagagctgatggatatcccatttggtcccgacaagatgacatagatttgcaaaaagatgatgaggataccagagaggcattggtcaaaaaatttggtgctcagaatgtagctcggaggattgaatttcgaaagaaataattggcaagataatgagaaaagaaaaaagtcatggtaggtgaggtggttaaaaaaaattgtgaccaatgaactttagagagttcttgcattggaactggcacttattttctgaccatcgctgctgttgctctgtgagtcctagatttttgtagccaagcagagttgtagagggggataaaaagaaaagaaattggatgtatttacagctgtccttgaacaagtatcaatgtgtttatgaaaggaagatctaaatcagacaggagttggtctacatagtagtaatccattgttggaatggaacccttgctatagtagtgacaaagtgaaaggaaatttaggaggcataggccatttcaggcagcataagtaatctcctgtcctttggcagaagctcctttagattgggatagattccaaataaagaatctagaaataggagaagatttaattatgaggccttgaacacggattatccccaaacccttgtcatttcccccagtgagctctgatttctagactgctttgaaaatgctgtattcattttgctaacttagtatttgggtaccctgctctttggctgttctttttttggagcccttctcagtcaagtctgccggatgtctttctttacctacccctcagttttccttaaaacgcgcacacaactctagagagtgttaagaataatgttacttggttaatgtgttatttattgagtattgtttgtgctaagcattgtgttagatttaaaaaattagtggattgactccactttgttgtgttgttttcattgttgaaaataaatataactttgtattcga

SEQ ID NO: 422660 - DNA, 1719 bp, Homo sapiens
ttttttaaggctattatctcctttattcaaaaaataaatatttcactttgattcaacatatttcaaatcacattaagcacagagaagaaatacagtccctttggagattgtgaacacgtgttggaaagaagcatgatccaaacaatgggaatgaggtgagtgtggattccagctgtttcctgacccagaggttccatccctcttcaggtggagctacttatcgatttttaggagagaaaaagaagcacacacacacacacacacacacacacacgtgcacacacacacgcgcacacacacacgcgtgtacatatacatacacatctgacatgaataaatgtaagaaggaacacagcatattaagaggaactgaaggaagtccagtgtgattggaatgcagagggcaagggggtgatagttggaagagaccagatattgtaagaaatcaagactttggtgattaggagctggttttactcatcattctgtctaggtggatgagagccctcctgattttgaaatacatataactatgtgtgatgatgatccacccacacctgaggaagactcagaaacacagcctgatgaggaggaagaagaagaagaagaaaaagtttctcaaccagaggtgggagctgccattaagatcattcggcagttaatggagaagtttaacttggatctatcaacagttacacaggccttcctaaaaaatagtggtgagctggaggctacttccgccttcttagcgtctggtcagagagctgatggatatcccatttggtcccgacaagatgacatagatttgcaaaaagatgatgaggataccagagaggcattggtcaaaaaatttggtgctcagaatgtagctcggaggattgaatttcgaaagaaataattggcaagataatgagaaaagaaaaaagtcatggtaggtgaggtggttaaaaaaaattgtgaccaatgaactttagagagttcttgcattggaactggcacttattttctgaccatcgctgctgttgctctgtgagtcctagatttttgtagccaagcagagttgtagagggggataaaaagaaaagaaattggatgtatttacagctgtccttgaacaagtatcaatgtgtttatgaaaggaagatctaaatcagacaggagttggtctacatagtagtaatccattgttggaatggaacccttgctatagtagtgacaaagtgaaaggaaatttaggaggcataggccatttcaggcagcataagtaatctcctgtcctttggcagaagctcctttagattgggatagattccaaataaagaatctagaaataggagaagatttaattatgaggccttgaacacggattatccccaaacccttgtcatttcccccagtgagctctgatttctagactgctttgaaaatgctgtattcattttgctaacttagtatttgggtaccctgctctttggctgttctttttttggagcccttctcagtcaagtctgccggatgtctttctttacctacccctcagttttccttaaaacgcgcacacaactctagagagtgttaagaataatgttacttggttaatgtgttatttattgagtattgtttgtgctaagcattgtgttagatttaaaaaattagtggattgactccactttgttgtgttgttttcattgttgaaaataaatataactttgtattcga

SEQ ID NO: 422661 - DNA, 1649 bp, Homo sapiens
actatgtataggcattggtgggtattggagatgtggtgatgaacatttaacaaatctaatgaacatgtgtgcacatatatgtgtctctctctttatatatacatatatttttcatattcaatgtagcttctaatattctattggaatactatagtcaattatacacacatatacacatatactccccctacccctcacacacacgtgcacacacacacgcgcacacacacacgcgtgtacatatacatacacatctgacatgaataaatgtaagaaggaacacagcatattaagaggaactgaaggaagtccagtgtgattggaatgcagagggcaagggggtgatagttggaagagaccagatattgtaagaaatcaagactttggtgattaggagctggttttactcatcattctgtctaggtggatgagagccctcctgattttgaaatacatataactatgtgtgatgatgatccacccacacctgaggaagactcagaaacacagcctgatgaggaggaagaagaagaagaagaaaaagtttctcaaccagaggtgggagctgccattaagatcattcggcagttaatggagaagtttaacttggatctatcaacagttacacaggccttcctaaaaaatagtggtgagctggaggctacttccgccttcttagcgtctggtcagagagctgatggatatcccatttggtcccgacaagatgacatagatttgcaaaaagatgatgaggataccagagaggcattggtcaaaaaatttggtgctcagaatgtagctcggaggattgaatttcgaaagaaataattggcaagataatgagaaaagaaaaaagtcatggtaggtgaggtggttaaaaaaaattgtgaccaatgaactttagagagttcttgcattggaactggcacttattttctgaccatcgctgctgttgctctgtgagtcctagatttttgtagccaagcagagttgtagagggggataaaaagaaaagaaattggatgtatttacagctgtccttgaacaagtatcaatgtgtttatgaaaggaagatctaaatcagacaggagttggtctacatagtagtaatccattgttggaatggaacccttgctatagtagtgacaaagtgaaaggaaatttaggaggcataggccatttcaggcagcataagtaatctcctgtcctttggcagaagctcctttagattgggatagattccaaataaagaatctagaaataggagaagatttaattatgaggccttgaacacggattatccccaaacccttgtcatttcccccagtgagctctgatttctagactgctttgaaaatgctgtattcattttgctaacttagtatttgggtaccctgctctttggctgttctttttttggagcccttctcagtcaagtctgccggatgtctttctttacctacccctcagttttccttaaaacgcgcacacaactctagagagtgttaagaataatgttacttggttaatgtgttatttattgagtattgtttgtgctaagcattgtgttagatttaaaaaattagtggattgactccactttgttgtgttgttttcattgttgaaaataaatataactttgtattcga

SEQ ID NO: 422662 - DNA, 1194 bp, Homo sapiens
ggaatctatcaccgggagttgaggaggttgtggtgatagattgtgtgatgatgatcacaactgaggagacgaagaagaagaagaaaaagtttctcaaccagaggtgggagctgccattaagatcattcggcagttaatggagaagtttaacttggatctatcaacagttacacaggccttcctaaaaaatagtggtgagctggaggctacttccgccttcttagcgtctggtcagagagctgatggatatcccatttggtcccgacaagatgacatagatttgcaaaaagatgatgaggataccagagaggcattggtcaaaaaatttggtgctcagaatgtagctcggaggattgaatttcgaaagaaataattggcaagataatgagaaaagaaaaaagtcatggtaggtgaggtggttaaaaaaaattgtgaccaatgaactttagagagttcttgcattggaactggcacttattttctgaccatcgctgctgttgctctgtgagtcctagatttttgtagccaagcagagttgtagagggggataaaaagaaaagaaattggatgtatttacagctgtccttgaacaagtatcaatgtgtttatgaaaggaagatctaaatcagacaggagttggtctacatagtagtaatccattgttggaatggaacccttgctatagtagtgacaaagtgaaaggaaatttaggaggcataggccatttcaggcagcataagtaatctcctgtcctttggcagaagctcctttagattgggatagattccaaataaagaatctagaaataggagaagatttaattatgaggccttgaacacggattatccccaaacccttgtcatttcccccagtgagctctgatttctagactgctttgaaaatgctgtattcattttgctaacttagtatttgggtaccctgctctttggctgttctttttttggagcccttctcagtcaagtctgccggatgtctttctttacctacccctcagttttccttaaaacgcgcacacaactctagagagtgttaagaataatgttacttggttaatgtgttatttattgagtattgtttgtgctaagcattgtgttagatttaaaaaattagtggattgactccactttgttgtgttgttttcattgttgaaaataaatataactttgtattcga

SEQ ID NO: 422663 - DNA, 1002 bp, Homo sapiens
  misc_feature (14)..(15): n is a, c, g, or t
tacctgtgcatgannatcactgcaatctatgtcgtctggtcagagagctgatggatatcccatttggtcccgacaagatgacatagatttgcaaaaagatgatgaggataccagagaggcattggtcaaaaaatttggtgctcagaatgtagctcggaggattgaatttcgaaagaaataattggcaagataatgagaaaagaaaaaagtcatggtaggtgaggtggttaaaaaaaattgtgaccaatgaactttagagagttcttgcattggaactggcacttattttctgaccatcgctgctgttgctctgtgagtcctagatttttgtagccaagcagagttgtagagggggataaaaagaaaagaaattggatgtatttacagctgtccttgaacaagtatcaatgtgtttatgaaaggaagatctaaatcagacaggagttggtctacatagtagtaatccattgttggaatggaacccttgctatagtagtgacaaagtgaaaggaaatttaggaggcataggccatttcaggcagcataagtaatctcctgtcctttggcagaagctcctttagattgggatagattccaaataaagaatctagaaataggagaagatttaattatgaggccttgaacacggattatccccaaacccttgtcatttcccccagtgagctctgatttctagactgctttgaaaatgctgtattcattttgctaacttagtatttgggtaccctgctctttggctgttctttttttggagcccttctcagtcaagtctgccggatgtctttctttacctacccctcagttttccttaaaacgcgcacacaactctagagagtgttaagaataatgttacttggttaatgtgttatttattgagtattgtttgtgctaagcattgtgttagatttaaaaaattagtggattgactccactttgttgtgttgttttcattgttgaaaataaatataactttgtattcga

SEQ ID NO: 422664 - DNA, 1663 bp, Homo sapiens
ttttttaaggctattatctcctttattcaaaaaataaatatttcactttgattcaacatatttcaaatcacattaagcacagagaagaaatacagtccctttggagattgtgaacacgtgttggaaagaagcatgatccaaacaatgggaatgaggtgagtgtggattccagctgtttcctgacccagaggttccatccctcttcaggtggagctacttatcgatttttaggagagaaaaagaagcacacacacacacacacacacacacacacgtgcacacacacacgcgcacacacacacgcgtgtacatatacatacacatctgacatgaataaatgtaagaaggaacacagcatattaagaggaactgaaggaagtccagtgtgattggaatgcagagggcaagggggtgatagttggaagagaccagatattgtaagaaatcaagactttggtgattaggagctggttttactcatcattctgtctaggtggatgagagccctcctgattttgaaatacatataactatgtgtgatgatgatccacccacacctgaggaagactcagaaacacagcctgatgaggaggaagaagaagaagaagaaaaagtttctcaaccagaggtgggagctgccattaagatcattcggcagttaatggagaagtttaacttggatctatcaacagttacacaggccttcctaaaaaatagtggtgagctggaggctacttccgccttcttagcgtctggtcagagagctgatggatatcccatttggtcccgacaagatgacatagatttgcaaaaagatgatgaggataccagagaggcattggtcaaaaaatttggtgctcagaatgtagctcggaggattgaatttcgaaagaaataattggcaagataatgagaaaagaaaaaagtcatggtaggtgaggtggttaattctgaccatcgctgctgttgctctgtgagtcctagatttttgtagccaagcagagttgtagagggggataaaaagaaaagaaattggatgtatttacagctgtccttgaacaagtatcaatgtgtttatgaaaggaagatctaaatcagacaggagttggtctacatagtagtaatccattgttggaatggaacccttgctatagtagtgacaaagtgaaaggaaatttaggaggcataggccatttcaggcagcataagtaatctcctgtcctttggcagaagctcctttagattgggatagattccaaataaagaatctagaaataggagaagatttaattatgaggccttgaacacggattatccccaaacccttgtcatttcccccagtgagctctgatttctagactgctttgaaaatgctgtattcattttgctaacttagtatttgggtaccctgctctttggctgttctttttttggagcccttctcagtcaagtctgccggatgtctttctttacctacccctcagttttccttaaaacgcgcacacaactctagagagtgttaagaataatgttacttggttaatgtgttatttattgagtattgtttgtgctaagcattgtgttagatttaaaaaattagtggattgactccactttgttgtgttgttttcattgttgaaaataaatataactttgtattcga

SEQ ID NO: 422665 - DNA, 1205 bp, Homo sapiens
tcttcttgatcatcctttatttttcatctactcatgcttagctcttctatactctataattacacattttccatttcacattattcgtacactctctattaatctagtgcgcacttcctacaaacaaaactggaggtcgcttccctactagattatgactatcttgctcacaactatgttgctgtagacacggcatcccataacatcaaagaacaatgactacagatacacgcgagtatccacatatatttaagatcagctctattgaatacaagcagtgttctaaacaggtctagctgatcgagatacgtctaataggggggacatacaacagatcttggggtgtaatccggcgttcaaggcctccatcagtcaatcggtgctcgtatatctcctagattctatatatttgcaatctatactcccatccttaaaggagctcatgtccaaagaacaggagatgactttagtgcatgccatcaaactggcctagtgaactctctaaagtttccgctttccaatagcaagggtccattcacaatggattactacactgtagaccaactcctgtctgattactgtatttacagctgtccttgaacaagtatcaatgtgtttatgaaaggaagatctaaatcagacaggagttggtctacatagtagtaatccattgttggaatggaacccttgctatagtagtgacaaagtgaaaggaaatttaggaggcataggccatttcaggcagcataagtaatctcctgtcctttggcagaagctcctttagattgggatagattccaaataaagaatctagaaataggagaagatttaattatgaggccttgaacacggattatccccaaacccttgtcatttcccccagtgagctctgatttctagactgctttgaaaatgctgtattcattttgctaacttagtatttgggtaccctgctctttggctgttctttttttggagcccttctcagtcaagtctgccggatgtctttctttacctacccctcagttttccttaaaacgcgcacacaactctagagagtgttaagaataatgttacttggttaatgtgttatttattgagtattgtttgtgctaagcattgtgttagatttaaaaaattagtggattgactccactttgttgtgttgttttcattgttgaaaataaatataactttgtattcga

SEQ ID NO: 422666 - DNA, 2224 bp, Homo sapiens
ggagagggggcgggcactctcgatgcgccgcggctgctgctgcgcaggcccagtgctgcgcttcgcggcagaggcgtctgcggtgacagctcagtcagttgagctctgtgtgccaggcgctcgcgagggggtagctcttctagtagtgctcggcgtcagacatggcggaggcgatggatttgggcaaagaccccaacgggcccacccattcctcgactctgttcgtgagggacgacggcagctccatgtccttctacgtgcggcccagcccggccaagcgtcggctgtcgacgctcatcctgcacggcggcggcaccgtgtgccgagtgcaggagcccggggccgtgctgctggcccagcccggggaggcgctggccgaggcctcgggtgatttcatctccacgcagtacatcctggactgcgtggagcgcaacgagaggctggagctggaggcctatcggctgggccccgcctcggcggcggacaccggctcggaagcaaagcccggggccctggccgagggcgccgcggagccggagccgcagcggcacgccgggcggatcgccttcacggatgcggacgacgtagccatccttacctacgtgaaggaaaatgcccgctcgcccagctccgtcaccggtaacgccttgtggaaagcgatggagaagagctcgctcacgcagcactcgtggcagtccctgaaggaccgctacctcaagcacctgcggggccaggagcataagtacctgctgggggacgcgccggtgagcccctcctcccagaagctcaagcggaaggcggaggaggacccggaggccgcggatagcggggaaccacagaataagagaactccagatttgcctgaagaagagtatgtgaaggaagaaatccaggagaatgaagaagcagtcaaaaagatgcttgtggaagccacccgggagtttgaggaggttgtggtggatgagagccctcctgattttgaaatacatataactatgtgtgatgatgatccacccacacctgaggaagactcagaaacacagcctgatgaggaggaagaagaagaagaagaaaaagtttctcaaccagaggtgtccatctcttcacagtcatggctgatcttgtcatccacttttgggagattctactgtatctgggcagggtatgccttctctacatcaggatctcactcccatcacccagaatgcagtgctgtggcacgatcacagctctctgcagcctcaatttcccaggctcaagcaattctcccacctcagcctcccgagaagctggaactacaggaatgtgccaccgcatcgggctaatgttttgtatttttggtagagacagggtttagccatgttgcccaggctggtctcgaattcttgggctcaagcaatcctctcacctcagcctcctaaagtgcttggactagaggtgcaaatcaccatgcctgaccctttatctctacttttggccagaagcaatccagttaacactctatcatatattattcctcctactgttttctcctctctaaattcttcagctttggctgtttgcccattagtcactgcctgggagttttcaacttttaaaatttgtgacaacattgttaggtcattaagatgggtcctcatccgatgtaactggcgttcttacaagaagcagggaaatgacgtggcggagacacaggagggggaaataccgcgtgatgatggagttaaagacaggagttatgcagctgcaagccaagaacaccaagggctgctggtgacagcaagcgaggagggagcctggccctgctggcatcttgattcagacttccagcccctaccactctgagagaataaattcctgttgttttaagccacccagtttagggtgctttgttgcagccgccttaagaaaggaatacatcgtatcattcccagaaactgcttgagtcccagggtttgagactggaaagtgctgagcctccctcactaccagatgccaccttggcgagggtgagtaggtaggaaaggctgagcagtgaccccacattcatgtgctatggcacatttgagaacataccaaacaggaaatgaaactgatgtgaaacagaaatttccgtcataaaaacaatttgcatgaaacgttcactgtactaaaaaagtagatgatttaggacaattttaacttttaccctgaaaataaatgtttaaaccattcatgatgaaaa

SEQ ID NO: 422667 - DNA, 1164 bp, Homo sapiens
ggagagggggcgggcactctcgatgcgccgcggctgctgctgcgcaggcccagtgctgcgcttcgcggcagaggcgtctgcggtgacagctcagtcagttgagctctgtgtgccaggcgctcgcgagggggtagctcttctagtagtgctcggcgtcagacatggcggaggcgatggatttgggcaaagaccccaacgggcccacccattcctcgactctgttcgtgagggacgacggcagctccatgtccttctacgtgcggcccagcccggccaagcgtcggctgtcgacgctcatcctgcacggcggcggcaccgtgtgccgagtgcaggagcccggggccgtgctgctggcccagcccggggaggcgctggccgaggcctcgggtgatttcatctccacgcagtacatcctggactgcgtggagcgcaacgagaggctggagctggaggcctatcggctgggccccgcctcggcggcggacaccggctcggaagcaaagcccggggccctggccgagggcgccgcggagccggagccgcagcggcacgccgggcggatcgccttcacggatgcggacgacgtagccatccttacctacgtgaaggaaaatgcccgctcgcccagctccgtcaccggtaacgccttgtggaaagcgatggagaagagctcgctcacgcagcactcgtggcagtccctgaaggaccgctacctcaagcacctgcggggccaggagcataagtacctgctgggggacgcgccggtgagcccctcctcccagaagctcaagcggaaggcggaggaggacccggaggccgcggatagcggggaaccacagaataagagaactccagatttgcctgaagaagaatgctgtattcattttgctaacttagtatttgggtaccctgctctttggctgttctttttttggagcccttctcagtcaagtctgccggatgtctttctttacctacccctcagttttccttaaaacgcgcacacaactctagagagtgttaagaataatgttacttggttaatgtgttatttattgagtattgtttgtgctaagcattgtgttagatttaaaaaattagtggattgactccactttgttgtgttgttttcattgttgaaaataaatataactttgtattcga

SEQ ID NO: 422668 - DNA, 251 bp, Homo sapiens
cggcacgagggaataaacgaaaaaggaagtagcttaaactgggaagcttaagacacagaaatttatttctcatgaatttggaaagtgggaaatccaagagcaaggtgccagccaaattgattcctggtgagaggcttcttcacggtttagcccagccatcttcctgccatgtcccaatatggtagaaagaagtggatggatgttgttccttttttgaagttgtcattaaagtaggtgcaacaaccaaaaaa

SEQ ID NO: 422669 - DNA, 2433 bp, Homo sapiens
cgcggcggtccgcggggcggggccgggggcgcgtccgggtggtggcggtggctgcggcgacggcggtcgcgtcggcgtcaggtcggggtcggtaaggggtgcggcaatgctgcaactgcgggactcggtggactcggccggtacgagccccacggcggtgctggcggccggcgaggaggtgggggcaggcggcggcccgggcggggggcggccgggggcggggacgccgctgcgccagacactctggcctctcagcatccacgaccccacgcgccgcgcccgcgtcaaggagtacttcgtgttccggcccggcagcatcgagcaggcagtggaggagatccgcgtggtggtgcggcccgtggaggacggcgagatccagggagtgtggctgcttaccgaggtggatcactggaacaatgagaaggagcggctggtgctggtcacggagcagtccctgcttatctgtaaatacgacttcatcagtctccagtgccagcaggtggtgcggatagcgctcaacgcagtagacaccatttcctacggagaattccagtttccccctaaatcgctcaacaagcgagaaggtttgggattcgaattcagtgggacaagcaaagtcgtccttccttcataaacagatggaatccctggtctaccaacgtgccctatgccactttcacagaacacccgatggctggcgcagatgagaagacagcatctctgtgtcagttggaaagcttcaaggctctgttaatccaagctgtcaaaaaagcccaaaaagaaagccctttgccaggacaggcgaatggcgtgctgatcctggagcgccccctgctcatcgagacctacgtgggactcatgtccttcattaacaacgaggcgaaactgggctactccatgaccaggggcaaaataggcttttagccgctgcgttctgggagctcctccccctccccagaaggccaagggatgtgggggctgggggactgggaggcctggcagtcttcatgctgccctgctgctgctggaaggatggggatctttcacctttagggatctcagcacaattagaatcgtaaagtgaattctatctatttaattggatattggactctgctcatataagctacagacaaaagccaaaagactctcgctgtccctgtgctgctggtatttcattctctgtaacttcagttctggtgttttccttgagtatctacttggcttctcgtggtttttcccaccccagctgccccagcacgcgggacccatagcacaccccttagcgcttgcctaggttgctgaaaacagggaggcacctggtatctcgagtgcctgcagttgcaagtatgtttacacctggtgtccaattttgtattttaaaatgtaatccatttttacttcagctcatccaaaagcagccagcagaccggttgactgagaccggtctgtggctgtgggccccttggtgacccgctgctcttttggaaatgggtgacctgaagtgacactttttccacaattaacccaagttgtgttaatacttcaggtctgtttcccagacccagaaagctttacagaaaatcattgtaagacaatttattaatttgagaaagtcaccttgacagttctttgcacacaagttttacacctctctggattcgaagtttgtattgtattcatagttaaagggaatcgggtactttgcttgttgaataatgcactttaaaacaaggaaccgtatcaggccagcatggtggctcatgcctgtaatcccagcattttgggaggctcaggcagacaaatcgctctagctcagaagttgcagagcagcctgggcaacatggtgaaacccgtctctaccaaacagacaaaaagcagccaggcgtggtggcacatctgtggtcccagctacttgagaggctgagccaggaggatcgcttgagcccaggaggcggaggttgcagtgagctgagatggcaccacttattgcactccagcccgggcgacagagcgagactccatctaccagatccttatgacgcagctgatgcctgccttggttcctaccactctggtgtagacagaggactttgtccaagtctcacactaaacatgcccgggcttcgatgtgcctggaggatttccccacagggacccacgcacctccctgtatctgcgcagcttgctcgtgtggctggaagcgctgtcgataagcttcacgcactggcttgccagttcttcagctctaggacttgtagctttaagcaaacggtgtggcatgggttgagtgtggccacctgcaggatgtgcagggctgcctcagaagctggctggggactctagcctctgtgttcataaagacattaagaagtggatggatgttgttccttttttgaagttgtcattaaagtaggtgcaacaaccaaaaaa

SEQ ID NO: 422670 - DNA, 2452 bp, Homo sapiens
cgcggcggtccgcggggcggggccgggggcgcgtccgggtggtggcggtggctgcggcgacggcggtcgcgtcggcgtcaggtcggggtcggtaaggggtgcggcaatgctgcaactgcgggactcggtggactcggccggtacgagccccacggcggtgctggcggccggcgaggaggtgggggcaggcggcggcccgggcggggggcggccgggggcggggacgccgctgcgccagacactctggcctctcagcatccacgaccccacgcgccgcgcccgcgtcaaggagtacttcgtgttccggcccggcagcatcgagcaggcagtggaggagatccgcgtggtggtgcggcccgtggaggacggcgagatccagggagtgtggctgcttaccgaggtggatcactggaacaatgagaaggagcggctggtgctggtcacggagcagtccctgcttatctgtaaatacgacttcatcagtctccagtgccagcaggtggtgcggatagcgctcaacgcagtagacaccatttcctacggagaattccagtttccccctaaatcgctcaacaagcgagaaggtttgggattcgaattcagtgggacaagcaaagtcgtccttccttcataaacagatggaatccctggtctaccaacgtgccctatgccactttcacagaacacccgatggctggcgcagatgagaagacagcatctctgtgtcagttggaaagcttcaaggctctgttaatccaagctgtcaaaaaagcccaaaaagaaagccctttgccaggacaggcgaatggcgtgctgatcctggagcgccccctgctcatcgagacctacgtgggactcatgtccttcattaacaacgaggcgaaactgggctactccatgaccaggggcaaaataggcttttagccgctgcgttctgggagctcctcccccttctgggagctcctccccctccccagaaggccaagggatgtgggggctgggggactgggaggcctggcagtcttcatgctgccctgctgctgctggaaggatggggatctttcacctttagggatctcagcacaattagaatcgtaaagtgaattctatctatttaattggatattggactctgctcatataagctacagacaaaagccaaaagactctcgctgtccctgtgctgctggtatttcattctctgtaacttcagttctggtgttttccttgagtatctacttggcttctcgtggtttttcccaccccagctgccccagcacgcgggacccatagcacaccccttagcgcttgcctaggttgctgaaaacagggaggcacctggtatctcgagtgcctgcagttgcaagtatgtttacacctggtgtccaattttgtattttaaaatgtaatccatttttacttcagctcatccaaaagcagccagcagaccggttgactgagaccggtctgtggctgtgggccccttggtgacccgctgctcttttggaaatgggtgacctgaagtgacactttttccacaattaacccaagttgtgttaatacttcaggtctgtttcccagacccagaaagctttacagaaaatcattgtaagacaatttattaatttgagaaagtcaccttgacagttctttgcacacaagttttacacctctctggattcgaagtttgtattgtattcatagttaaagggaatcgggtactttgcttgttgaataatgcactttaaaacaaggaaccgtatcaggccagcatggtggctcatgcctgtaatcccagcattttgggaggctcaggcagacaaatcgctctagctcagaagttgcagagcagcctgggcaacatggtgaaacccgtctctaccaaacagacaaaaagcagccaggcgtggtggcacatctgtggtcccagctacttgagaggctgagccaggaggatcgcttgagcccaggaggcggaggttgcagtgagctgagatggcaccacttattgcactccagcccgggcgacagagcgagactccatctaccagatccttatgacgcagctgatgcctgccttggttcctaccactctggtgtagacagaggactttgtccaagtctcacactaaacatgcccgggcttcgatgtgcctggaggatttccccacagggacccacgcacctccctgtatctgcgcagcttgctcgtgtggctggaagcgctgtcgataagcttcacgcactggcttgccagttcttcagctctaggacttgtagctttaagcaaacggtgtggcatgggttgagtgtggccacctgcaggatgtgcagggctgcctcagaagctggctggggactctagcctctgtgttcataaagacattaagaagtggatggatgttgttccttttttgaagttgtcattaaagtaggtgcaacaaccaaaaaa

SEQ ID NO: 422671 - DNA, 2313 bp, Homo sapiens
cgcggcggtccgcggggcggggccgggggcgcgtccgggtggtggcggtggctgcggcgacggcggtcgcgtcggcgtcaggtcggggtcggtaaggggtgcggcaatgctgcaactgcgggactcggtggactcggccggtacgagccccacggcggtgctggcggccggcgaggaggtgggggcaggcggcggcccgggcggggggcggccgggggcggggacgccgctgcgccagacactctggcctctcagcatccacgaccccacgcgccgcgcccgcgtcaaggagtacttcgtgttccggcccggcagcatcgagcaggcagtggaggagatccgcgtggtggtgcggcccgtggaggacggcgagatccaggtggtgcggatagcgctcaacgcagtagacaccatttcctacggagaattccagtttccccctaaatcgctcaacaagcgagaaggtttgggattcgaattcagtgggacaagcaaagtcgtccttccttcataaacagatggaatccctggtctaccaacgtgccctatgccactttcacagaacacccgatggctggcgcagatgagaagacagcatctctgtgtcagttggaaagcttcaaggctctgttaatccaagctgtcaaaaaagcccaaaaagaaagccctttgccaggacaggcgaatggcgtgctgatcctggagcgccccctgctcatcgagacctacgtgggactcatgtccttcattaacaacgaggcgaaactgggctactccatgaccaggggcaaaataggcttttagccgctgcgttctgggagctcctccccctccccagaaggccaagggatgtgggggctgggggactgggaggcctggcagtcttcatgctgccctgctgctgctggaaggatggggatctttcacctttagggatctcagcacaattagaatcgtaaagtgaattctatctatttaattggatattggactctgctcatataagctacagacaaaagccaaaagactctcgctgtccctgtgctgctggtatttcattctctgtaacttcagttctggtgttttccttgagtatctacttggcttctcgtggtttttcccaccccagctgccccagcacgcgggacccatagcacaccccttagcgcttgcctaggttgctgaaaacagggaggcacctggtatctcgagtgcctgcagttgcaagtatgtttacacctggtgtccaattttgtattttaaaatgtaatccatttttacttcagctcatccaaaagcagccagcagaccggttgactgagaccggtctgtggctgtgggccccttggtgacccgctgctcttttggaaatgggtgacctgaagtgacactttttccacaattaacccaagttgtgttaatacttcaggtctgtttcccagacccagaaagctttacagaaaatcattgtaagacaatttattaatttgagaaagtcaccttgacagttctttgcacacaagttttacacctctctggattcgaagtttgtattgtattcatagttaaagggaatcgggtactttgcttgttgaataatgcactttaaaacaaggaaccgtatcaggccagcatggtggctcatgcctgtaatcccagcattttgggaggctcaggcagacaaatcgctctagctcagaagttgcagagcagcctgggcaacatggtgaaacccgtctctaccaaacagacaaaaagcagccaggcgtggtggcacatctgtggtcccagctacttgagaggctgagccaggaggatcgcttgagcccaggaggcggaggttgcagtgagctgagatggcaccacttattgcactccagcccgggcgacagagcgagactccatctaccagatccttatgacgcagctgatgcctgccttggttcctaccactctggtgtagacagaggactttgtccaagtctcacactaaacatgcccgggcttcgatgtgcctggaggatttccccacagggacccacgcacctccctgtatctgcgcagcttgctcgtgtggctggaagcgctgtcgataagcttcacgcactggcttgccagttcttcagctctaggacttgtagctttaagcaaacggtgtggcatgggttgagtgtggccacctgcaggatgtgcagggctgcctcagaagctggctggggactctagcctctgtgttcataaagacattaagaagtggatggatgttgttccttttttgaagttgtcattaaagtaggtgcaacaaccaaaaaa

SEQ ID NO: 422672 - DNA, 2275 bp, Homo sapiens
cgcggcggtccgcggggcggggccgggggcgcgtccgggtggtggcggtggctgcggcgacggcggtcgcgtcggcgtcaggtcggggtcggtaaggggtgcggcaatgctgcaactgcgggactcggtggactcggccggtacgagccccacggcggtgctggcggccggcgaggaggtgggggcaggcggcggcccgggcggggggcggccgggggcggggacgccgctgcgccagacactctggcctctcagcatccacgaccccacgcgccgcgcccgcgtcaaggagtacttcgtgttccggcccggcagcatcgagcaggcagtggaggagatccgcgtggtggtgcggcccgtggaggacggcgagatccagggagtgtggctgcttaccgagcgagaaggtttgggattcgaattcagtgggacaagcaaagtcgtccttccttcataaacagatggaatccctggtctaccaacgtgccctatgccactttcacagaacacccgatggctggcgcagatgagaagacagcatctctgtgtcagttggaaagcttcaaggctctgttaatccaagctgtcaaaaaagcccaaaaagaaagccctttgccaggacaggcgaatggcgtgctgatcctggagcgccccctgctcatcgagacctacgtgggactcatgtccttcattaacaacgaggcgaaactgggctactccatgaccaggggcaaaataggcttttagccgctgcgttctgggagctcctcccccttctgggagctcctccccctccccagaaggccaagggatgtgggggctgggggactgggaggcctggcagtcttcatgctgccctgctgctgctggaaggatggggatctttcacctttagggatctcagcacaattagaatcgtaaagtgaattctatctatttaattggatattggactctgctcatataagctacagacaaaagccaaaagactctcgctgtccctgtgctgctggtatttcattctctgtaacttcagttctggtgttttccttgagtatctacttggcttctcgtggtttttcccaccccagctgccccagcacgcgggacccatagcacaccccttagcgcttgcctaggttgctgaaaacagggaggcacctggtatctcgagtgcctgcagttgcaagtatgtttacacctggtgtccaattttgtattttaaaatgtaatccatttttacttcagctcatccaaaagcagccagcagaccggttgactgagaccggtctgtggctgtgggccccttggtgacccgctgctcttttggaaatgggtgacctgaagtgacactttttccacaattaacccaagttgtgttaatacttcaggtctgtttcccagacccagaaagctttacagaaaatcattgtaagacaatttattaatttgagaaagtcaccttgacagttctttgcacacaagttttacacctctctggattcgaagtttgtattgtattcatagttaaagggaatcgggtactttgcttgttgaataatgcactttaaaacaaggaaccgtatcaggccagcatggtggctcatgcctgtaatcccagcattttgggaggctcaggcagacaaatcgctctagctcagaagttgcagagcagcctgggcaacatggtgaaacccgtctctaccaaacagacaaaaagcagccaggcgtggtggcacatctgtggtcccagctacttgagaggctgagccaggaggatcgcttgagcccaggaggcggaggttgcagtgagctgagatggcaccacttattgcactccagcccgggcgacagagcgagactccatctaccagatccttatgacgcagctgatgcctgccttggttcctaccactctggtgtagacagaggactttgtccaagtctcacactaaacatgcccgggcttcgatgtgcctggaggatttccccacagggacccacgcacctccctgtatctgcgcagcttgctcgtgtggctggaagcgctgtcgataagcttcacgcactggcttgccagttcttcagctctaggacttgtagctttaagcaaacggtgtggcatgggttgagtgtggccacctgcaggatgtgcagggctgcctcagaagctggctggggactctagcctctgtgttcataaagacattaagaagtggatggatgttgttccttttttgaagttgtcattaaagtaggtgcaacaaccaaaaaa

SEQ ID NO: 422673 - DNA, 1417 bp, Homo sapiens
tataccccctccgtctctgtaatccgcctttaggatatcgtacagaacctgttagaatcgtaaagtgaattctatctatttaattggatattggactctgctcatataagctacagacaaaagccaaaagactctcgctgtccctgtgctgctggtatttcattctctgtaacttcagttctggtgttttccttgagtatctacttggcttctcgtggtttttcccaccccagctgccccagcacgcgggacccatagcacaccccttagcgcttgcctaggttgctgaaaacagggaggcacctggtatctcgagtgcctgcagttgcaagtatgtttacacctggtgtccaattttgtattttaaaatgtaatccatttttacttcagctcatccaaaagcagccagcagaccggttgactgagaccggtctgtggctgtgggccccttggtgacccgctgctcttttggaaatgggtgacctgaagtgacactttttccacaattaacccaagttgtgttaatacttcaggtctgtttcccagacccagaaagctttacagaaaatcattgtaagacaatttattaatttgagaaagtcaccttgacagttctttgcacacaagttttacacctctctggattcgaagtttgtattgtattcatagttaaagggaatcgggtactttgcttgttgaataatgcactttaaaacaaggaaccgtatcaggccagcatggtggctcatgcctgtaatcccagcattttgggaggctcaggcagacaaatcgctctagctcagaagttgcagagcagcctgggcaacatggtgaaacccgtctctaccaaacagacaaaaagcagccaggcgtggtggcacatctgtggtcccagctacttgagaggctgagccaggaggatcgcttgagcccaggaggcggaggttgcagtgagctgagatggcaccacttattgcactccagcccgggcgacagagcgagactccatctaccagatccttatgacgcagctgatgcctgccttggttcctaccactctggtgtagacagaggactttgtccaagtctcacactaaacatgcccgggcttcgatgtgcctggaggatttccccacagggacccacgcacctccctgtatctgcgcagcttgctcgtgtggctggaagcgctgtcgataagcttcacgcactggcttgccagttcttcagctctaggacttgtagctttaagcaaacggtgtggcatgggttgagtgtggccacctgcaggatgtgcagggctgcctcagaagctggctggggactctagcctctgtgttcataaagacattaagaagtggatggatgttgttccttttttgaagttgtcattaaagtaggtgcaacaaccaaaaaa

SEQ ID NO: 422674 - DNA, 2147 bp, Homo sapiens
cgcggcggtccgcggggcggggccgggggcgcgtccgggtggtggcggtggctgcggcgacggcggtcgcgtcggcgtcaggtcggggtcggtaaggggtgcggcaatgctgcaactgcgggactcggtggactcggccggtacgagccccacggcggtgctggcggccggcgaggaggtgggggcaggcggcggcccgggcggggggcggccgggggcggggacgccgctgcgccagacactctggcctctcagcatccacgaccccacgcgccgcgcccgcgtcaaggagtacttcgtgttccggcccggcagcatcgagcaggcagtggaggagatccgcgtggtggtgcggcccgtggaggacggcgagatccagggagtgtggctgcttaccgaggtggatcactggaacaatgagaaggagcggctggtgctggtcacggagcagtccctgcttatctgtaaatacgacttcatcagtctccagtgccagcaggtggtgcggatagcgctcaacgcagtagacaccatttcctacggagaattccagtttccccctaaatcgctcaacaagcgagaaggtttgggattcgaattcagtgggacaagcaaagtcgtccttccttcataaacagatggaatccctggtctaccaacgtgccctatgccactttcacagaacacccgatggctggcgcagatgagaagacagcatctctgtgtcagttggaaagcttcaaggctctgttaatccaagctgtcaaaaaagcccaaaaagaaagccctttgccaggacaggcgaatggcgtgctgatcctggagcgccccctgctcatcgagacctacgtgggactcatgtccttcattaacaacgaggcgaaactgggctactccatgaccaggggcaaaataggcttttagccgctgcgttctgggagctcctccccctccccagaaggccaagggatgtgggggctgggggactgggaggcctggcagtcttcatgctgccctgctgctgctggaaggatggggatctttcacctttagggatctcagcacaattagaatcgtaaagtgaattctatctatttaattggatattggactctgctcatataagctacagacaaaagccaaaagactctcgctgtccctgtgctgctggtatttcattctctgtaacttcagttctggtgttttccttgagtatctacttggcttctcgtggtttttcccaccccagctgccccagcacgcgggacccatagcacaccccttagcgcttgcctaggttgctgaaaacagggaggcacctggtatctcgagtgcctgcagttgcaagtatgtttacacctggtgtccaattttgtattttaaaatgtaatccatttttacttcagctcatccaaaagcagccagcagaccggttgactgagaccggtctgtggctgtgggccccttggtgacccgctgctcttttggaaatgggtgacctgaagtgacactttttccacaattaacccaagttgtgttaatacttcaggtctgtttcccagacccagaaagctttacagaaaatcattgtaagacaatttattaatttgagaaagtcaccttgacagttctttgcacacaagttttacacctctctggattcgaagtttgtattgtattcatagttaaagggaatcgggtactttgcttgttgaataatgcactttaaaacaaggaaccgtatcaggccagcatggtggctcatgcctgtaatcccagcattttgggaggctcaggcagacaaatcgctctagctcagaagttgcagagcagcctgggcaacatggtgaaacccgtctctaccaaacagacaaaaagcagccaggcgtggtggcacatctgtggtcccagctacttgagaggctgagccaggaggatcgcttgagcccaggaggcggaggttgcagtgagctgagatggcaccacttattgcactccagcccgggcgacagagcgagactccatctaccagatcctcagaagctggctggggactctagcctctgtgttcataaagacattaagaagtggatggatgttgttccttttttgaagttgtcattaaagtaggtgcaacaaccaaaaaa

SEQ ID NO: 422675 - DNA, 2164 bp, Homo sapiens
cgcggcggtccgcggggcggggccgggggcgcgtccgggtggtggcggtggctgcggcgacggcggtcgcgtcggcgtcaggtcggggtcggtaaggggtgcggcaatgctgcaactgcgggactcggtggactcggccggtacgagccccacggcggtgctggcggccggcgaggaggtgggggcaggcggcggcccgggcggggggcggccgggggcggggacgccgctgcgccagacactctggcctctcagcatccacgaccccacgcgccgcgcccgcgtcaaggagtacttcgtgttccgggcgagaaggtttgggattcgaattcagtgggacaagcaaagtcgtccttccttcataaacagatggaatccctggtctaccaacgtgccctatgccactttcacagaacacccgatggctggcgcagatgagaagacagcatctctgtgtcagttggaaagcttcaaggctctgttaatccaagctgtcaaaaaagcccaaaaagaaagccctttgccaggacaggcgaatggcgtgctgatcctggagcgccccctgctcatcgagacctacgtgggactcatgtccttcattaacaacgaggcgaaactgggctactccatgaccaggggcaaaataggcttttagccgctgcgttctgggagctcctccccctccccagaaggccaagggatgtgggggctgggggactgggaggcctggcagtcttcatgctgccctgctgctgctggaaggatggggatctttcacctttagggatctcagcacaattagaatcgtaaagtgaattctatctatttaattggatattggactctgctcatataagctacagacaaaagccaaaagactctcgctgtccctgtgctgctggtatttcattctctgtaacttcagttctggtgttttccttgagtatctacttggcttctcgtggtttttcccaccccagctgccccagcacgcgggacccatagcacaccccttagcgcttgcctaggttgctgaaaacagggaggcacctggtatctcgagtgcctgcagttgcaagtatgtttacacctggtgtccaattttgtattttaaaatgtaatccatttttacttcagctcatccaaaagcagccagcagaccggttgactgagaccggtctgtggctgtgggccccttggtgacccgctgctcttttggaaatgggtgacctgaagtgacactttttccacaattaacccaagttgtgttaatacttcaggtctgtttcccagacccagaaagctttacagaaaatcattgtaagacaatttattaatttgagaaagtcaccttgacagttctttgcacacaagttttacacctctctggattcgaagtttgtattgtattcatagttaaagggaatcgggtactttgcttgttgaataatgcactttaaaacaaggaaccgtatcaggccagcatggtggctcatgcctgtaatcccagcattttgggaggctcaggcagacaaatcgctctagctcagaagttgcagagcagcctgggcaacatggtgaaacccgtctctaccaaacagacaaaaagcagccaggcgtggtggcacatctgtggtcccagctacttgagaggctgagccaggaggatcgcttgagcccaggaggcggaggttgcagtgagctgagatggcaccacttattgcactccagcccgggcgacagagcgagactccatctaccagatccttatgacgcagctgatgcctgccttggttcctaccactctggtgtagacagaggactttgtccaagtctcacactaaacatgcccgggcttcgatgtgcctggaggatttccccacagggacccacgcacctccctgtatctgcgcagcttgctcgtgtggctggaagcgctgtcgataagcttcacgcactggcttgccagttcttcagctctaggacttgtagctttaagcaaacggtgtggcatgggttgagtgtggccacctgcaggatgtgcagggctgcctcagaagctggctggggactctagcctctgtgttcataaagacattaagaagtggatggatgttgttccttttttgaagttgtcattaaagtaggtgcaacaaccaaaaaa

SEQ ID NO: 422676 - DNA, 2698 bp, Homo sapiens
  misc_feature (2465)..(2465): n is a, c, g, or t
cgcggcggtccgcggggcggggccgggggcgcgtccgggtggtggcggtggctgcggcgacggcggtcgcgtcggcgtcaggtcggggtcggtaaggggtgcggcaatgctgcaactgcgggactcggtggactcggccggtacgagccccacggcggtgctggcggccggcgaggaggtgggggcaggcggcggcccgggcggggggcggccgggggcggggacgccgctgcgccagacactctggcctctcagcatccacgaccccacgcgccgcgcccgcgtcaaggagtacttcgtgttccggcccggcagcatcgagcaggcagtggaggagatccgcgtggtggtgcggcccgtggaggacggcgagatccagggagtgtggctgcttaccgaggtggatcactggaacaatgagaaggagcggctggtgctggtcacggagcagtccctgcttatctgtaaatacgacttcatcagtctccagtgccagcaggtggtgcggatagcgctcaacgcagtagacaccatttcctacggagaattccagtttccccctaaatcgctcaacaagcgagaaggtttgggattcgaattcagtgggacaagcaaagtcgtccttccttcataaacagatggaatccctggtctaccaacgtgccctatgccactttcacagaacacccgatggctggcgcagatgagaagacagcatctctgtgtcagttggaaagcttcaaggctctgttaatccaagctgtcaaaaaagcccaaaaagaaagccctttgccaggacaggcgaatggcgtgctgatcctggagcgccccctgctcatcgagacctacgtgggactcatgtccttcattaacaacgaggcgaaactgggctactccatgaccaggggcaaaataggcttttagccgctgcgttctgggagctcctccccctccccagaaggccaagggatgtgggggctgggggactgggaggcctggcagtcttcatgctgccctgctgctgctggaaggatggggatctttcacctttagggatctcagcacaattagaatcgtaaagtgaattctatctatttaattggatattggactctgctcatataagctacagacaaaagccaaaagactctcgctgtccctgtgctgctggtatttcattctctgtaacttcagttctggtgttttccttgagtatctacttggcttctcgtggtttttcccaccccagctgccccagcacgcgggacccatagcacaccccttagcgcttgcctaggttgctgaaaacagggaggcacctggtatctcgagtgcctgcagttgcaagtatgtttacacctggtgtccaattttgtattttaaaatgtaatccatttttacttcagctcatccaaaagcagccagcagaccggttgactgagaccggtctgtggctgtgggccccttggtgacccgctgctcttttggaaatgggtgacctgaagtgacactttttccacaattaacccaagttgtgttaatacttcaggtctgtttcccagacccagaaagctttacagaaaatcattgtaagacaatttattaatttgagaaagtcaccttgacagttctttgcacacaagttttacacctctctggattcgaagtttgtattgtattcatagttaaagggaatcgggtactttgcttgttgaataatgcactttaaaacaaggaaccgtatcaggccagcatggtggctcatgcctgtaatcccagcattttgggaggctcaggcagacaaatcgctctagctcagaagttgcagagcagcctgggcaacatggtgaaacccgtctctaccaaacagacaaaaagcagccaggcgtggtggcacatctgtggtcccagctacttgagaggctgagccaggaggatcgcttgagcccaggaggcggaggttgcagtgagctgagatggcaccacttattgcactccagcccgggcgacagagcgagactccatctaccagatccttatgacgcagctgatgcctgccttggttcctaccactctggtgtagacagaggactttgtccaagtctcacactaaacatgcccgggcttcgatgtgcctggaggatttccccacagggacccacgcacctccctgtatctgcgcagcttgctcgtgtggctggaagcgctgtcgataagcttcacgcactggcttgccagttcttcagctctaggacttgtagctttaagcaaacggtgtggcatgggttgagtgtggccacctgcaggatgtgcagggctgcctcagaagctggctggggactctagcctctgtgttcataaagacattaagaagtggatggatgttgttccttttttgaagttgtcattaaagtaggtgcaacaaccaaaaaaaaataatattatttatttatatattaaaattntatttttatatttatattcttctctttccctcttacctacttttctccatatccttcctcctctttttatacaaaaaaaaaaacaactggggggggggcccggtcccaatattgccctttggggggcgttttcaaataaaaggggcggcgtttaacacgtcggtcttgggaaacacctgcgttccccacttaacgcgttggagaaatccccttttgcacgttgtgtatatagg

SEQ ID NO: 422677 - DNA, 353 bp, Homo sapiens
gaatgcttggcagaaagcacgcacctgaccttagcaggtgcacaatgagcatttgaatgagagttggatggagtggatggatgtaagcaaaatactcaaattcattggcacctttgtgttagttttaaaaaatgttcacggaaaaattgagggatctcttacttttcattttcttcttattagctaaccacagaattaatgacatgcattctcattgggtatgctcacgactgtaatcccagcactttgggaggccgaggcaggtgtatcacttgagcccaggtgttcaaggaagaccagcctgggcaacagagaccctgtctctacaaaaaatacaaaaattagccaagcat

SEQ ID NO: 422678 - DNA, 419 bp, Homo sapiens
agaaaaatgagagagaatttttggttaccccagttgaaaaagtagtagctttaataggaaggtatatgatgcggtgaaggaagggtagtacctacgataatgcagtatgccctgaattaccccacaagattttcccttatttatataaagtgaagattacttaactcagtttaggatactattaaatttgctttgaaatatttgcattaaaattttcaatagtttttcatgagcaggtcaataagatatttataaattatagtttgcagaatttaatttgtatgaatcaaatgcccagagcttaagattgattattccctcttcagtgttgcctagagcagtgggtaatagcattaacaataaaagcaaagaagtctgattagatacgatggtttttaaagaaatcaatttaaaaaaaa

SEQ ID NO: 422679 - DNA, 3658 bp, Homo sapiens
ttactttgtttccttttttatttacttttttggctatgtaaaactaaaagttcaaagacagagaaatcttgtctccaccccccactctttataggcaactaaaaatgttaagtttccaggatatccttccaattcctccccgaaaataagcatatacacataaatattcatattaaatataaatatatatttttatgtatttaagtaaatacataaaagcatatatgcttatttttgcttttgaatacagtgaatacttactacacttaaatatttaagtgaatacttaatacaacctgagactcattccaaagcaacacacgattatttcctgaatctttttaatggttgcattgtgttctactgtatggatgcaccattcccaatcagttccctattaacggatatttgggttatccctaacttttgctatgacaaatagcactgcaataaccttgtatacctattgtttccatgtgtggagctgcaccttcagaataaggttagggttagaagtataactgcaaggtataagaataaacacaagtaattttgtactccgtggaacttgaaccatttttccactcccaccaggaaaggtaatttcaacgtgtatttccattgtaagtgaggtggagcgactttctatgtttaaagaccattacggtattttttctgagaatcatctgttcatgtccttccccattttctcctttggcttttgcactttttgttttcaatttttgagagctcttgtgatacgagttgcaaagattttctccagaccgatctgattcactggaaatatactacgaccatctggaatgtactttaatcttatcctaataaatcaccttactacaagacactcctttggggatgaacaggtttgataaagccggctaaggacagaccaatcaaaagaattacgtgctcttctagtaagtgtttagagactgtttcacgttctccaggtaacaccgccattactcggcggtccagatggcagtcttacttcagggagtctactccacttgcaggacctctttgattgagttcactaaacctcacagggccgccttccccgtgttccagttagcaaggggccctcaacgccgcggacacagcgcaacctccgacgccagagaacaatagctcctcgatgcgtctccagagatgtcaaggaggaacgaacccagcggccaggagactgcgcctcacgactgatgagagggaaggcatcggtttctaagttctcaaaacttacaggtgagcttctgctaagagtaaacgcccgcggctcgccgcccacggcctctctcttgaggtggcacctggtcctccgacacgcggaagcatcacggatgagcgtcacgaacacagagcggccaatcacgcgccgccttcgcccagatccctccgcacgaggcagccccgcagccgcaggtggccccggcgagtacttccaccttcccttcccgtgatgccctggggctgacctccgacctcgctggcccgcccctcccctcggccgcttcccttactgagcttgctgagctccggggcccgcggagctcgcgccaggctcctgggaaaggacggggagtgttaccggggagcagctgctccattgtgcctcgaggccccgatcgggctaggccgacggcctccctcccttcacctttcctctcctggcggggttcggcggcgggcgagtgactgcggccacgcctgaaaggcgactctcctgattcaagatgaccaacgaagaacctcttcccaagaaggttcgattgagtgaaacagacttcaaagttatggcaagagatgagttaattctaagatggaaacaatatgaagcatatgtacaagctttggagggcaagtacacagatcttaactctaatgatgtaactggcctaagagagtctgaagaaaaactaaagcaacaacagcaggagtctgcacgcagggaaaacatccttgtaatgcgactagcaaccaaggaacaagagatgcaagagtgtactactcaaatccagtacctcaagcaagtccagcagccgagcgttgcccaactgagatcaacaatggtagacccagcgatcaacttgtttttcctaaaaatgaaaggtgaactggaacagactaaagacaaactggaacaagcccaaaatgaactgagtgcctggaagtttacgcctgatagccaaacagggaaaaagttaatggcgaagtgtcgaatgcttatccaggagaatcaagagcttggaaggcagctgtcccagggacgtattgcacaacttgaagcagagttggctttacagaagaaatacagtgaggagcttaaaagcagtcaggatgaactgaatgacttcatcatccagcttgatgaagaagtagagggtatgcagagtaccattctagttctgcagcagcagctgaaggagacacgccagcagttggctcagtaccagcagcagcagtctcaggcctctgccccaagtaccagcaggactacagcttctgaacctgtagaacagtcagaggccacaagtaaagactgcagtcgtctgacaaacggaccaagtaatggtagctcctcccgccagaggacgtctgggtctggatttcacagggagggcaacacaaccgaagatgactttccttcttctccagggaatggtaataagtcctccaacagctcagaggagagaactggcagaggaggtagtggttacgtaaatcaactcagtgcggggtatgaaagtgtagactctcccacgggcagtgaaaactctctcacacaccaatcaaatgacacagactccagtcatgaccctcaagaggagaaagcagtgagtgggaaaggtaatcgaactgtgggttcccgccacgttcagaatggcttggactcaagtgtaaatgtacagggttcagttttgtaatattttttcagcaaatttttatacagtgtcatttaatttgggagaggatactgtccagaaaattaatgcatacttttgtcacaatttgcctttttgtgggtgtacgttttggtttttttttgttgttttttttctttgttttttcttttcttttctttttttttttttgcttcaatacttctgccgctttggaaattgtaacagttaattactttgaatgttgctaaaaggacattttgtgtagggtcaagttatttttatatgagttaatgtgaaattgtaaatggaaatttttccttaaaatacaacacaatgatgtctgtataaatctgtctgtttagaatctgtgctgtgtaagggcattcgtactcatgctgttactgtacttatgcaccattcagacttgttagagtagatgtgggtttatgactgccaagtttgcccagtacagtagttttttatcactaaaagttggactcattgatggagtcctgtagtagtttcagtgttagatacagttttttccaccatacatctgtgcattttctctttaggtgactgtttaagaaatttgtgtgcatagttactcagtttttatgaactgttgtatcctgttaatgcatattgctctgtgactccagtatatcttacctgtactgaccaaacctaaataaagatttttattgtaactccttaaaaaagcttttttg

SEQ ID NO: 422680 - DNA, 1798 bp, Homo sapiens
ttactttgtttccttttttatttacttttttggctatgtaaaactaaaagttcaaagacagagaaatcttgtctccaccccccactctttataggcaactaaaaatgttaagtttccaggatatccttccaattcctccccgaaaataagcatatacacataaatattcatattaaatataaatatatatttttatgtatttaagtaaatacataaaagcatatatgcttatttttgcttttgaatacagtgaatacttactacacttaaatatttaagtgaatacttaatacaacctgagactcattccaaagcaacacacgattatttcctgaatctttttaatggttgcattgtgttctactgtatggatgcaccattcccaatcagttccctattaacggatatttgggttatccctaacttttgctatgacaaatagcactgcaataaccttgtatacctattgtttccatgtgtggagctgcaccttcagaataaggttagggttagaagtataactgcaaggtataagaataaacacaagtaattttgtactccgtggaacttgaaccatttttccactcccaccaggaaaggtaatttcaacgtgtatttccattgtaagtgaggtggagcgactttctatgtttaaagaccattacggtattttttctgagaatcatctgttcatgtccttccccattttctcctttggcttttgcactttttgttttcaatttttgagagctcttgtgatacgagttgcaaagattttctccagaccgatctgattcactggaaatatactacgaccatctggaatgtactttaatcttatcctaataaatcaccttactacaagacactcctttggggatgaacaggtttgataaagccggctaaggacagaccaatcaaaagaattacgtgctcttctagtaagtgtttagagactgtttcacgttctccaggtaacaccgccattactcggcggtccagatggcagtcttacttcagggagtctactccacttgcaggacctctttgattgagttcactaaacctcacagggccgccttccccgtgttccagttagcaaggggccctcaacgccgcggacacagcgcaacctccgacgccagagaacaatagctcctcgatgcgtctccagagatgtcaaggaggaacgaacccagcggccaggagactgcgcctcacgactgatgagagggaaggcatcggtttctaagttctcaaaacttacaggtgagcttctgctaagagtaaacgcccgcggctcgccgcccacggcctctctcttgaggtggcacctggtcctccgacacgcggaagcatcacggatgagcgtcacgaacacagagcggccaatcacgcgccgccttcgcccagatccctccgcacgaggcagccccgcagccgcaggtggccccggcgagtacttccaccttcccttcccgtgatgccctggggctgacctccgacctcgctggcccgcccctcccctcggccgcttcccttactgagcttgctgagctccggggcccgcggagctcgcgccaggctcctgggaaaggacggggagtgttaccggggagcagctgctccattgtgcctcgaggccccgatcgggctaggccgacggcctccctcccttcacctttcctctcctggcggggttcggcggcgggcgagtgactgcggccacgcctgaaaggcgactctcctgtgagtgggccagaaggcgaacatggcggagcggggaggctggcgggag

SEQ ID NO: 422681 - DNA, 2328 bp, Homo sapiens
  misc_feature (1823)..(1823): n is a, c, g, or t
  misc_feature (1866)..(1866): n is a, c, g, or t
  misc_feature (1898)..(1898): n is a, c, g, or t
  misc_feature (1915)..(1915): n is a, c, g, or t
  misc_feature (1917)..(1917): n is a, c, g, or t
  misc_feature (1938)..(1938): n is a, c, g, or t
  misc_feature (2016)..(2016): n is a, c, g, or t
  misc_feature (2057)..(2057): n is a, c, g, or t
  misc_feature (2075)..(2075): n is a, c, g, or t
  misc_feature (2091)..(2091): n is a, c, g, or t
  misc_feature (2097)..(2097): n is a, c, g, or t
  misc_feature (2099)..(2099): n is a, c, g, or t
  misc_feature (2101)..(2101): n is a, c, g, or t
  misc_feature (2124)..(2124): n is a, c, g, or t
  misc_feature (2126)..(2126): n is a, c, g, or t
  misc_feature (2160)..(2160): n is a, c, g, or t
  misc_feature (2164)..(2164): n is a, c, g, or t
  misc_feature (2174)..(2174): n is a, c, g, or t
  misc_feature (2187)..(2187): n is a, c, g, or t
  misc_feature (2194)..(2194): n is a, c, g, or t
  misc_feature (2214)..(2214): n is a, c, g, or t
  misc_feature (2216)..(2216): n is a, c, g, or t
  misc_feature (2220)..(2220): n is a, c, g, or t
  misc_feature (2237)..(2237): n is a, c, g, or t
  misc_feature (2240)..(2240): n is a, c, g, or t
  misc_feature (2266)..(2266): n is a, c, g, or t
  misc_feature (2315)..(2315): n is a, c, g, or t
ttactttgtttccttttttatttacttttttggctatgtaaaactaaaagttcaaagacagagaaatcttgtctccaccccccactctttataggcaactaaaaatgttaagtttccaggatatccttccaattcctccccgaaaataagcatatacacataaatattcatattaaatataaatatatatttttatgtatttaagtaaatacataaaagcatatatgcttatttttgcttttgaatacagtgaatacttactacacttaaatatttaagtgaatacttaatacaacctgagactcattccaaagcaacacacgattatttcctgaatctttttaatggttgcattgtgttctactgtatggatgcaccattcccaatcagttccctattaacggatatttgggttatccctaacttttgctatgacaaatagcactgcaataaccttgtatacctattgtttccatgtgtggagctgcaccttcagaataaggttagggttagaagtataactgcaaggtataagaataaacacaagtaattttgtactccgtggaacttgaaccatttttccactcccaccaggaaaggtaatttcaacgtgtatttccattgtaagtgaggtggagcgactttctatgtttaaagaccattacggtattttttctgagaatcatctgttcatgtccttccccattttctcctttggcttttgcactttttgttttcaatttttgagagctcttgtgatacgagttgcaaagattttctccagaccgatctgattcactggaaatatactacgaccatctggaatgtactttaatcttatcctaataaatcaccttactacaagacactcctttggggatgaacaggtttgataaagccggctaaggacagaccaatcaaaagaattacgtgctcttctagtaagtgtttagagactgtttcacgttctccaggtaacaccgccattactcggcggtccagatggcagtcttacttcagggagtctactccacttgcaggacctctttgattgagttcactaaacctcacagggccgccttccccgtgttccagttagcaaggggccctcaacgccgcggacacagcgcaacctccgacgccagagaacaatagctcctcgatgcgtctccagagatgtcaaggaggaacgaacccagcggccaggagactgcgcctcacgactgatgagagggaaggcatcggtttctaagttctcaaaacttacaggtgagcttctgctaagagtaaacgcccgcggctcgccgcccacggcctctctcttgaggtggcacctggtcctccgacacgcggaagcatcacggatgagcgtcacgaacacagagcggccaatcacgcgccgccttcgcccagatccctccgcacgaggcagccccgcagccgcaggtggccccggcgagtacttccaccttcccttcccgtgatgccctggggctgacctccgacctcgctggcccgcccctcccctcggccgcttcccttactgagcttgctgagctccggggcccgcggagctcgcgccaggctcctgggaaaggacggggagtgttaccggggagcagctgctccattgtgcctcgaggccccgatcgggctaggccgacggcctccctcccttcacctttcctctcctggcggggttcggcggcgggcgagtgactgcggccacgcctgaaaggcgactctcctgattcaagatgaccaacgaagaacctcttcccaagaaggtttcggatttggaagtgaaacaagactttcaaaanttattggcaaagaagattggaagttaatttcttaaagaatggnaaacaattattgaaggcattattggtacaaangctttttgggagggggnanaggtacgacaggattctttanacttcttaattggattggtatacttgggctcttataggaggaggtcttggaaggaagaacacttaataggcatacganacgaggcgaggggaggtcttggctacggcgagggggaaaanactattccttttgtttanattgctggactttagntatacncnanagggaacgaaaggaggattggcnanaggaggtggtgactttacttctatagatctctangttnactcttctanaggcgagaggtcnctaggcnaggccgggaggcgggtttgncnctanacattggaggattctanacnagatggggttaggaccccgaggcggnattctacacttttggttttttttctctttaaaaaaattggaaaagggtnggacacttgggga

SEQ ID NO: 422682 - DNA, 1588 bp, Homo sapiens
cttctccaagagcagtaactgctattactttttcttgggtatcatcaagataatttctatgcatatacagttattttatgtatattgttttaaacaaatgtgatcataccataaacacagatgagttgcaccttgtttttttttacttggtctctttggcatttttccattttttaatgtatctagacaactacatttttaatgcttacatagtatatttccgttatattaaggaatcataatttatttgaatcacttataaatggatttttttctataaaattggctgtaagccagagtatatcaggtactataaatacatcactaatttgaaacaaataatggctcaggcaatcccgtctggaatatttccagtggtggaatgggttttgctttgggttgcgtgcacgcgcacgcacgtgtgtgtcttcgctttactgtttttctgttctaattttgaggaagaaagattcccagaaataacctgtccagttcagttaaaatatttcattcatgtgagaatgcacacattttagagtgtttagaggtatatctttcaaagtgctttctattatgtttgtgggttaatcgattttaggaatgggttgatttttttgtttgtaattttaaaaaattatttcaaaaacaactacttgtaattaaattattttttcaaaactgtgattttgttaaaatttattttactaatcactagttttaaacgtgatatgactatcttagcttagacatttatttattaaaaggtatgactttttaaacgaaaccttttttgcattagaatttgtgacatttttatatggggttaagtcaggtcacagattaatgtatcttacagttgtctttttctactctttaaaattcatatagtaagaaggttagttgtaaacaccaatgaaatatatatactttgcaagaagacagttttgagagcataggcagtaaagtggaaggaattccattgtttttgacaatcttgcatatctctcattttcccattgtttaatttctaagtggatgttcagtggaggctaacgcctgagagtgctgatgggaaatggtggaaatctggagctacagtagcagtgaacaagaacaccagctaataaagttatcatatcaaagaataaagcctttaccacatgctcactggtggctttcaccctcgggctcctctgagcagtagtaacccaggttgaactcttcaggtattttctggaagaaagcttaattacaaacttttccttgaattacattaggttagaaaacatgcagccaggcacggtggctcatgcctgtaatcccaacactttggaaggctgaggtaggcagatcacttgagcttaggagtttgagaccagcctgggcaacaaggcgaaaccccatctctactaaaaatccaaaattagctgggggtgctcgtgcacacctatagtccccaggtactccggaggctgaggtgggaggatcacctgagcctggggacgtcaaggctccagtgagctgagatcacgccactgcactccagcctggcaacacagtgagacccccatctcaaaaaaaaaaaaaa

SEQ ID NO: 422683 - DNA, 547 bp, Homo sapiens
acagatggagaatcagaatgtcttgaattccatttctcttccggattcctactcttgacatcatagttgatgtgtgcacatcacaatgtttgtgctattcatgcacatctgattctccatctgtcctatatgcgctggcagttttgatcatattacgcctggtcaaggccttcggtgatacctcatcactcttgtctcctcgacctggattttaaggttatttcaactataatggaacctaaccttttccagcttttttttttttttaaaacagctgtcacctgcatacgccagctgaacaacttcctgttcttccaattataatacaagtgaggttttgcagacagggcagggcagcaggagcaaaatcacaaggaaaggtcaagattatatatggcagatgaggataaagtttcaggtgagagtgaaaaaagatgaggtcagcctggaatcttgggtattctagaagagaggggactactgaagaattcttcagcaagagatgtatgtgatggatcagatttagatttacattttaggtagatca

SEQ ID NO: 422684 - DNA, 675 bp, Homo sapiens
gcggagcggagccgtgcggcggggcggggccgggcggcggggcctggtttcctccctcagcgccattttgtggcagcgagacccacaaataaaggggagcgcaggggttgcggcgggactaggagcgcggcggggccggcggcagagctgtccggctgcgcggtggcccggggggcccgggcggcagggcaagcagcgcggcctcggcctatgcgaccggtggcgccggcgcggcttctgcctggagaggtaggcgcgggccggctggcgggagcggacgcgggggacctccggggcctgagggctgatgcgcagccgcccccggcgggtaaggggcgggcagggcccgaaaggccacacgggcctggtgcggcaccggtctctcgtgagccgctctaccttcccgcctgcggggaacacttccgccgcttcgaggccattttatctccgtcctccgtccccaaggcccgggttgagaggggtgctctggcggccggagagaccggccactcacggaggccggaggatgccctccccgggctgagcggcggcgctcgttttttcctcgcctcggggtcgcccccttcacctcccttgggcctctcctgaggacctggcggcactaacgagttcagcaaggaaaaaaagaaacattcgttccctacatttcatgtc

SEQ ID NO: 422685 - DNA, 3259 bp, Homo sapiens
ttactttgtttccttttttatttacttttttggctatgtaaaactaaaagttcaaagacagagaaatcttgtctccaccccccactctttataggcaactaaaaatgttaagtttccaggatatccttccaattcctccccgaaaataagcatatacacataaatattcatattaaatataaatatatatttttatgtatttaagtaaatacataaaagcatatatgcttatttttgcttttgaatacagtgaatacttactacacttaaatatttaagtgaatacttaatacaacctgagactcattccaaagcaacacacgattatttcctgaatctttttaatggttgcattgtgttctactgtatggatgcaccattcccaatcagttccctattaacggatatttgggttatccctaacttttgctatgacaaatagcactgcaataaccttgtatacctattgtttccatgtgtggagctgcaccttcagaataaggttagggttagaagtataactgcaaggtataagaataaacacaagtaattttgtactccgtggaacttgaaccatttttccactcccaccaggaaaggtaatttcaacgtgtatttccattgtaagtgaggtggagcgactttctatgtttaaagaccattacggtattttttctgagaatcatctgttcatgtccttccccattttctcctttggcttttgcactttttgttttcaatttttgagagctcttgtgatacgagttgcaaagattttctccagaccgatctgattcactggaaatatactacgaccatctggaatgtactttaatcttatcctaataaatcaccttactacaagacactcctttggggatgaacaggtttgataaagccggctaaggacagaccaatcaaaagaattacgtgctcttctagtaagtgtttagagactgtttcacgttctccaggtaacaccgccattactcggcggtccagatggcagtcttacttcagggagtctactccacttgcaggacctctttgattgagttcactaaacctcacagggccgccttccccgtgttccagttagcaaggggccctcaacgccgcggacacagcgcaacctccgacgccagagaacaatagctcctcgatgcgtctccagagatgtcaaggaggaacgaacccagcggccaggagactgcgcctcacgactgatgagagggaaggcatcggtttctaagttctcaaaacttacaggtgagcttctgctaagagtaaacgcccgcggctcgccgcccacggcctctctcttgaggtggcacctggtcctccgacacgcggaagcatcacggatgagcgtcacgaacacagagcggccaatcacgcgccgccttcgcccagatccctccgcacgaggcagccccgcagccgcaggtggccccggcgagtacttccaccttcccttcccgtgatgccctggggctgacctccgacctcgctggcccgcccctcccctcggccgcttcccttactgagcttgctgagctccggggcccgcggagctcgcgccaggctcctgggaaaggacggggagtgttaccggggagcagctgctccattgtgcctcgaggccccgatcgggctaggccgacggcctccctcccttcacctttcctctcctggcggggttcggcggcgggcgagtgactgcggccacgcctgaaaggcgactctcctgattcaagatgaccaacgaagaacctcttcccaagaaggttcgattgagtgaaacagacttcaaagttatggcaagagatgagttaattctaagatggaaacaatatgaagcatatgtacaagctttggagggcaagtacacagatcttaactctaatgatgtaactggcctaagagagtctgaagaaaaactaaagcaacaacagcaggagtctgcacgcagggaaaacatccttgtaatgcgactagcaaccaaggaacaagagatgcaagagtgtactactcaaatccagtacctcaagcaagtccagcagccgagcgttgcccaactgagatcaacaatggtagacccagcgatcaacttgtttttcctaaaaatgaaaggtgaactggaacagactaaagacaaactggaacaagcccaaaatgaactgagtgcctggaagtttacgcctgataggtaaacaaatcatactccccagtcaagacttccctgacagtcccactacgagaaagctgtggtgggacagccaagtactcgtttccacaccaagactcagactttttgagccaaaaaaaagccacattcttacactgtccagcttgtaatggttaatgtaaaacttaccagatgaaccttgtgtttcagcttttttcttttccccttccccttgcttcagaggcctgatggcgtcggactattccgaagaagtggccacctccgaaaaattccccttctagaacatgtagacacttgagaaatgtttctgtttgaagaaaatagagggagaaacagaagtcttaagtctgtggcacactgtgtcttcagacagtttgaaggaatgaaaacctagagattttaaatcatgaattgaacatgtaaaattccagtaaaatgtaaaaacggaatatgcatcgctcttaaccttgagcatagtgacttagagacactgtgtatcagttttgccaataagactgtggacttcatgattgttgttgaacttctgggtcaaaactcaaatgaggtgaattttgcctttaaagggtttatttgctgagaaccaactttcaatagtcatgagagaatcaaataatagatgtccgtacaagtagcgcatatatttaaccatttagtttggggctctatattacttgcttgagccttaatcaatgtggttttattcaatggtttgttctttgaatggttgcaaaaactgtagataatcttactgaggactgtacaaacatgaaggtgtggtatcaaacttcaggttgaaactgtttgaagcattataaacattcatttcacaactagattgtataaggatattagctgtgatgagactcactgcattattttttttagtgaattttatgaaatccccgttccattcaacaggcacatgtttaaaagagctttgtcgttggtgttaatgggggaatgtgttccttcattgtatttgggccttttgtattgcactcttgatattaaattaaatgtgccttgaaa

SEQ ID NO: 422686 - DNA, 3485 bp, Homo sapiens
  misc_feature (3416)..(3416): n is a, c, g, or t
ttactttgtttccttttttatttacttttttggctatgtaaaactaaaagttcaaagacagagaaatcttgtctccaccccccactctttataggcaactaaaaatgttaagtttccaggatatccttccaattcctccccgaaaataagcatatacacataaatattcatattaaatataaatatatatttttatgtatttaagtaaatacataaaagcatatatgcttatttttgcttttgaatacagtgaatacttactacacttaaatatttaagtgaatacttaatacaacctgagactcattccaaagcaacacacgattatttcctgaatctttttaatggttgcattgtgttctactgtatggatgcaccattcccaatcagttccctattaacggatatttgggttatccctaacttttgctatgacaaatagcactgcaataaccttgtatacctattgtttccatgtgtggagctgcaccttcagaataaggttagggttagaagtataactgcaaggtataagaataaacacaagtaattttgtactccgtggaacttgaaccatttttccactcccaccaggaaaggtaatttcaacgtgtatttccattgtaagtgaggtggagcgactttctatgtttaaagaccattacggtattttttctgagaatcatctgttcatgtccttccccattttctcctttggcttttgcactttttgttttcaatttttgagagctcttgtgatacgagttgcaaagattttctccagaccgatctgattcactggaaatatactacgaccatctggaatgtactttaatcttatcctaataaatcaccttactacaagacactcctttggggatgaacaggtttgataaagccggctaaggacagaccaatcaaaagaattacgtgctcttctagtaagtgtttagagactgtttcacgttctccaggtaacaccgccattactcggcggtccagatggcagtcttacttcagggagtctactccacttgcaggacctctttgattgagttcactaaacctcacagggccgccttccccgtgttccagttagcaaggggccctcaacgccgcggacacagcgcaacctccgacgccagagaacaatagctcctcgatgcgtctccagagatgtcaaggaggaacgaacccagcggccaggagactgcgcctcacgactgatgagagggaaggcatcggtttctaagttctcaaaacttacaggtgagcttctgctaagagtaaacgcccgcggctcgccgcccacggcctctctcttgaggtggcacctggtcctccgacacgcggaagcatcacggatgagcgtcacgaacacagagcggccaatcacgcgccgccttcgcccagatccctccgcacgaggcagccccgcagccgcaggtggccccggcgagtacttccaccttcccttcccgtgatgccctggggctgacctccgacctcgctggcccgcccctcccctcggccgcttcccttactgagcttgctgagctccggggcccgcggagctcgcgccaggctcctgggaaaggacggggagtgttaccggggagcagctgctccattgtgcctcgaggccccgatcgggctaggccgacggcctccctcccttcacctttcctctcctggcggggttcggcggcgggcgagtgactgcggccacgcctgaaaggcgactctcctgattcaagatgaccaacgaagaacctcttcccaagaaggttcgattgagtgaaacagacttcaaagttatggcaagagatgagttaattctaagatggaaacaatatgaagcatatgtacaagctttggagggcaagtacacagatcttaactctaatgatgtaactggcctaagagagtctgaagaaaaactaaagcaacaacagcaggagtctgcacgcagggaaaacatccttgtaatgcgactagcaaccaaggaacaagagatgcaagagtgtactactcaaatccagtacctcaagcaagtccagcagccgagcgttgcccaactgagatcaacaatggtagacccagcgatcaacttgtttttcctaaaaatgaaaggtgaactggaacagactaaagacaaactggaacaagcccaaaatgaactgagtgcctggaagtttacgcctgataggtaaacaaatcatactccccagtcaagacttccctgacagtcccactacgagaaagctgtggtgggacagccaagtactcgtttccacaccaagactcagactttttgagccaaaaaaaagccacattcttacactgtccagcttgtaatggttaatgtaaaacttaccagatgaaccttgtgtttcagcttttttcttttccccttccccttgcttcagaggcctgatggcgtcggactattccgaagaagtggccacctccgaaaaattccccttctagaacatgtagacacttgagaaatgtttctgtttgaagaaaatagagggagaaacagaagtcttaagtctgtggcacactgtgtcttcagacagtttgaaggaatgaaaacctagagattttaaatcatgaattgaacatgtaaaattccagtaaaatgtaaaaacggaatatgcatcgctcttaaccttgagcatagtgacttagagacactgtgtatcagttttgccaataagactgtggacttcatgattgttgttgaacttctgggtcaaaactcaaatgaggtgaattttgcctttaaagggtttatttgctgagaaccaactttcaatagtcatgagagaatcaaataatagatgtccgtacaagtagcgcatatatttaaccatttagtttggggctctatattacttgcttgagccttaatcaatgtggttttattcaatggtttgttctttgaatggttgcaaaaactgtagataatcttactgaggactgtacaaacatgaaggtgtggtatcaaacttcaggttgaaactgtttgaagcattataaacattcatttcacaactagattgtataaggatattagctgtgatgagactcactgcattattttttttagtgaattttatgaaatccccgttccattcaacaggcacatgtttaaaagagctttgtcgttggtgttaatgggggaatgtgttccttcattgtatttgggccttttgtattgcactcttgatattaaattaaatgtgccttgaaaaaaaaaaaaaataaaaaaaaataaaaaaaaacataataatattattaataataataaaaaaaaaaaaccttttgggccctttggcccaagtgaattttaaattgggcaaagtttttgaatgcggccgaaatttgggcttggccaatttgcccttagngggggccgtttacaattaattgcccgccttttaacaacggttgaacttggacctggggttcccactttt

SEQ ID NO: 422687 - DNA, 3235 bp, Homo sapiens
ttactttgtttccttttttatttacttttttggctatgtaaaactaaaagttcaaagacagagaaatcttgtctccaccccccactctttataggcaactaaaaatgttaagtttccaggatatccttccaattcctccccgaaaataagcatatacacataaatattcatattaaatataaatatatatttttatgtatttaagtaaatacataaaagcatatatgcttatttttgcttttgaatacagtgaatacttactacacttaaatatttaagtgaatacttaatacaacctgagactcattccaaagcaacacacgattatttcctgaatctttttaatggttgcattgtgttctactgtatggatgcaccattcccaatcagttccctattaacggatatttgggttatccctaacttttgctatgacaaatagcactgcaataaccttgtatacctattgtttccatgtgtggagctgcaccttcagaataaggttagggttagaagtataactgcaaggtataagaataaacacaagtaattttgtactccgtggaacttgaaccatttttccactcccaccaggaaaggtaatttcaacgtgtatttccattgtaagtgaggtggagcgactttctatgtttaaagaccattacggtattttttctgagaatcatctgttcatgtccttccccattttctcctttggcttttgcactttttgttttcaatttttgagagctcttgtgatacgagttgcaaagattttctccagaccgatctgattcactggaaatatactacgaccatctggaatgtactttaatcttatcctaataaatcaccttactacaagacactcctttggggatgaacaggtttgataaagccggctaaggacagaccaatcaaaagaattacgtgctcttctagtaagtgtttagagactgtttcacgttctccaggtaacaccgccattactcggcggtccagatggcagtcttacttcagggagtctactccacttgcaggacctctttgattgagttcactaaacctcacagggccgccttccccgtgttccagttagcaaggggccctcaacgccgcggacacagcgcaacctccgacgccagagaacaatagctcctcgatgcgtctccagagatgtcaaggaggaacgaacccagcggccaggagactgcgcctcacgactgatgagagggaaggcatcggtttctaagttctcaaaacttacaggtgagcttctgctaagagtaaacgcccgcggctcgccgcccacggcctctctcttgaggtggcacctggtcctccgacacgcggaagcatcacggatgagcgtcacgaacacagagcggccaatcacgcgccgccttcgcccagatccctccgcacgaggcagccccgcagccgcaggtggccccggcgagtacttccaccttcccttcccgtgatgccctggggctgacctccgacctcgctggcccgcccctcccctcggccgcttcccttactgagcttgctgagctccggggcccgcggagctcgcgccaggctcctgggaaaggacggggagtgttaccggggagcagctgctccattgtgcctcgaggccccgatcgggctaggccgacggcctccctcccttcacctttcctctcctggcggggttcggcggcgggcgagtgactgcggccacgcctgaaaggcgactctcctgattcaagatgaccaacgaagaacctcttcccaagaaggttcgattgagtgaaacagacttcaaagttatggcaagagatgagttaattctaagatggaaacaatatgaagcatatgtacaagctttggagggcaagtacacagatcttaactctaatgatgtaactggcctaagagagtctgaagaaaaactaaagcaacaacagcaggagtctgcacgcagggaaaacatccttgtaatgcgactagcaaccaaggaacaagagatgcaagagtgtactactcaaatccagtacctcaagcaagtccagcagccgagcgttgcccaactgagatcaacaatggtagacccagcgatcaacttgtttttcctaaaaatgaaaggtgaactggaacagactaaagacaaactggaacaagcccaaaatgaactgagtgcctggaagtttacgcctgataggtaaacaaatcatactccccagtcaagacttccctgacagtcccactacgagaaagctgtggtgggacagccaagtactcgtttccacaccaagactcagactttttgagccaaaaaaaagccacattcttacactgtccagcttgtaatggttaatgtaaaacttaccagatgaaccttgtgtttcagcttttttcttttccccttccccttgcttcagaggcctgatggcgtcggactattccgaagaagtggccacctccgaaaaattccccttctagaacatgtagacacttgagaaatgtttctgtttgaagaaaatagagggagaaacagaagtcttaagtctgtggcacactgtgtcttcagacagtttgaaggaatgaaaacctagagattttaaatcatgaattgaacatgtaaaattccagtaaaatgtaaaaacggaatatgcatcgctcttaaccttgagcatagtgacttagagacactgtgtatcagttttgccaataagactgtggacttcatgattgttgttgaacttaattttgcctttaaagggtttatttgctgagaaccaactttcaatagtcatgagagaatcaaataatagatgtccgtacaagtagcgcatatatttaaccatttagtttggggctctatattacttgcttgagccttaatcaatgtggttttattcaatggtttgttctttgaatggttgcaaaaactgtagataatcttactgaggactgtacaaacatgaaggtgtggtatcaaacttcaggttgaaactgtttgaagcattataaacattcatttcacaactagattgtataaggatattagctgtgatgagactcactgcattattttttttagtgaattttatgaaatccccgttccattcaacaggcacatgtttaaaagagctttgtcgttggtgttaatgggggaatgtgttccttcattgtatttgggccttttgtattgcactcttgatattaaattaaatgtgccttgaaa

SEQ ID NO: 422688 - DNA, 2158 bp, Homo sapiens
gcggagcggagccgtgcggcggggcggggccgggcggcggggcctggtttcctccctcagcgccattttgtggcagcgagacccacaaataaaggggagcgcaggggttgcggcgggactaggagcgcggcggggccggcggcagagctgtccggctgcgcggtggcccggggggcccgggcggcagggcaagcagcgcggcctcggcctatgcgaccggtggcgccggcgcggcttctgcctggagaggattcaagatgaccaacgaagaacctcttcccaagaaggttcgattgagtgaaacagacttcaaagttatggcaagagatgagttaattctaagatggaaacaatatgaagcatatgtacaagctttggagggcaagtacacagatcttaactctaatgatgtaactggcctaagagagtctgaagaaaaactaaagcaacaacagcaggagtctgcacgcagggaaaacatccttgtaatgcgactagcaaccaaggaacaagagatgcaagagtgtactactcaaatccagtacctcaagcaagtccagcagccgagcgttgcccaactgagatcaacaatggtagacccagcgatcaacttgtttttcctaaaaatgaaaggtgaactggaacagactaaagacaaactggaacaagcccaaaatgaactgagtgcctggaagtttacgcctgatagccaaacagggaaaaagttaatggcgaagtgtcgaatgcttatccaggagaatcaagagcttggaaggcagctgtcccagggacgtattgcacaacttgaagcagagttggctttacagaagaaatacagtgaggagcttaaaagcagtcaggatgaactgaatgacttcatcatccagcttgatgaagaagtagagggtatgcagagtaccattctagttctgcagcagcagctgaaggagacacgccagcagttggctcagtaccagcagcagcagtctcaggcctctgccccaagtaccagcaggactacagcttctgaacctgtagaacagtcagaggccacaagtaaagactgcagtcgtctgacaaacggaccaagtaatggtagctcctcccgccagaggacgtctgggtctggatttcacagggagggcaacacaaccgaagatgactttccttcttctccagggaatggtaataagtcctccaacagctcagaggagagaactggcagaggaggtagtggttacgtaaatcaactcagtgcggggtatgaaagtgtagactctcccacgggcagtgaaaactctctcacacaccaatcaaatgacacagactccagtcatgaccctcaagaggagaaagcagtgagtgggaaaggtaatcgaactgtgggttcccgccacgttcagaatggcttggactcaagtgtaaatgtacagggttcagttttgtaatattttttcagcaaatttttatacagtgtcatttaatttgggagaggatactgtccagaaaattaatgcatacttttgtcacaatttgcctttttgtgggtgtacgttttggtttttttttgttgttttttttctttgttttttcttttcttttctttttttttttttgcttcaatacttctgccgctttggaaattgtaacagttaattactttgaatgttgctaaaaggacattttgtgtagggtcaagttatttttatatgagttaatgtgaaattgtaaatggaaatttttccttaaaatacaacacaatgatgtctgtataaatctgtctgtttagaatctgtgctgtgtaagggcattcgtactcatgctgttactgtacttatgcaccattcagacttgttagagtagatgtgggtttatgactgccaagtttgcccagtacagtagttttttatcactaaaagttggactcattgatggagtcctgtagtagtttcagtgttagatacagttttttccaccatacatctgtgcattttctctttaggtgactgtttaagaaatttgtgtgcatagttactcagtttttatgaactgttgtatcctgttaatgcatattgctctgtgactccagtatatcttacctgtactgaccaaacctaaataaagatttttattgtaactccttaaaaaagcttttttg

SEQ ID NO: 422689 - DNA, 2310 bp, Homo sapiens
cttggcatgttctcagcagaaaaaaccttctctatatatctctttttacctgtttcctgtaaaatgggaaggaataatgagggactattttatgatcagttaaactagatttaggctgggtgtggtgactcaggcctgtaatttcagcagtttgggaggccagggtgtgaggatcatttgagctcgggagttcaagaccagcctgggcaacgtagtgagaccccatctctacaaaaaaatgagccatgtgcctttggtcccagctatacaggaagctgaggcagggacatcgcttgagcccagaccctgtttgcgccacgctgcactccagcctgggggacagagcgagactctgtctaaaaaaaactagatttaaaatgaaaaatccagaagaatgctcagtattactaaaatctgtgagtttatagatatcttctagtttatttaataaactattttatcgtaacaactaatgtatggatttttttttattagatggaaacaatatgaagcatatgtacaagctttggagggcaagtacacagatcttaactctaatgatgtaactggcctaagagagtctgaagaaaaactaaagcaacaacagcaggagtctgcacgcagggaaaacatccttgtaatgcgactagcaaccaaggaacaagagatgcaagagtgtactactcaaatccagtacctcaagcaagtccagcagccgagcgttgcccaactgagatcaacaatggtagacccagcgatcaacttgtttttcctaaaaatgaaaggtgaactggaacagactaaagacaaactggaacaagcccaaaatgaactgagtgcctggaagtttacgcctgatagccaaacagggaaaaagttaatggcgaagtgtcgaatgcttatccaggagaatcaagagcttggaaggcagctgtcccagggacgtattgcacaacttgaagcagagttggctttacagaagaaatacagtgaggagcttaaaagcagtcaggatgaactgaatgacttcatcatccagcttgatgaagaagtagagggtatgcagagtaccattctagttctgcagcagcagctgaaggagacacgccagcagttggctcagtaccagcagcagcagtctcaggcctctgccccaagtaccagcaggactacagcttctgaacctgtagaacagtcagaggccacaagtaaagactgcagtcgtctgacaaacggaccaagtaatggtagctcctcccgccagaggacgtctgggtctggatttcacagggagggcaacacaaccgaagatgactttccttcttctccagggaatggtaataagtcctccaacagctcagaggagagaactggcagaggaggtagtggttacgtaaatcaactcagtgcggggtatgaaagtgtagactctcccacgggcagtgaaaactctctcacacaccaatcaaatgacacagactccagtcatgaccctcaagaggagaaagcagtgagtgggaaaggtaatcgaactgtgggttcccgccacgttcagaatggcttggactcaagtgtaaatgtacagggttcagttttgtaatattttttcagcaaatttttatacagtgtcatttaatttgggagaggatactgtccagaaaattaatgcatacttttgtcacaatttgcctttttgtgggtgtacgttttggtttttttttgttgttttttttctttgttttttcttttcttttctttttttttttttgcttcaatacttctgccgctttggaaattgtaacagttaattactttgaatgttgctaaaaggacattttgtgtagggtcaagttatttttatatgagttaatgtgaaattgtaaatggaaatttttccttaaaatacaacacaatgatgtctgtataaatctgtctgtttagaatctgtgctgtgtaagggcattcgtactcatgctgttactgtacttatgcaccattcagacttgttagagtagatgtgggtttatgactgccaagtttgcccagtacagtagttttttatcactaaaagttggactcattgatggagtcctgtagtagtttcagtgttagatacagttttttccaccatacatctgtgcattttctctttaggtgactgtttaagaaatttgtgtgcatagttactcagtttttatgaactgttgtatcctgttaatgcatattgctctgtgactccagtatatcttacctgtactgaccaaacctaaataaagatttttattgtaactccttaaaaaagcttttttg

SEQ ID NO: 422690 - DNA, 2046 bp, Homo sapiens
acagatggagaatcagaatgtcttgaattccatttctcttccggattcctactcttgacatcatagttgatgtgtgcacatcacaatgtttgtgctattcatgcacatctgattctccatctgtcctatatgcgctggcagttttgatcatattacgcctggtcaaggccttcggtgatacctcatcactcttgtctcctcgacctggattttaaggttatttcaactataatggaacctaaccttttccagcttttttttttttttaaaacagctgtcacctgcatacgccagctgaacaacttcctgttcttccaattataatacaagtgaggttttgcagacagggcagggcagcaggagcaaaatcacaaggaaaggtcaagattatatatggcagatgaggataaagtttcagactcaaatccagtacctcaagcaagtccagcagccgagcgttgcccaactgagatcaacaatggtagacccagcgatcaacttgtttttcctaaaaatgaaaggtgaactggaacagactaaagacaaactggaacaagcccaaaatgaactgagtgcctggaagtttacgcctgatagccaaacagggaaaaagttaatggcgaagtgtcgaatgcttatccaggagaatcaagagcttggaaggcagctgtcccagggacgtattgcacaacttgaagcagagttggctttacagaagaaatacagtgaggagcttaaaagcagtcaggatgaactgaatgacttcatcatccagcttgatgaagaagtagagggtatgcagagtaccattctagttctgcagcagcagctgaaggagacacgccagcagttggctcagtaccagcagcagcagtctcaggcctctgccccaagtaccagcaggactacagcttctgaacctgtagaacagtcagaggccacaagtaaagactgcagtcgtctgacaaacggaccaagtaatggtagctcctcccgccagaggacgtctgggtctggatttcacagggagggcaacacaaccgaagatgactttccttcttctccagggaatggtaataagtcctccaacagctcagaggagagaactggcagaggaggtagtggttacgtaaatcaactcagtgcggggtatgaaagtgtagactctcccacgggcagtgaaaactctctcacacaccaatcaaatgacacagactccagtcatgaccctcaagaggagaaagcagtgagtgggaaaggtaatcgaactgtgggttcccgccacgttcagaatggcttggactcaagtgtaaatgtacagggttcagttttgtaatattttttcagcaaatttttatacagtgtcatttaatttgggagaggatactgtccagaaaattaatgcatacttttgtcacaatttgcctttttgtgggtgtacgttttggtttttttttgttgttttttttctttgttttttcttttcttttctttttttttttttgcttcaatacttctgccgctttggaaattgtaacagttaattactttgaatgttgctaaaaggacattttgtgtagggtcaagttatttttatatgagttaatgtgaaattgtaaatggaaatttttccttaaaatacaacacaatgatgtctgtataaatctgtctgtttagaatctgtgctgtgtaagggcattcgtactcatgctgttactgtacttatgcaccattcagacttgttagagtagatgtgggtttatgactgccaagtttgcccagtacagtagttttttatcactaaaagttggactcattgatggagtcctgtagtagtttcagtgttagatacagttttttccaccatacatctgtgcattttctctttaggtgactgtttaagaaatttgtgtgcatagttactcagtttttatgaactgttgtatcctgttaatgcatattgctctgtgactccagtatatcttacctgtactgaccaaacctaaataaagatttttattgtaactccttaaaaaagcttttttg

SEQ ID NO: 422691 - DNA, 1733 bp, Homo sapiens
tttgagatgaaaatagatggatttcagaattgattattgatgtaatagaaacaaggtgtagctgtttgggcactttttgtttagggtttatttttgctgctgtgttggcaaaatactgaaatgcagaagatggatgtgtcccagaaaagaagatggtaattatggggaagcatctgctgtgatatagttatgtttgtatgtgttacatctatcactgtaataattgtaagcaaagacagagagttttgtcttcattttgtgatggatggctctttcctttgcagccaaacagggaaaaagttaatggcgaagtgtcgaatgcttatccaggagaatcaagagcttggaaggcagctgtcccagggacgtattgcacaacttgaagcagagttggctttacagaagaaatacagtgaggagcttaaaagcagtcaggatgaactgaatgacttcatcatccagcttgatgaagaagtagagggtatgcagagtaccattctagttctgcagcagcagctgaaggagacacgccagcagttggctcagtaccagcagcagcagtctcaggcctctgccccaagtaccagcaggactacagcttctgaacctgtagaacagtcagaggccacaagtaaagactgcagtcgtctgacaaacggaccaagtaatggtagctcctcccgccagaggacgtctgggtctggatttcacagggagggcaacacaaccgaagatgactttccttcttctccagggaatggtaataagtcctccaacagctcagaggagagaactggcagaggaggtagtggttacgtaaatcaactcagtgcggggtatgaaagtgtagactctcccacgggcagtgaaaactctctcacacaccaatcaaatgacacagactccagtcatgaccctcaagaggagaaagcagtgagtgggaaaggtaatcgaactgtgggttcccgccacgttcagaatggcttggactcaagtgtaaatgtacagggttcagttttgtaatattttttcagcaaatttttatacagtgtcatttaatttgggagaggatactgtccagaaaattaatgcatacttttgtcacaatttgcctttttgtgggtgtacgttttggtttttttttgttgttttttttctttgttttttcttttcttttctttttttttttttgcttcaatacttctgccgctttggaaattgtaacagttaattactttgaatgttgctaaaaggacattttgtgtagggtcaagttatttttatatgagttaatgtgaaattgtaaatggaaatttttccttaaaatacaacacaatgatgtctgtataaatctgtctgtttagaatctgtgctgtgtaagggcattcgtactcatgctgttactgtacttatgcaccattcagacttgttagagtagatgtgggtttatgactgccaagtttgcccagtacagtagttttttatcactaaaagttggactcattgatggagtcctgtagtagtttcagtgttagatacagttttttccaccatacatctgtgcattttctctttaggtgactgtttaagaaatttgtgtgcatagttactcagtttttatgaactgttgtatcctgttaatgcatattgctctgtgactccagtatatcttacctgtactgaccaaacctaaataaagatttttattgtaactccttaaaaaagcttttttg

SEQ ID NO: 422692 - DNA, 3377 bp, Homo sapiens
ttactttgtttccttttttatttacttttttggctatgtaaaactaaaagttcaaagacagagaaatcttgtctccaccccccactctttataggcaactaaaaatgttaagtttccaggatatccttccaattcctccccgaaaataagcatatacacataaatattcatattaaatataaatatatatttttatgtatttaagtaaatacataaaagcatatatgcttatttttgcttttgaatacagtgaatacttactacacttaaatatttaagtgaatacttaatacaacctgagactcattccaaagcaacacacgattatttcctgaatctttttaatggttgcattgtgttctactgtatggatgcaccattcccaatcagttccctattaacggatatttgggttatccctaacttttgctatgacaaatagcactgcaataaccttgtatacctattgtttccatgtgtggagctgcaccttcagaataaggttagggttagaagtataactgcaaggtataagaataaacacaagtaattttgtactccgtggaacttgaaccatttttccactcccaccaggaaaggtaatttcaacgtgtatttccattgtaagtgaggtggagcgactttctatgtttaaagaccattacggtattttttctgagaatcatctgttcatgtccttccccattttctcctttggcttttgcactttttgttttcaatttttgagagctcttgtgatacgagttgcaaagattttctccagaccgatctgattcactggaaatatactacgaccatctggaatgtactttaatcttatcctaataaatcaccttactacaagacactcctttggggatgaacaggtttgataaagccggctaaggacagaccaatcaaaagaattacgtgctcttctagtaagtgtttagagactgtttcacgttctccaggtaacaccgccattactcggcggtccagatggcagtcttacttcagggagtctactccacttgcaggacctctttgattgagttcactaaacctcacagggccgccttccccgtgttccagttagcaaggggccctcaacgccgcggacacagcgcaacctccgacgccagagaacaatagctcctcgatgcgtctccagagatgtcaaggaggaacgaacccagcggccaggagactgcgcctcacgactgatgagagggaaggcatcggtttctaagttctcaaaacttacaggtgagcttctgctaagagtaaacgcccgcggctcgccgcccacggcctctctcttgaggtggcacctggtcctccgacacgcggaagcatcacggatgagcgtcacgaacacagagcggccaatcacgcgccgccttcgcccagatccctccgcacgaggcagccccgcagccgcaggtggccccggcgagtacttccaccttcccttcccgtgatgccctggggctgacctccgacctcgctggcccgcccctcccctcggccgcttcccttactgagcttgctgagctccggggcccgcggagctcgcgccaggctcctgggaaaggacggggagtgttaccggggagcagctgctccattgtgcctcgaggccccgatcgggctaggccgacggcctccctcccttcacctttcctctcctggcggggttcggcggcgggcgagtgactgcggccacgcctgaaaggcgactctcctgattcaagatgaccaacgaagaacctcttcccaagaaggttcgattgagtgaaacagacttcaaagttatggcaagagatgagttaattctaagatggaaacaatatgaagcatatgtacaagctttggagggcaagtacacagatcttaactctaatgatgtaactggcctaagagagtctgaagaaaaactaaagcaacaacagcaggagtctgcacgcagggaaaacatccttgtaatgcgactagcaaccaaggaacaagagatgcaagagtgtactactcaaatccagtacctcaagcaagtccagcagccgagcgttgcccaactgagatcaacaatggtagacccagcgatcaacttgtttttcctaaaaatgaaaggtgaactggaacagactaaagacaaactggaacaagcccaaaatgaactgagtgcctggaagtttacgcctgatagccaaacagggaaaaagttaatggcgaagtgtcgaatgcttatccaggagaatcaagagcttggaaggcagctgtcccagggacgtattgcacaacttgaagcagagttggctttacagaagaaatacagtgaggagcttaaaagcagtcaggatgaactgaatgacttcatcatccagcttgatgaagaagtagagggtatgcagagtaccattctagttctgcagcagcagctgaaggagacacgccagcagttggctcagtaccagcagcagcagtctcaggcctctgccccaagtaccagcaggactacagcttctgaacctgtagaacagtcagaggccacaagtaaagactgcagtcgtctgacaaacggaccaagtaatggtagctcctcccgccagaggacgtctgggtctggatttcacagggagggcaacacaaccgaagatgactttccttcttctccagggaatggtaataagtcctccaacagctcagaggagagaactggcagaggaggtagtggttacgtaaatcaactcagtgcggggtatgaaagtgtagactctcccacgggcagtgaaaactctctcacacaccaatcaaatgacacagactccagtcatgaccctcaagaggagaaagcagtgagtgggaaaggtaatcgaactgtgggttcccgccacgttcagaatggcttggactcaagtgtaaatgtacagggttcagttttgtaatattttttcagcaaatttttatacagtgtcatttaatttgggagaggatactgtccagaaaattaatgcatacttttgtcacaatttgcctttttgtgggtgtacgttttggtttttttttgttgttttttttctttgttttttcttttcttttctttttttttttttgcttcaatacttctgccgctttggaaattgtaacagttaattactttgaatgttgctaaaaggacattttgtgtagggtcaagttatttttatatgagttaatgtgaaattgtaaatggaaatttttccttaaaatacaacacaatgatgtctgtataaatctgtctgtttagaatctgtgctgtgtaagggcattcgtactcatgtccccgtacatcgttagaagcttgaattcgagcagtagtagtagtaggcggccgc

SEQ ID NO: 422693 - DNA, 1647 bp, Homo sapiens
acagatggagaatcagaatgtcttgaattccatttctcttccggattcctactcttgacatcatagttgatgtgtgcacatcacaatgtttgtgctattcatgcacatctgattctccatctgtcctatatgcgctggcagttttgatcatattacgcctggtcaaggccttcggtgatacctcatcactcttgtctcctcgacctggattttaaggttatttcaactataatggaacctaaccttttccagcttttttttttttttaaaacagctgtcacctgcatacgccagctgaacaacttcctgttcttccaattataatacaagtgaggttttgcagacagggcagggcagcaggagcaaaatcacaaggaaaggtcaagattatatatggcagatgaggataaagtttcagactcaaatccagtacctcaagcaagtccagcagccgagcgttgcccaactgagatcaacaatggtagacccagcgatcaacttgtttttcctaaaaatgaaaggtgaactggaacagactaaagacaaactggaacaagcccaaaatgaactgagtgcctggaagtttacgcctgataggtaaacaaatcatactccccagtcaagacttccctgacagtcccactacgagaaagctgtggtgggacagccaagtactcgtttccacaccaagactcagactttttgagccaaaaaaaagccacattcttacactgtccagcttgtaatggttaatgtaaaacttaccagatgaaccttgtgtttcagcttttttcttttccccttccccttgcttcagaggcctgatggcgtcggactattccgaagaagtggccacctccgaaaaattccccttctagaacatgtagacacttgagaaatgtttctgtttgaagaaaatagagggagaaacagaagtcttaagtctgtggcacactgtgtcttcagacagtttgaaggaatgaaaacctagagattttaaatcatgaattgaacatgtaaaattccagtaaaatgtaaaaacggaatatgcatcgctcttaaccttgagcatagtgacttagagacactgtgtatcagttttgccaataagactgtggacttcatgattgttgttgaacttctgggtcaaaactcaaatgaggtgaattttgcctttaaagggtttatttgctgagaaccaactttcaatagtcatgagagaatcaaataatagatgtccgtacaagtagcgcatatatttaaccatttagtttggggctctatattacttgcttgagccttaatcaatgtggttttattcaatggtttgttctttgaatggttgcaaaaactgtagataatcttactgaggactgtacaaacatgaaggtgtggtatcaaacttcaggttgaaactgtttgaagcattataaacattcatttcacaactagattgtataaggatattagctgtgatgagactcactgcattattttttttagtgaattttatgaaatccccgttccattcaacaggcacatgtttaaaagagctttgtcgttggtgttaatgggggaatgtgttccttcattgtatttgggccttttgtattgcactcttgatattaaattaaatgtgccttgaaa

SEQ ID NO: 422694 - DNA, 1343 bp, Homo sapiens
ggggaggagcttaatgaaagagttggtaaatcaagtgaatggagggagttttccccaccttcttatgtatgtttcctttgatttggtcgtaattgtttcttttgctttgcacagactcaaatccagtacctcaagcaagtccagcagccgagcgttgcccaactgagatcaacaatggtagacccagcgatcaacttgtttttcctaaaaatgaaaggtgaactggaacagactaaagacaaactggaacaagcccaaaatgaactgagtgcctggaagtttacgcctgataggtaaacaaatcatactccccagtcaagacttccctgacagtcccactacgagaaagctgtggtgggacagccaagtactcgtttccacaccaagactcagactttttgagccaaaaaaaagccacattcttacactgtccagcttgtaatggttaatgtaaaacttaccagatgaaccttgtgtttcagcttttttcttttccccttccccttgcttcagaggcctgatggcgtcggactattccgaagaagtggccacctccgaaaaattccccttctagaacatgtagacacttgagaaatgtttctgtttgaagaaaatagagggagaaacagaagtcttaagtctgtggcacactgtgtcttcagacagtttgaaggaatgaaaacctagagattttaaatcatgaattgaacatgtaaaattccagtaaaatgtaaaaacggaatatgcatcgctcttaaccttgagcatagtgacttagagacactgtgtatcagttttgccaataagactgtggacttcatgattgttgttgaacttctgggtcaaaactcaaatgaggtgaattttgcctttaaagggtttatttgctgagaaccaactttcaatagtcatgagagaatcaaataatagatgtccgtacaagtagcgcatatatttaaccatttagtttggggctctatattacttgcttgagccttaatcaatgtggttttattcaatggtttgttctttgaatggttgcaaaaactgtagataatcttactgaggactgtacaaacatgaaggtgtggtatcaaacttcaggttgaaactgtttgaagcattataaacattcatttcacaactagattgtataaggatattagctgtgatgagactcactgcattattttttttagtgaattttatgaaatccccgttccattcaacaggcacatgtttaaaagagctttgtcgttggtgttaatgggggaatgtgttccttcattgtatttgggccttttgtattgcactcttgatattaaattaaatgtgccttgaaa

SEQ ID NO: 422695 - DNA, 2792 bp, Homo sapiens
ttactttgtttccttttttatttacttttttggctatgtaaaactaaaagttcaaagacagagaaatcttgtctccaccccccactctttataggcaactaaaaatgttaagtttccaggatatccttccaattcctccccgaaaataagcatatacacataaatattcatattaaatataaatatatatttttatgtatttaagtaaatacataaaagcatatatgcttatttttgcttttgaatacagtgaatacttactacacttaaatatttaagtgaatacttaatacaacctgagactcattccaaagcaacacacgattatttcctgaatctttttaatggttgcattgtgttctactgtatggatgcaccattcccaatcagttccctattaacggatatttgggttatccctaacttttgctatgacaaatagcactgcaataaccttgtatacctattgtttccatgtgtggagctgcaccttcagaataaggttagggttagaagtataactgcaaggtataagaataaacacaagtaattttgtactccgtggaacttgaaccatttttccactcccaccaggaaaggtaatttcaacgtgtatttccattgtaagtgaggtggagcgactttctatgtttaaagaccattacggtattttttctgagaatcatctgttcatgtccttccccattttctcctttggcttttgcactttttgttttcaatttttgagagctcttgtgatacgagttgcaaagattttctccagaccgatctgattcactggaaatatactacgaccatctggaatgtactttaatcttatcctaataaatcaccttactacaagacactcctttggggatgaacaggtttgataaagccggctaaggacagaccaatcaaaagaattacgtgctcttctagtaagtgtttagagactgtttcacgttctccaggtaacaccgccattactcggcggtccagatggcagtcttacttcagggagtctactccacttgcaggacctctttgattgagttcactaaacctcacagggccgccttccccgtgttccagttagcaaggggccctcaacgccgcggacacagcgcaacctccgacgccagagaacaatagctcctcgatgcgtctccagagatgtcaaggaggaacgaacccagcggccaggagactgcgcctcacgactgatgagagggaaggcatcggtttctaagttctcaaaacttacaggtgagcttctgctaagagtaaacgcccgcggctcgccgcccacggcctctctcttgaggtggcacctggtcctccgacacgcggaagcatcacggatgagcgtcacgaacacagagcggccaatcacgcgccgccttcgcccagatccctccgcacgaggcagccccgcagccgcaggtggccccggcgagtacttccaccttcccttcccgtgatgccctggggctgacctccgacctcgctggcccgcccctcccctcggccgcttcccttactgagcttgctgagctccggggcccgcggagctcgcgccaggctcctgggaaaggacggggagtgttaccggggagcagctgctccattgtgcctcgaggccccgatcgggctaggccgacggcctccctcccttcacctttcctctcctggcggggttcggcggcgggcgagtgactgcggccacgcctgaaaggcgactctcctgattcaagatgaccaacgaagaacctcttcccaagaaggttcgattgagtgaaacagacttcaaagttatggcaagagatgagttaattctaagatggaaacaatatgaagcatatgtacaagctttggagggcaagtacacagatcttaactctaatgatgtaactggcctaagagagtctgaagaaaaactaaagcaacaacagcaggagtctgcacgcagggaaaacatccttgtaatgcgactagcaaccaaggaacaagagatgcaagagtgtactactcaaatccagtacctcaagcaagtccagcagccgagcgttgcccaactgagatcaacaatggtagacccagcgatcaacttgtttttcctaaaaatgaaaggtgaactggaacagactaaagacaaactggaacaagcccaaaatgaactgagtgcctggaagtttacgcctgatagccaaacagggaaaaagttaatggcgaagtgtcgaatgcttatccaggagaatcaagagcttggaaggcagctgtcccagggacgtattgcacaacttgaagcagagttggctttacagaagaaatacagtgaggagcttaaaagcagtcaggatgaactgaatgacttcatcatccagcttgatgaagaagtagagggtatgcagagtaccattctagttctgcagcagcagctgaaggagacacgccagcagttggctcagtaccagcagcagcagtctcaggcctctgccccaagtaccagcaggactacagcttctgaacctgtagaacagtcagaggccacaagtaaagactgcagtcgtctgacaaacggaccaagtaatggtagctcctcccgccagaggacgtctgggtctggatttcagcacaggggcaccccacacgaacgatgacaaacgacggccagcagccaagcgtgaatgacctccagcatacgagctcaagaggagacaacctgcgcaaagtggaggcagcaacaaaagcaatcggcaaatgaatgagacccagactggatactaata

SEQ ID NO: 422696 - DNA, 2728 bp, Homo sapiens
ttactttgtttccttttttatttacttttttggctatgtaaaactaaaagttcaaagacagagaaatcttgtctccaccccccactctttataggcaactaaaaatgttaagtttccaggatatccttccaattcctccccgaaaataagcatatacacataaatattcatattaaatataaatatatatttttatgtatttaagtaaatacataaaagcatatatgcttatttttgcttttgaatacagtgaatacttactacacttaaatatttaagtgaatacttaatacaacctgagactcattccaaagcaacacacgattatttcctgaatctttttaatggttgcattgtgttctactgtatggatgcaccattcccaatcagttccctattaacggatatttgggttatccctaacttttgctatgacaaatagcactgcaataaccttgtatacctattgtttccatgtgtggagctgcaccttcagaataaggttagggttagaagtataactgcaaggtataagaataaacacaagtaattttgtactccgtggaacttgaaccatttttccactcccaccaggaaaggtaatttcaacgtgtatttccattgtaagtgaggtggagcgactttctatgtttaaagaccattacggtattttttctgagaatcatctgttcatgtccttccccattttctcctttggcttttgcactttttgttttcaatttttgagagctcttgtgatacgagttgcaaagattttctccagaccgatctgattcactggaaatatactacgaccatctggaatgtactttaatcttatcctaataaatcaccttactacaagacactcctttggggatgaacaggtttgataaagccggctaaggacagaccaatcaaaagaattacgtgctcttctagtaagtgtttagagactgtttcacgttctccaggtaacaccgccattactcggcggtccagatggcagtcttacttcagggagtctactccacttgcaggacctctttgattgagttcactaaacctcacagggccgccttccccgtgttccagttagcaaggggccctcaacgccgcggacacagcgcaacctccgacgccagagaacaatagctcctcgatgcgtctccagagatgtcaaggaggaacgaacccagcggccaggagactgcgcctcacgactgatgagagggaaggcatcggtttctaagttctcaaaacttacaggtgagcttctgctaagagtaaacgcccgcggctcgccgcccacggcctctctcttgaggtggcacctggtcctccgacacgcggaagcatcacggatgagcgtcacgaacacagagcggccaatcacgcgccgccttcgcccagatccctccgcacgaggcagccccgcagccgcaggtggccccggcgagtacttccaccttcccttcccgtgatgccctggggctgacctccgacctcgctggcccgcccctcccctcggccgcttcccttactgagcttgctgagctccggggcccgcggagctcgcgccaggctcctgggaaaggacggggagtgttaccggggagcagctgctccattgtgcctcgaggccccgatcgggctaggccgacggcctccctcccttcacctttcctctcctggcggggttcggcggcgggcgagtgactgcggccacgcctgaaaggcgactctcctgattcaagatgaccaacgaagaacctcttcccaagaaggttcgattgagtgaaacagacttcaaagttatggcaagagatgagttaattctaagatggaaacaatatgaagcatatgtacaagctttggagggcaagtacacagatcttaactctaatgatgtaactggcctaagagagtctgaagaaaaactaaagcaacaacagcaggagtctgcacgcagggaaaacatccttgtaatgcgactagcaaccaaggaacaagagatgcaagagtgtactactcaaatccagtacctcaagcaagtccagcagccgagcgttgcccaactgagatcaacaatggtagacccagcgatcaacttgtttttcctaaaaatgaaaggtgaactggaacagactaaagacaaactggaacaagcccaaaatgaactgagtgcctggaagtttacgcctgatagccaaacagggaaaaagttaatggcgaagtgtcgaatgcttatccaggagaatcaagagcttggaaggcagctgtcccagggacgtattgcacaacttgaagcagagttggctttacagaagaaatacagtgaggagcttaaaagcagtcaggatggtaaggggtttgtttctttttggaacgttgtctcaactttgcattggctttttaaaactgccagtcatgaatattataggttagattctgtacattgttaacctctgccctatgattgtatattattgtgagtgaagcatttttagttgagtccgcaaacaaagccatataattttagtttgtttatccccaccctcctaattctttattgttcaaaatttcttacatttttgtttttagttgggggtaggatttggtaaaagataaaagggtgttgtattacttaacaagatggacaaatttgtattcattgtttgaaagggagaataagcatttctcgttaagtgtaaatcttagaaacatg

SEQ ID NO: 422697 - DNA, 2696 bp, Homo sapiens
ttactttgtttccttttttatttacttttttggctatgtaaaactaaaagttcaaagacagagaaatcttgtctccaccccccactctttataggcaactaaaaatgttaagtttccaggatatccttccaattcctccccgaaaataagcatatacacataaatattcatattaaatataaatatatatttttatgtatttaagtaaatacataaaagcatatatgcttatttttgcttttgaatacagtgaatacttactacacttaaatatttaagtgaatacttaatacaacctgagactcattccaaagcaacacacgattatttcctgaatctttttaatggttgcattgtgttctactgtatggatgcaccattcccaatcagttccctattaacggatatttgggttatccctaacttttgctatgacaaatagcactgcaataaccttgtatacctattgtttccatgtgtggagctgcaccttcagaataaggttagggttagaagtataactgcaaggtataagaataaacacaagtaattttgtactccgtggaacttgaaccatttttccactcccaccaggaaaggtaatttcaacgtgtatttccattgtaagtgaggtggagcgactttctatgtttaaagaccattacggtattttttctgagaatcatctgttcatgtccttccccattttctcctttggcttttgcactttttgttttcaatttttgagagctcttgtgatacgagttgcaaagattttctccagaccgatctgattcactggaaatatactacgaccatctggaatgtactttaatcttatcctaataaatcaccttactacaagacactcctttggggatgaacaggtttgataaagccggctaaggacagaccaatcaaaagaattacgtgctcttctagtaagtgtttagagactgtttcacgttctccaggtaacaccgccattactcggcggtccagatggcagtcttacttcagggagtctactccacttgcaggacctctttgattgagttcactaaacctcacagggccgccttccccgtgttccagttagcaaggggccctcaacgccgcggacacagcgcaacctccgacgccagagaacaatagctcctcgatgcgtctccagagatgtcaaggaggaacgaacccagcggccaggagactgcgcctcacgactgatgagagggaaggcatcggtttctaagttctcaaaacttacaggtgagcttctgctaagagtaaacgcccgcggctcgccgcccacggcctctctcttgaggtggcacctggtcctccgacacgcggaagcatcacggatgagcgtcacgaacacagagcggccaatcacgcgccgccttcgcccagatccctccgcacgaggcagccccgcagccgcaggtggccccggcgagtacttccaccttcccttcccgtgatgccctggggctgacctccgacctcgctggcccgcccctcccctcggccgcttcccttactgagcttgctgagctccggggcccgcggagctcgcgccaggctcctgggaaaggacggggagtgttaccggggagcagctgctccattgtgcctcgaggccccgatcgggctaggccgacggcctccctcccttcacctttcctctcctggcggggttcggcggcgggcgagtgactgcggccacgcctgaaaggcgactctcctgattcaagatgaccaacgaagaacctcttcccaagaaggttcgattgagtgaaacagacttcaaagttatggcaagagatgagttaattctaagatggaaacaatatgaagcatatgtacaagctttggagggcaagtacacagatcttaactctaatgatgtaactggcctaagagagtctgaagaaaaactaaagcaacaacagcaggagtctgcacgcagggaaaacatccttgtaatgcgactagcaaccaaggaacaagagatgcaagagtgtactactcaaatccagtacctcaagcaagtccagcagccgagcgttgcccaactgagatcaacaatggtagacccagcgatcaacttgtttttcctaaaaatgaaaggtgaactggaacagactaaagacaaactggaacaagcccaaaatgaactgagtgcctggaagtttacgcctgatagtggatgttcagtggaggctaacgcctgagagtgctgatgggaaatggtggaaatctggagctacagtagcagtgaacaagaacaccagctaataaagttatcatatcaaagaataaagcctttaccacatgctcactggtggctttcaccctcgggctcctctgagcagtagtaacccaggttgaactcttcaggtattttctggaagaaagcttaattacaaacttttccttgaattacattaggttagaaaacatgcagccaggcacggtggctcatgcctgtaatcccaacactttggaaggctgaggtaggcagatcacttgagcttaggagtttgagaccagcctgggcaacaaggcgaaaccccatctctactaaaaatccaaaattagctggggacgtcaaggctccagtgagctgagatcacgccactgcactccagcctggcaacacagtgagacccccatctcaaaaaaaaaaaaaa

SEQ ID NO: 422698 - DNA, 268 bp, Homo sapiens
acggggatttcataaaattcactagaagtattctgccgtgagtctcatcacagctaattcatttcacaactagattgtataaggatattagctgtgatgagactcactgcattattttttttagtgaattttatgaaatccccgttccattcaacaggcacatgtttaaaagagctttgtcgttggtgttaatgggggaatgtgttccttcattgtatttgggccttttgtattgcactcttgatattaaattaaatgtgccttgaaa

SEQ ID NO: 422699 - DNA, 1759 bp, Homo sapiens
gcggagcggagccgtgcggcggggcggggccgggcggcggggcctggtttcctccctcagcgccattttgtggcagcgagacccacaaataaaggggagcgcaggggttgcggcgggactaggagcgcggcggggccggcggcagagctgtccggctgcgcggtggcccggggggcccgggcggcagggcaagcagcgcggcctcggcctatgcgaccggtggcgccggcgcggcttctgcctggagaggattcaagatgaccaacgaagaacctcttcccaagaaggttcgattgagtgaaacagacttcaaagttatggcaagagatgagttaattctaagatggaaacaatatgaagcatatgtacaagctttggagggcaagtacacagatcttaactctaatgatgtaactggcctaagagagtctgaagaaaaactaaagcaacaacagcaggagtctgcacgcagggaaaacatccttgtaatgcgactagcaaccaaggaacaagagatgcaagagtgtactactcaaatccagtacctcaagcaagtccagcagccgagcgttgcccaactgagatcaacaatggtagacccagcgatcaacttgtttttcctaaaaatgaaaggtgaactggaacagactaaagacaaactggaacaagcccaaaatgaactgagtgcctggaagtttacgcctgataggtaaacaaatcatactccccagtcaagacttccctgacagtcccactacgagaaagctgtggtgggacagccaagtactcgtttccacaccaagactcagactttttgagccaaaaaaaagccacattcttacactgtccagcttgtaatggttaatgtaaaacttaccagatgaaccttgtgtttcagcttttttcttttccccttccccttgcttcagaggcctgatggcgtcggactattccgaagaagtggccacctccgaaaaattccccttctagaacatgtagacacttgagaaatgtttctgtttgaagaaaatagagggagaaacagaagtcttaagtctgtggcacactgtgtcttcagacagtttgaaggaatgaaaacctagagattttaaatcatgaattgaacatgtaaaattccagtaaaatgtaaaaacggaatatgcatcgctcttaaccttgagcatagtgacttagagacactgtgtatcagttttgccaataagactgtggacttcatgattgttgttgaacttctgggtcaaaactcaaatgaggtgaattttgcctttaaagggtttatttgctgagaaccaactttcaatagtcatgagagaatcaaataatagatgtccgtacaagtagcgcatatatttaaccatttagtttggggctctatattacttgcttgagccttaatcaatgtggttttattcaatggtttgttctttgaatggttgcaaaaactgtagataatcttactgaggactgtacaaacatgaaggtgtggtatcaaacttcaggttgaaactgtttgaagcattataaacattcatttcacaactagattgtataaggatattagctgtgatgagactcactgcattattttttttagtgaattttatgaaatccccgttccattcaacaggcacatgtttaaaagagctttgtcgttggtgttaatgggggaatgtgttccttcattgtatttgggccttttgtattgcactcttgatattaaattaaatgtgccttgaaa

SEQ ID NO: 422700 - DNA, 730 bp, Homo sapiens
gcggagcggagccgtgcggcggggcggggccgggcggcggggcctggtttcctccctcagcgccattttgtggcagcgagacccacaaataaaggggagcgcaggggttgcggcgggactaggagcgcggcggggccggcggcagagctgtccggctgcgcggtggcccggggggcccgggcggcagggcaagcagcgcggcctcggcctatgcgaccggtggcgccggcgcggcttctgcctggagaggattcaagatgaccaacgaagaacctcttcccaagaaggtatgggttttggttttgggtttttttgttttgttttgggttttttgggggcttttttaagcactttaaaaaaaaatagacttgaagggattatcgttgtttgcttatttttcatttctttgcctttataacaataatagcattggagttgtacagtgtgccagatattgtatcttatatccagtatattttttagaatattttcagattttggaaaactttagttataataatattcccatggtctactcttaatgttcattatgtgaatatttccaggtctactcttaatgttcattatgtaaatatttccaggtacatatatacaaataatgtcaaaaatggacattatgagtatattattattcttttcctagtgtaaatccctttgattgtaattaaaaactactttattaaaaaaatggttatagctaattttcaaa

SEQ ID NO: 422701 - DNA, 3381 bp, Homo sapiens
ttactttgtttccttttttatttacttttttggctatgtaaaactaaaagttcaaagacagagaaatcttgtctccaccccccactctttataggcaactaaaaatgttaagtttccaggatatccttccaattcctccccgaaaataagcatatacacataaatattcatattaaatataaatatatatttttatgtatttaagtaaatacataaaagcatatatgcttatttttgcttttgaatacagtgaatacttactacacttaaatatttaagtgaatacttaatacaacctgagactcattccaaagcaacacacgattatttcctgaatctttttaatggttgcattgtgttctactgtatggatgcaccattcccaatcagttccctattaacggatatttgggttatccctaacttttgctatgacaaatagcactgcaataaccttgtatacctattgtttccatgtgtggagctgcaccttcagaataaggttagggttagaagtataactgcaaggtataagaataaacacaagtaattttgtactccgtggaacttgaaccatttttccactcccaccaggaaaggtaatttcaacgtgtatttccattgtaagtgaggtggagcgactttctatgtttaaagaccattacggtattttttctgagaatcatctgttcatgtccttccccattttctcctttggcttttgcactttttgttttcaatttttgagagctcttgtgatacgagttgcaaagattttctccagaccgatctgattcactggaaatatactacgaccatctggaatgtactttaatcttatcctaataaatcaccttactacaagacactcctttggggatgaacaggtttgataaagccggctaaggacagaccaatcaaaagaattacgtgctcttctagtaagtgtttagagactgtttcacgttctccaggtaacaccgccattactcggcggtccagatggcagtcttacttcagggagtctactccacttgcaggacctctttgattgagttcactaaacctcacagggccgccttccccgtgttccagttagcaaggggccctcaacgccgcggacacagcgcaacctccgacgccagagaacaatagctcctcgatgcgtctccagagatgtcaaggaggaacgaacccagcggccaggagactgcgcctcacgactgatgagagggaaggcatcggtttctaagttctcaaaacttacaggtgagcttctgctaagagtaaacgcccgcggctcgccgcccacggcctctctcttgaggtggcacctggtcctccgacacgcggaagcatcacggatgagcgtcacgaacacagagcggccaatcacgcgccgccttcgcccagatccctccgcacgaggcagccccgcagccgcaggtggccccggcgagtacttccaccttcccttcccgtgatgccctggggctgacctccgacctcgctggcccgcccctcccctcggccgcttcccttactgagcttgctgagctccggggcccgcggagctcgcgccaggctcctgggaaaggacggggagtgttaccggggagcagctgctccattgtgcctcgaggccccgatcgggctaggccgacggcctccctcccttcacctttcctctcctggcggggttcggcggcgggcgagtgactgcggccacgcctgaaaggcgactctcctgattcaagatgaccaacgaagaacctcttcccaagaaggttcgattgagtgaaacagacttcaaagttatggcaagagatgagttaattctaagatggaaacaatatgaagcatatgtacaagctttggagggcaagtacacagatcttaactctaatgatgtaactggcctaagagagtctgaagaaaaactaaagcaacaacagcaggagtctgcacgcagggaaaacatccttgtaatgcgactagcaaccaaggaacaagagatgcaagagtgtactactcaaatccagtacctcaagcaagtccagcagccgagcgttgcccaactgagatcaacaatggtagacccagcgatcaacttgtttttcctaaaaatgaaaggtgaactggaacagactaaagacaaactggaacaagcccaaaatgaactgagtgcctggaagtttacgcctgataggtaaacaaatcatactccccagtcaagacttccctgacagtcccactacgagaaagctgtggtgggacagccaagtactcgtttccacaccaagactcagactttttgagccaaaaaaaagccacattcttacactgtccagcttgtaatggttaatgtaaaacttaccagatgaaccttgtgtttcagcttttttcttttccccttccccttgcttcagaggcctgatggcgtcggactattccgaagaagtggccacctccgaaaaattccccttctagaacatgtagacacttgagaaatgtttctgtttgaagaaaatagagggagaaacagaagtcttaagtctgtggcacactgtgtcttcagacagtttgaaggaatgaaaacctagagattttaaatcatgaattgaacatgtaaaattccagtaaaatgtaaaaacggaatatgcatcgctcttaaccttgagcatagtgacttagagacactgtgtatcagttttgccaataagactgtggacttcatgattgttgttgaacttctgggtcaaaactcaaatgaggtgaattttgcctttaaagggtttatttgctgagaaccaactttcaatagtcatgagagaatcaaataatagatgtccgtacaagtagcgcatatatttaaccatttagtttggggctctatattacttgcttgagccttaatcaatgtggttttattcaatggtttgttctttgaatggttgcaaaaactgtagataatcttactgaggactgtacaaacatgaaggtgtggtatcaaacttcaggttgaaactgtttgaagcattataaacattcatttcacaactagattgtataaggatattagctgtgatgagactcactgcattattttttttagtgaattttatgaaatccccgttccattcaacaggcacatgtttaaaagagctttgtcgttggtgttaatgggggaatgtgttccttcattgtatttgggccttttgtattgcactcttgatattaaattaaatgtgccttgaaatagttggtttttttttttttttaagttcaaagaatattatgatgattttgttgtactctttaacattttaatttggggcggggagggcctgttgagagcagattcattttggaaatactgtt

SEQ ID NO: 422702 - DNA, 3135 bp, Homo sapiens
ttactttgtttccttttttatttacttttttggctatgtaaaactaaaagttcaaagacagagaaatcttgtctccaccccccactctttataggcaactaaaaatgttaagtttccaggatatccttccaattcctccccgaaaataagcatatacacataaatattcatattaaatataaatatatatttttatgtatttaagtaaatacataaaagcatatatgcttatttttgcttttgaatacagtgaatacttactacacttaaatatttaagtgaatacttaatacaacctgagactcattccaaagcaacacacgattatttcctgaatctttttaatggttgcattgtgttctactgtatggatgcaccattcccaatcagttccctattaacggatatttgggttatccctaacttttgctatgacaaatagcactgcaataaccttgtatacctattgtttccatgtgtggagctgcaccttcagaataaggttagggttagaagtataactgcaaggtataagaataaacacaagtaattttgtactccgtggaacttgaaccatttttccactcccaccaggaaaggtaatttcaacgtgtatttccattgtaagtgaggtggagcgactttctatgtttaaagaccattacggtattttttctgagaatcatctgttcatgtccttccccattttctcctttggcttttgcactttttgttttcaatttttgagagctcttgtgatacgagttgcaaagattttctccagaccgatctgattcactggaaatatactacgaccatctggaatgtactttaatcttatcctaataaatcaccttactacaagacactcctttggggatgaacaggtttgataaagccggctaaggacagaccaatcaaaagaattacgtgctcttctagtaagtgtttagagactgtttcacgttctccaggtaacaccgccattactcggcggtccagatggcagtcttacttcagggagtctactccacttgcaggacctctttgattgagttcactaaacctcacagggccgccttccccgtgttccagttagcaaggggccctcaacgccgcggacacagcgcaacctccgacgccagagaacaatagctcctcgatgcgtctccagagatgtcaaggaggaacgaacccagcggccaggagactgcgcctcacgactgatgagagggaaggcatcggtttctaagttctcaaaacttacaggtgagcttctgctaagagtaaacgcccgcggctcgccgcccacggcctctctcttgaggtggcacctggtcctccgacacgcggaagcatcacggatgagcgtcacgaacacagagcggccaatcacgcgccgccttcgcccagatccctccgcacgaggcagccccgcagccgcaggtggccccggcgagtacttccaccttcccttcccgtgatgccctggggctgacctccgacctcgctggcccgcccctcccctcggccgcttcccttactgagcttgctgagctccggggcccgcggagctcgcgccaggctcctgggaaaggacggggagtgttaccggggagcagctgctccattgtgcctcgaggccccgatcgggctaggccgacggcctccctcccttcacctttcctctcctggcggggttcggcggcgggcgagtgactgcggccacgcctgaaaggcgactctcctgattcaagatgaccaacgaagaacctcttcccaagaaggttcgattgagtgaaacagacttcaaagttatggcaagagatgagttaattctaagatggaaacaatatgaagcatatgtacaagctttggagggcaagtacacagatcttaactctaatgatgtaactggcctaagagagtctgaagaaaaactaaagcaacaacagcaggagtctgcacgcagggaaaacatccttgtaatgcgactagcaaccaaggaacaagagatgcaagagtgtactactcaaatccagtacctcaagcaagtccagcagccgagcgttgcccaactgagatcaacaatggtagacccagcgatcaacttgtttttcctaaaaatgaaaggtgaactggaacagactaaagacaaactggaacaagcccaaaatgaactgagtgcctggaagtttacgcctgataggtaaacaaatcatactccccagtcaagacttccctgacagtcccactacgagaaagctgtggtgggacagccaagtactcgtttccacaccaagactcagactttttgagccaaaaaaaagccacattcttacactgtccagcttgtaatggttaatgtaaaacttaccagatgaaccttgtgtttcagcttttttcttttccccttccccttgcttcagaggcctgatggcgtcggactattccgaagaagtggccacctccgaaaaattccccttctagaacatgtagacacttgagaaatgtttctgtttgaagaaaatagagggagaaacagaagtcttaagtctgtggcacactgtgtcttcagacagtttgaaggaatgaaaacctagagattttaaatcatgaattgaacatgtaaaattccagtaaaatgtaaaaacggaatatgcatcgctcttaaccttgagcatagtgacttagagacactgtgtatcagttttgccaataagactgtggacttcatgattgttgttgaacttctgggtcaaaactcaaatgaggtgttgcttgagccttaatcaatgtggttttattcaatggtttgttctttgaatggttgcaaaaactgtagataatcttactgaggactgtacaaacatgaaggtgtggtatcaaacttcaggttgaaactgtttgaagcattataaacattcatttcacaactagattgtataaggatattagctgtgatgagactcactgcattattttttttagtgaattttatgaaatccccgttccattcaacaggcacatgtttaaaagagctttgtcgttggtgttaatgggggaatgtgttccttcattgtatttgggccttttgtattgcactcttgatattaaattaaatgtgccttgaaa

SEQ ID NO: 422703 - DNA, 1798 bp, Homo sapiens
agttcgacggagactctcttaggcagtacacagatcttaactctaatgatgtaactggcctaagagagtctgaagaaaaactaaagcaacaacagcaggagtctgcacgcagggaaaacatccttgtaatgcgactagcaaccaaggaacaagagatgcaagagtgtactactcaaatccagtacctcaagcaagtccagcagccgagcgttgcccaactgagatcaacaatggtagacccagcgatcaacttgtttttcctaaaaatgaaaggtgaactggaacagactaaagacaaactggaacaagcccaaaatgaactgagtgcctggaagtttacgcctgatagccaaacagggaaaaagttaatggcgaagtgtcgaatgcttatccaggagaatcaagagcttggaaggcagctgtcccagggacgtattgcacaacttgaagcagagttggctttacagaagaaatacagtgaggagcttaaaagcagtcaggatgaactgaatgacttcatcatccagcttgatgaagaagtagagggtatgcagagtaccattctagttctgcagcagcagctgaaggagacacgccagcagttggctcagtaccagcagcagcagtctcaggcctctgccccaagtaccagcaggactacagcttctgaacctgtagaacagtcagaggccacaagtaaagactgcagtcgtctgacaaacggaccaagtaatggtagctcctcccgccagaggacgtctgggtctggatttcacagggagggcaacacaaccgaagatgactttccttcttctccagggaatggtaataagtcctccaacagctcagaggagagaactggcagaggaggtagtggttacgtaaatcaactcagtgcggggtatgaaagtgtagactctcccacgggcagtgaaaactctctcacacaccaatcaaatgacacagactccagtcatgaccctcaagaggagaaagcagtgagtgggaaaggtaatcgaactgtgggttcccgccacgttcagaatggcttggactcaagtgtaaatgtacagggttcagttttgtaatattttttcagcaaatttttatacagtgtcatttaatttgggagaggatactgtccagaaaattaatgcatacttttgtcacaatttgcctttttgtgggtgtacgttttggtttttttttgttgttttttttctttgttttttcttttcttttctttttttttttttgcttcaatacttctgccgctttggaaattgtaacagttaattactttgaatgttgctaaaaggacattttgtgtagggtcaagttatttttatatgagttaatgtgaaattgtaaatggaaatttttccttaaaatacaacacaatgatgtctgtataaatctgtctgtttagaatctgtgctgtgtaagggcattcgtactcatgctgttactgtacttatgcaccattcagacttgttagagtagatgtgggtttatgactgccaagtttgcccagtacagtagttttttatcactaaaagttggactcattgatggagtcctgtagtagtttcagtgttagatacagttttttccaccatacatctgtgcattttctctttaggtgactgtttaagaaatttgtgtgcatagttactcagtttttatgaactgttgtatcctgttaatgcatattgctctgtgactccagtatatcttacctgtactgaccaaacctaaataaagatttttattgtaactccttaaaaaagcttttttg

SEQ ID NO: 422704 - DNA, 1543 bp, Homo sapiens
  misc_feature (22)..(22): n is a, c, g, or t
tccgacggcagtacccgcgtanggtagcgaggctgggtggcgtgaccaacgaagaagctcttcccaagaaggttcgattgagtgaaacagacttcaaagttatggcaagagatgagttaattctaagatggaaacaatatgaagcatatgtacaagctttggagggcaagtacacagatcttaactctaatgatgtaactggcctaagagagtctgaagaaaaactaaagcaacaacagcaggagtctgcacgcagggaaaacatccttgtaatgcgactagcaaccaaggaacaagagatgcaagagtgtactactcaaatccagtacctcaagcaagtccagcagccgagcgttgcccaactgagatcaacaatggtagacccagcgatcaacttgtttttcctaaaaatgaaaggtgaactggaacagactaaagacaaactggaacaagcccaaaatgaactgagtgcctggaagtttacgcctgataggtaaacaaatcatactccccagtcaagacttccctgacagtcccactacgagaaagctgtggtgggacagccaagtactcgtttccacaccaagactcagactttttgagccaaaaaaaagccacattcttacactgtccagcttgtaatggttaatgtaaaacttaccagatgaaccttgtgtttcagcttttttcttttccccttccccttgcttcagaggcctgatggcgtcggactattccgaagaagtggccacctccgaaaaattccccttctagaacatgtagacacttgagaaatgtttctgtttgaagaaaatagagggagaaacagaagtcttaagtctgtggcacactgtgtcttcagacagtttgaaggaatgaaaacctagagattttaaatcatgaattgaacatgtaaaattccagtaaaatgtaaaaacggaatatgcatcgctcttaaccttgagcatagtgacttagagacactgtgtatcagttttgccaataagactgtggacttcatgattgttgttgaacttctgggtcaaaactcaaatgaggtgaattttgcctttaaagggtttatttgctgagaaccaactttcaatagtcatgagagaatcaaataatagatgtccgtacaagtagcgcatatatttaaccatttagtttggggctctatattacttgcttgagccttaatcaatgtggttttattcaatggtttgttctttgaatggttgcaaaaactgtagataatcttactgaggactgtacaaacatgaaggtgtggtatcaaacttcaggttgaaactgtttgaagcattataaacattcatttcacaactagattgtataaggatattagctgtgatgagactcactgcattattttttttagtgaattttatgaaatccccgttccattcaacaggcacatgtttaaaagagctttgtcgttggtgttaatgggggaatgtgttccttcattgtatttgggccttttgtattgcactcttgatattaaattaaatgtgccttgaaa

SEQ ID NO: 422705 - DNA, 3604 bp, Homo sapiens
ttactttgtttccttttttatttacttttttggctatgtaaaactaaaagttcaaagacagagaaatcttgtctccaccccccactctttataggcaactaaaaatgttaagtttccaggatatccttccaattcctccccgaaaataagcatatacacataaatattcatattaaatataaatatatatttttatgtatttaagtaaatacataaaagcatatatgcttatttttgcttttgaatacagtgaatacttactacacttaaatatttaagtgaatacttaatacaacctgagactcattccaaagcaacacacgattatttcctgaatctttttaatggttgcattgtgttctactgtatggatgcaccattcccaatcagttccctattaacggatatttgggttatccctaacttttgctatgacaaatagcactgcaataaccttgtatacctattgtttccatgtgtggagctgcaccttcagaataaggttagggttagaagtataactgcaaggtataagaataaacacaagtaattttgtactccgtggaacttgaaccatttttccactcccaccaggaaaggtaatttcaacgtgtatttccattgtaagtgaggtggagcgactttctatgtttaaagaccattacggtattttttctgagaatcatctgttcatgtccttccccattttctcctttggcttttgcactttttgttttcaatttttgagagctcttgtgatacgagttgcaaagattttctccagaccgatctgattcactggaaatatactacgaccatctggaatgtactttaatcttatcctaataaatcaccttactacaagacactcctttggggatgaacaggtttgataaagccggctaaggacagaccaatcaaaagaattacgtgctcttctagtaagtgtttagagactgtttcacgttctccaggtaacaccgccattactcggcggtccagatggcagtcttacttcagggagtctactccacttgcaggacctctttgattgagttcactaaacctcacagggccgccttccccgtgttccagttagcaaggggccctcaacgccgcggacacagcgcaacctccgacgccagagaacaatagctcctcgatgcgtctccagagatgtcaaggaggaacgaacccagcggccaggagactgcgcctcacgactgatgagagggaaggcatcggtttctaagttctcaaaacttacaggtgagcttctgctaagagtaaacgcccgcggctcgccgcccacggcctctctcttgaggtggcacctggtcctccgacacgcggaagcatcacggatgagcgtcacgaacacagagcggccaatcacgcgccgccttcgcccagatccctccgcacgaggcagccccgcagccgcaggtggccccggcgagtacttccaccttcccttcccgtgatgccctggggctgacctccgacctcgctggcccgcccctcccctcggccgcttcccttactgagcttgctgagctccggggcccgcggagctcgcgccaggctcctgggaaaggacggggagtgttaccggggagcagctgctccattgtgcctcgaggccccgatcgggctaggccgacggcctccctcccttcacctttcctctcctggcggggttcggcggcgggcgagtgactgcggccacgcctgaaaggcgactctcctgattcaagatgaccaacgaagaacctcttcccaagaaggttcgattgagtgaaacagacttcaaagttatggcaagagatgagttaattctaagatggaaacaatatgaagcatatgtacaagctttggagggcaagtacacagatcttaactctaatgatgtaactggcctaagagagtctgaagaaaaactaaagcaacaacagcaggagtctgcacgcagggaaaacatccttgtaatgcgactagcaaccaaggaacaagagatgcaagagtgtactactcaaatccagtacctcaagcaagtccagcagccgagcgttgcccaactgagatcaacaatggtagacccagcgatcaacttgtttttcctaaaaatgaaaggtgaactggaacagactaaagacaaactggaacaagcccaaaatgaactgagtgcctggaagtttacgcctgatagccaaacagggaaaaagttaatggcgaagtgtcgaatgcttatccaggagaatcaagagcttggaaggcagctgtcccagggacgtattgcacaacttgaagcagagttggctttacagaagaaatacagtgaggagcttaaaagcagtcaggatgaactgaatgacttcatcatccagcttgatgaagaagtagagggtatgcagagtaccattctagttctgcagcagcagctgaaggagacacgccagcagttggctcagtaccagcagcagcagtctcaggcctctgccccaagtaccagcaggactacagcttctgaacctgtagaacagtcagaggccacaagtaaagactgcagtcgtctgacaaacggaccaagtaatggtagctcctcccgccagaggacgtctgggtctggatttcacagggagggcaacacaaccgaagatgactttccttcttctccagggaatggtaataagtcctccaacagctcagaggagagaactggcagaggaggtagtggttacgtaaatcaactcagtgcggggtatgaaagtgtagactctcccacgggcagtgaaaactctctcacacaccaatcaaatgacacagactccagtcatgaccctcaagaggagaaagcagtgagtgggaaaggtaatcgaactgtgggttcccgccacgttcagaatggcttggactcaagtgtaaatgtacagggttcagttttgtaatattttttcagcaaatttttatacagtgtcatttaatttgggagaggatactgtccagaaaattaatgcatacttttgtcacaatttgcctttttgtgggtgtacgttttggtttttttttgttgttttttttctttgttttttcttttcttttctttttttttttttgcttcaatacttctgccgctttggaaattgtaacagttaattactttgaatgttgctaaaaggacattttgtgtagggtcaagttatttttatatgagttaatgtgaaattgtaaatggaaatttttccttaaaatacaacacaatgatgtctgtataaatctgtctgtttagaatctgtgctgtgtaagggcattcgtactcatgctgttactgtacttatgcaccattcagacttgttagagtagatgtgggtttatgactgccaagtttgcccagtacagtagttttttatcattttttccaccatacatctgtgcattttctctttaggtgactgtttaagaaatttgtgtgcatagttactcagtttttatgaactgttgtatcctgttaatgcatattgctctgtgactccagtatatcttacctgtactgaccaaacctaaataaagatttttattgtaactccttaaaaaagcttttttg

SEQ ID NO: 422706 - DNA, 3039 bp, Homo sapiens
ttactttgtttccttttttatttacttttttggctatgtaaaactaaaagttcaaagacagagaaatcttgtctccaccccccactctttataggcaactaaaaatgttaagtttccaggatatccttccaattcctccccgaaaataagcatatacacataaatattcatattaaatataaatatatatttttatgtatttaagtaaatacataaaagcatatatgcttatttttgcttttgaatacagtgaatacttactacacttaaatatttaagtgaatacttaatacaacctgagactcattccaaagcaacacacgattatttcctgaatctttttaatggttgcattgtgttctactgtatggatgcaccattcccaatcagttccctattaacggatatttgggttatccctaacttttgctatgacaaatagcactgcaataaccttgtatacctattgtttccatgtgtggagctgcaccttcagaataaggttagggttagaagtataactgcaaggtataagaataaacacaagtaattttgtactccgtggaacttgaaccatttttccactcccaccaggaaaggtaatttcaacgtgtatttccattgtaagtgaggtggagcgactttctatgtttaaagaccattacggtattttttctgagaatcatctgttcatgtccttccccattttctcctttggcttttgcactttttgttttcaatttttgagagctcttgtgatacgagttgcaaagattttctccagaccgatctgattcactggaaatatactacgaccatctggaatgtactttaatcttatcctaataaatcaccttactacaagacactcctttggggatgaacaggtttgataaagccggctaaggacagaccaatcaaaagaattacgtgctcttctagtaagtgtttagagactgtttcacgttctccaggtaacaccgccattactcggcggtccagatggcagtcttacttcagggagtctactccacttgcaggacctctttgattgagttcactaaacctcacagggccgccttccccgtgttccagttagcaaggggccctcaacgccgcggacacagcgcaacctccgacgccagagaacaatagctcctcgatgcgtctccagagatgtcaaggaggaacgaacccagcggccaggagactgcgcctcacgactgatgagagggaaggcatcggtttctaagttctcaaaacttacaggtgagcttctgctaagagtaaacgcccgcggctcgccgcccacggcctctctcttgaggtggcacctggtcctccgacacgcggaagcatcacggatgagcgtcacgaacacagagcggccaatcacgcgccgccttcgcccagatccctccgcacgaggcagccccgcagccgcaggtggccccggcgagtacttccaccttcccttcccgtgatgccctggggctgacctccgacctcgctggcccgcccctcccctcggccgcttcccttactgagcttgctgagctccggggcccgcggagctcgcgccaggctcctgggaaaggacggggagtgttaccggggagcagctgctccattgtgcctcgaggccccgatcgggctaggccgacggcctccctcccttcacctttcctctcctggcggggttcggcggcgggcgagtgactgcggccacgcctgaaaggcgactctcctgattcaagatgaccaacgaagaacctcttcccaagaaggttcgattgagtgaaacagacttcaaagttatggcaagagatgagttaattctaagatggaaacaatatgaagcatatgtacaagctttggagggcaagtacacagatcttaactctaatgatgtaactggcctaagagagtctgaagaaaaactaaagcaacaacagcaggagtctgcacgcagggaaaacatccttgtaatgcgactagcaaccaaggaacaagagatgcaagagtgtactactcaaatccagtacctcaagcaagtccagcagccgagcgttgcccaactgagatcaacaatggtagacccagcgatcaacttgtttttcctaaaaatgaaaggtgaactggaacagactaaagacaaactggaacaagcccaaaatgaactgagtgcctggaagtttacgcctgatagaggcctgatggcgtcggactattccgaagaagtggccacctccgaaaaattccccttctagaacatgtagacacttgagaaatgtttctgtttgaagaaaatagagggagaaacagaagtcttaagtctgtggcacactgtgtcttcagacagtttgaaggaatgaaaacctagagattttaaatcatgaattgaacatgtaaaattccagtaaaatgtaaaaacggaatatgcatcgctcttaaccttgagcatagtgacttagagacactgtgtatcagttttgccaataagactgtggacttcatgattgttgttgaacttctgggtcaaaactcaaatgaggtgaattttgcctttaaagggtttatttgctgagaaccaactttcaatagtcatgagagaatcaaataatagatgtccgtacaagtagcgcatatatttaaccatttagtttggggctctatattacttgcttgagccttaatcaatgtggttttattcaatggtttgttctttgaatggttgcaaaaactgtagataatcttactgaggactgtacaaacatgaaggtgtggtatcaaacttcaggttgaaactgtttgaagcattataaacattcatttcacaactagattgtataaggatattagctgtgatgagactcactgcattattttttttagtgaattttatgaaatccccgttccattcaacaggcacatgtttaaaagagctttgtcgttggtgttaatgggggaatgtgttccttcattgtatttgggccttttgtattgcactcttgatattaaattaaatgtgccttgaaa

SEQ ID NO: 422707 - DNA, 2765 bp, Homo sapiens
ttactttgtttccttttttatttacttttttggctatgtaaaactaaaagttcaaagacagagaaatcttgtctccaccccccactctttataggcaactaaaaatgttaagtttccaggatatccttccaattcctccccgaaaataagcatatacacataaatattcatattaaatataaatatatatttttatgtatttaagtaaatacataaaagcatatatgcttatttttgcttttgaatacagtgaatacttactacacttaaatatttaagtgaatacttaatacaacctgagactcattccaaagcaacacacgattatttcctgaatctttttaatggttgcattgtgttctactgtatggatgcaccattcccaatcagttccctattaacggatatttgggttatccctaacttttgctatgacaaatagcactgcaataaccttgtatacctattgtttccatgtgtggagctgcaccttcagaataaggttagggttagaagtataactgcaaggtataagaataaacacaagtaattttgtactccgtggaacttgaaccatttttccactcccaccaggaaaggtaatttcaacgtgtatttccattgtaagtgaggtggagcgactttctatgtttaaagaccattacggtattttttctgagaatcatctgttcatgtccttccccattttctcctttggcttttgcactttttgttttcaatttttgagagctcttgtgatacgagttgcaaagattttctccagaccgatctgattcactggaaatatactacgaccatctggaatgtactttaatcttatcctaataaatcaccttactacaagacactcctttggggatgaacaggtttgataaagccggctaaggacagaccaatcaaaagaattacgtgctcttctagtaagtgtttagagactgtttcacgttctccaggtaacaccgccattactcggcggtccagatggcagtcttacttcagggagtctactccacttgcaggacctctttgattgagttcactaaacctcacagggccgccttccccgtgttccagttagcaaggggccctcaacgccgcggacacagcgcaacctccgacgccagagaacaatagctcctcgatgcgtctccagagatgtcaaggaggaacgaacccagcggccaggagactgcgcctcacgactgatgagagggaaggcatcggtttctaagttctcaaaacttacaggtgagcttctgctaagagtaaacgcccgcggctcgccgcccacggcctctctcttgaggtggcacctggtcctccgacacgcggaagcatcacggatgagcgtcacgaacacagagcggccaatcacgcgccgccttcgcccagatccctccgcacgaggcagccccgcagccgcaggtggccccggcgagtacttccaccttcccttcccgtgatgccctggggctgacctccgacctcgctggcccgcccctcccctcggccgcttcccttactgagcttgctgagctccggggcccgcggagctcgcgccaggctcctgggaaaggacggggagtgttaccggggagcagctgctccattgtgcctcgaggccccgatcgggctaggccgacggcctccctcccttcacctttcctctcctggcggggttcggcggcgggcgagtgactgcggccacgcctgaaaggcgactctcctgattcaagatgaccaacgaagaacctcttcccaagaaggttcgattgagtgaaacagacttcaaagttatggcaagagatgagttaattctaagatggaaacaatatgaagcatatgtacaagctttggagggcaagtacacagatcttaactctaatgatgtaactggcctaagagagtctgaagaaaaactaaagcaacaacagcaggagtctgcacgcagggaaaacatccttgtaatgcgactagcaaccaaggaacaagagatgcaagagtgtactactcaaatccagtacctcaagcaagtccagcagccgagcgttgcccaactgagatcaacaatggtagacccagcgatcaacttgtttttcctaaaaatgaaaggtgaactggaacagactaaagacaaactggaacaagcccaaaatgaactgagtgcctggaagtttacgcctgatagtggatgttcagtggaggctaacgcctgagagtgctgatgggaaatggtggaaatctggagctacagtagcagtgaacaagaacaccagctaataaagttatcatatcaaagaataaagcctttaccacatgctcactggtggctttcaccctcgggctcctctgagcagtagtaacccaggttgaactcttcaggtattttctggaagaaagcttaattacaaacttttccttgaattacattaggttagaaaacatgcagccaggcacggtggctcatgcctgtaatcccaacactttggaaggctgaggtaggcagatcacttgagcttaggagtttgagaccagcctgggcaacaaggcgaaaccccatctctactaaaaatccaaaattagctgggggtgctcgtgcacacctatagtccccaggtactccggaggctgaggtgggaggatcacctgagcctggggacgtcaaggctccagtgagctgagatcacgccactgcactccagcctggcaacacagtgagacccccatctcaaaaaaaaaaaaaa

SEQ ID NO: 422708 - DNA, 1219 bp, Homo sapiens
gtcctgccaaagaaagcagcagcgaataagtacgtggcagatggtgctgtcgaccagtgtcaagaccaagtttcatgggttcctggacgctcagccaggggtagtctctgaagggccgcctggcaattgggagcagaagccagtttcccgccatctgctctccgtggaggcagtgctctcgcggctgctgcccgttggggtccagctgaggaaggagcgcggatcccaggctcgttctttgcctgggctgcccctgcggcccctggggcgggtgctgctgcggcgccagctccaagggcggatccaggcgggaggggcctcctcggagaagcggggcgcggtcccaactacgcagaggctggcacgccgaccctccacacctcaccacgcccccatctccgtccgtgtacacacactcacacaaggacgccaaccccacctagatgcaaagcaggattcaaaagaacatctttgcgttttctaccggctccccatcatcgtactagggaggaagaagcgggtgagaaacaaaacttctttccattgtcctgcccgtttctgcggacttgttctgaggccgaggagcctgtgttggaagagatggtgatgggcctgggcgttttgttgttggtcttcgtgctgggtctgggtctgaccccaccgaccctggctcaggataactccaggtacacacacttcctgacccagcactatgatgccaaaccacagggccgggatgacagatactgtgaaagcatcatgaggagacggggcctgacctcaccctgcaaagacatcaacacatttattcatggcaacaagcgcagcatcaaggccatctgtgaaaacaagaatggaaaccctcacagagaaaacctaagaataagcaagtcttctttccaggtcaccacttgcaagctacatggaggttccccctggcctccatgccagtaccgagccacagcggggttcagaaacgttgttgttgcttgtgaaaatggcttacctgtccacttggatcagtcaattttccgtcgtccgtaaccagcgggcccctggtcaagtgctggctctgctgtccttgccttccatttcccctctgcacccagaacagtggtggcaacattcattgccaagggcccaaagaaagagctacctggaccttttgttttctgtttgacaacatgtttaataaataaaaatgtcttgatatcagtaa

SEQ ID NO: 422709 - DNA, 730 bp, Homo sapiens
tggagaggcctccaggttcacacaactggaacccatctccaggaacaaacagctggaacccatctcccgttgaagggaaactgccagatttttgagcctgtgttggaagagatggtgatgggcctgggcgttttgttgttggtcttcgtgctgggtctgggtctgaccccaccgaccctggctcaggataactccaggtacacacacttcctgacccagcactatgatgccaaaccacagggccgggatgacagatactgtgaaagcatcatgaggagacggggcctgacctcaccctgcaaagacatcaacacatttattcatggcaacaagcgcagcatcaaggccatctgtgaaaacaagaatggaaaccctcacagagaaaacctaagaataagcaagtcttctttccaggtcaccacttgcaagctacatggaggttccccctggcctccatgccagtaccgagccacagcggggttcagaaacgttgttgttgcttgtgaaaatggcttacctgtccacttggatcagtcaattttccgtcgtccgtaaccagcgggcccctggtcaagtgctggctctgctgtccttgccttccatttcccctctgcacccagaacagtggtggcaacattcattgccaagggcccaaagaaagagctacctggaccttttgttttctgtttgacaacatgtttaataaataaaaatgtcttgatatcagtaa

SEQ ID NO: 422710 - DNA, 1179 bp, Homo sapiens
tggagaggcctccaggttcacacaactggaacccatctccaggaacaaacagctggaacccatctcccgttgaagggaaactgccagatttttgtaagattcttcctcctgggagcctgtgttggaagagatggtgatgggcctgggcgttttgttgttggtcttcgtgctgggtctgggtctgaccccaccgaccctggctcaggataactccaggtacacacacttcctgacccagcactatgatgccaaaccacagggccgggatgacagatactgtgaaagcatcatgaggagacggggcctgacctcaccctgcaaagacatcaacacatttattcatggcaacaagcgcagcatcaaggccatctgtgaaaacaagaatggaaaccctcacagagaaaacctaagaataagcaagtcttctttccaggtcaccacttgcaagctacatggaggttccccctggcctccatgccagtaccgagccacagcggggttcagaaacgttgttgttgcttgtgaaaatggcttacctgtccacttggatcagtcaattttccgtcgtccgtaaccagcgggcccctggtcaagtgctggctctgctgtccttgccttccatttcccctctgcacccagaacagtggtggcaacattcattgccaagggcccaaagaaagagctacctggaccttttgttttctgtttgacaacatgtttaataaataaaaatgtcttgatatcagtaaaaaaaaaaaaaaaaaaaaaaaacgaaaatttttgttggggcgcgcgccttgggcctgagaaaaaaagtgtttcttatagaaacaccttttgcgtgttggggcggcgcgcgggggcgccaagtatgtgtataatgtgtaaacattgtggggcacatatagcgtgtgtcctctatataggagagatctcctggggcacattcgagagtatagtgtcgcttgggagttttctctttcaaccaaataaaaaaaaagcgcgccgggggggaggcaacacgcagacgtgttttttgtagaacaaaatcttccaagagatgggagagtgtctcgagaaggagtcaattaacgtggggattttataatctaataaagggagaggttccaagggaagacgtctgaaatttattaatattttactggccggggtgtggag

SEQ ID NO: 422711 - DNA, 1824 bp, Homo sapiens
gtcctgccaaagaaagcagcagcgaataagtacgtggcagatggtgctgtcgaccagtgtcaagaccaagtttcatgggttcctggacgctcagccaggggtagtctctgaagggccgcctggcaattgggagcagaagccagtttcccgccatctgctctccgtggaggcagtgctctcgcggctgctgcccgttggggtccagctgaggaaggagcgcggatcccaggctcgttctttgcctgggctgcccctgcggcccctggggcgggtgctgctgcggcgccagctccaagggcggatccaggcgggaggggcctcctcggagaagcggggcgcggtcccaactacgcagaggctggcacgccgaccctccacacctcaccacgcccccatctccgtccgtgtacacacactcacacaaggacgccaaccccacctagatgcaaagcaggattcaaaagaacatctttgcgttttctaccggctccccatcatcgtactagggaggaagaagcgggtgagaaacaaaacttctttccattgtcctgcccgtttctgcggacttgttctgaggccgaggcacctctaagatactgatggctctgcagaggacccattcattgcttctgcttttgctgctgaccctgctggggctggggctggtccagccctcctatggccaggatggcatgtaccagcgattcctgcggcaacacgtgcaccctgaggagacaggtggcagtgatcgctactgcaacttgatgatgcaaagacggaagatgactttgtatcactgcaagcgcttcaacaccttcatccatgaagatatctggaacattcgtagtatctgcagcaccaccaatatccaatgcaagaacggcaagatgaactgccatgagggtgtagtgaaggtcacagattgcagggacacaggaagttccagggcacccaactgcagatatcgggccatagcgagcactagacgtgttgtcattgcctgtgagggtaacccacaggtgcctgtgcactttgacggttagatgccaccatgtagggattatcgcgagtggttgaccttacacttactccttaaatagcagtgagtaatgcatttgagctgtcccaggctctgtctcctcagctcatttcctactctttttctctatataactcattctattaaatacattgcaccaaagagatatggagacataaacctgtaatgaatgaggctgggcttttctgtaataagcttccttttataatactggtcagcttagctctctcagatcctatcctgtggaatttagttattatgtgtatttatgtagtatttcaaacatttcaaaatgctttcatctatgtttatcacattttaataccacagcacttataatgatgtcactacatatagaagctcaaagttaagggatttgctgaagactgtaaagttaatggaagaattgagacaaaaatccagtgtagctggccacttatccagggctttttctacttcatcacaaggaatgttttgaaagtgtctgctttttttatccttaaaattcacctgtcagggaggcattaaaaatttggaaatgtatgccagcaaaatgtgagctctgtattttttggcattcttatgtttgggtttaataagattaagaaaatgatactgggaattttctttttcctgaaactttgaatcaccctagtaagtcaaagtactaaaaaatgtactagatcattaagacttatgtgctcttactgattgaaagattttttatgttttccttgtaataaaggacctaaaccgaaggtacc

SEQ ID NO: 422712 - DNA, 771 bp, Homo sapiens
tggagaggcctccaggttcacacaactggaacccatctccaggaacaaacagctggaacccatctcccgttgaagggaaactgccagatttttgtaagattcttcctcctgggagcctgtgttggaagagatggtgatgggcctgggcgttttgttgttggtcttcgtgctgggtctgggtctgaccccaccgaccctggctcaggataactccaggtacacacacttcctgacccagcactatgatgccaaaccacagggccgggatgacagatactgtgaaagcatcatgaggagacggggcctgacctcaccctgcaaagacatcaacacatttattcatggcaacaagcgcagcatcaaggccatctgtgaaaacaagaatggaaaccctcacagagaaaacctaagaataagcaagtcttctttccaggtcaccacttgcaagctacatggaggttccccctggcctccatgccagtaccgagccacagcggggttcagaaacgttgttgttgcttgtgaaaatggcttacctgtccacttggatcagtcaattttccgtcgtccgtaaccagcgggcccctggtcaagtgctggctctgctgtccttgccttccatttcccctctgcacccagaacagtggtggcaacattcattgccaagggcccaaagaaagagctacctggaccttttgttttctgtttgacaacatgtttaataaataaaaatgtcttgatatcagtaataagaatcagagtcttctcact

SEQ ID NO: 422713 - DNA, 1154 bp, Homo sapiens
gggtataaaaatttattatacataaaggatattaccactaacaaatgcagacaggctaggacatggtactgggtggaggacggctagctctttggaaagtgaaaggtttgggtggcgtgggcctcatgccacactgattggtcagtagacagggggcacatgccaaacaccacagggcatcagatgctgctctgtgtgctcacaagtgttccctgtcttatctgggccttcgaagggagcacacccagaagcgagcaactgaagcgaaggggcttcctaaggtgccccttccaggcttgtctctgaagtcacagcaacactgttttaagcagtatgtttaattggatgatttccacaaactatccacgaagtttctaaccatcacaattcagtgaagtacaaaacactgagttacaggctgtgggaagagaaggcagcaccaatggtggcaccttctaatactggttgttctaggggcagggagagggaaaggtctttttttaaaccaagcccctcatttcaatgtacaaaagaattactctgatcgatattaaatcgtattgaaaacaaaatggactaaaaagcaaatactactctatgttggggtggaagtgggaggaaagaattgagacaaaaatccagtgtagctggccacttatccagggctttttctacttcatcacaaggaatgttttgaaagtgtctgctttttttatccttaaaattcacctgtcagggaggcattaaaaatttggaaatgtatgccagcaaaatgtgagctctgtattttttggcattcttatgtttgggtttaataagattaagaaaatgatactgggaattttctttttcctgaaactttgaatcaccctagtaagtcaaagtactaaaaaatgtactagatcattaagacttatgtgctcttactgattgaaagattttttatgttttccttgtaataaaggacctaaaccgaaggtaccaaaaaattgggtgtgaggagttcagttatatgtttgggattttttaggtagtgggtgttgagcttgaacgctttcttaattggtggctgcttttaggcctactatgggtgttaaattttttactctctctacaaggttttttcctagtgtccaaagagctgttcctctttg

SEQ ID NO: 422714 - DNA, 764 bp, Homo sapiens
tggagaggcctccaggttcacacaactggaacccatctccaggaacaaacagctggaacccatctcccgttgaagggaaactgccagatttttgagcctgtgttggaagagatggtgatgggcctgggcgttttgttgttggtcttcgtgctgggtctgggtctgaccccaccgaccctggctcaggataactccaggtacacacacttcctgacccagcactatgatgccaaaccacagggccgggatgacagatactgtgaaagcatcatgaggagacggggcctgacctcaccctgcaaagacatcaacacatttattcatggcaacaagcgcagcatcaaggccatctgtgaaaacaagaatggaaaccctcacagagaaaacctaagaataagcaagtcttctttccaggtcaccacttgcaagctacatggaggttccccctggcctccatgccagtaccgagccacagcggggttcagaaacgttgttgttgcttgtgaaaatggcttacctgtccacttggatcagtcaattttccgtcgtccgtaaccagcgggcccctggtcaagtgctggctctgctgtccttgccttccatttcccctctgcacccagaacagtggtggcaacattcattgccaagggcccaaagaaagagctacctggaccttttgttttctgtttgacaacatgtttaataaataaaaatgtcttgatatcagtaataaaaaacacaacgcacacataatacaatcaaaa

SEQ ID NO: 422715 - DNA, 1762 bp, Homo sapiens
gtcctgccaaagaaagcagcagcgaataagtacgtggcagatggtgctgtcgaccagtgtcaagaccaagtttcatgggttcctggacgctcagccaggggtagtctctgaagggccgcctggcaattgggagcagaagccagtttcccgccatctgctctccgtggaggcagtgctctcgcggctgctgcccgttggggtccagctgaggaaggagcgcggatcccaggctcgttctttgcctgggctgcccctgcggcccctggggcgggtgctgctgcggcgccagctccaagggcggatccaggcgggaggggcctcctcggagaagcggggcgcggtcccaactacgcagaggctggcacgccgaccctccacacctcaccacgcccccatctccgtccgtgtacacacactcacacaaggacgccaaccccacctagatgcaaagcaggattcaaaagaacatctttgcgttttctaccggctccccatcatcgtactagggaggaagaagcgggcacctctaagatactgatggctctgcagaggacccattcattgcttctgcttttgctgctgaccctgctggggctggggctggtccagccctcctatggccaggatggcatgtaccagcgattcctgcggcaacacgtgcaccctgaggagacaggtggcagtgatcgctactgcaacttgatgatgcaaagacggaagatgactttgtatcactgcaagcgcttcaacaccttcatccatgaagatatctggaacattcgtagtatctgcagcaccaccaatatccaatgcaagaacggcaagatgaactgccatgagggtgtagtgaaggtcacagattgcagggacacaggaagttccagggcacccaactgcagatatcgggccatagcgagcactagacgtgttgtcattgcctgtgagggtaacccacaggtgcctgtgcactttgacggttagatgccaccatgtagggattatcgcgagtggttgaccttacacttactccttaaatagcagtgagtaatgcatttgagctgtcccaggctctgtctcctcagctcatttcctactctttttctctatataactcattctattaaatacattgcaccaaagagatatggagacataaacctgtaatgaatgaggctgggcttttctgtaataagcttccttttataatactggtcagcttagctctctcagatcctatcctgtggaatttagttattatgtgtatttatgtagtatttcaaacatttcaaaatgctttcatctatgtttatcacattttaataccacagcacttataatgatgtcactacatatagaagctcaaagttaagggatttgctgaagactgtaaagttaatggaagaattgagacaaaaatccagtgtagctggccacttatccagggctttttctacttcatcacaaggaatgttttgaaagtgtctgctttttttatccttaaaattcacctgtcagggaggcattaaaaatttggaaatgtatgccagcaaaatgtgagctctgtattttttggcattcttatgtttgggtttaataagattaagaaaatgatactgggaattttctttttcctgaaactttgaatcaccctagtaagtcaaagtactaaaaaatgtactagatcattaagacttatgtgctcttactgattgaaagattttttatgttttccttgtaataaaggacctaaaccgaaggtacc

SEQ ID NO: 422716 - DNA, 1928 bp, Homo sapiens
gtcctgccaaagaaagcagcagcgaataagtacgtggcagatggtgctgtcgaccagtgtcaagaccaagtttcatgggttcctggacgctcagccaggggtagtctctgaagggccgcctggcaattgggagcagaagccagtttcccgccatctgctctccgtggaggcagtgctctcgcggctgctgcccgttggggtccagctgaggaaggagcgcggatcccaggctcgttctttgcctgggctgcccctgcggcccctggggcgggtgctgctgcggcgccagctccaagggcggatccaggcgggaggggcctcctcggagaagcggggcgcggtcccaactacgcagaggctggcacgccgaccctccacacctcaccacgcccccatctccgtccgtgtacacacactcacacaaggacgccaaccccacctagatgcaaagcaggattcaaaagaacatctttgcgttttctaccggctccccatcatcgtactagggaggaagaagcgggtgagaaacaaaacttctttccattgtcctgcccgtttctgcggacttgttctgaggccgaggagcctgtgttggaagagatggtgatgggcctgggcgttttgttgttggtcttcgtgctgggtctgggtctgaccccaccgaccctggctcaggataactccaggcacctctaagatactgatggctctgcagaggacccattcattgcttctgcttttgctgctgaccctgctggggctggggctggtccagccctcctatggccaggatggcatgtaccagcgattcctgcggcaacacgtgcaccctgaggagacaggtggcagtgatcgctactgcaacttgatgatgcaaagacggaagatgactttgtatcactgcaagcgcttcaacaccttcatccatgaagatatctggaacattcgtagtatctgcagcaccaccaatatccaatgcaagaacggcaagatgaactgccatgagggtgtagtgaaggtcacagattgcagggacacaggaagttccagggcacccaactgcagatatcgggccatagcgagcactagacgtgttgtcattgcctgtgagggtaacccacaggtgcctgtgcactttgacggttagatgccaccatgtagggattatcgcgagtggttgaccttacacttactccttaaatagcagtgagtaatgcatttgagctgtcccaggctctgtctcctcagctcatttcctactctttttctctatataactcattctattaaatacattgcaccaaagagatatggagacataaacctgtaatgaatgaggctgggcttttctgtaataagcttccttttataatactggtcagcttagctctctcagatcctatcctgtggaatttagttattatgtgtatttatgtagtatttcaaacatttcaaaatgctttcatctatgtttatcacattttaataccacagcacttataatgatgtcactacatatagaagctcaaagttaagggatttgctgaagactgtaaagttaatggaagaattgagacaaaaatccagtgtagctggccacttatccagggctttttctacttcatcacaaggaatgttttgaaagtgtctgctttttttatccttaaaattcacctgtcagggaggcattaaaaatttggaaatgtatgccagcaaaatgtgagctctgtattttttggcattcttatgtttgggtttaataagattaagaaaatgatactgggaattttctttttcctgaaactttgaatcaccctagtaagtcaaagtactaaaaaatgtactagatcattaagacttatgtgctcttactgattgaaagattttttatgttttccttgtaataaaggacctaaaccgaaggtacc

SEQ ID NO: 422717 - DNA, 1354 bp, Homo sapiens
tggagaggcctccaggttcacacaactggaacccatctccaggaacaaacagctggaacccatctcccgttgaagggaaactgccagatttttgtaagattcttcctcctgggcacctctaagatactgatggctctgcagaggacccattcattgcttctgcttttgctgctgaccctgctggggctggggctggtccagccctcctatggccaggatggcatgtaccagcgattcctgcggcaacacgtgcaccctgaggagacaggtggcagtgatcgctactgcaacttgatgatgcaaagacggaagatgactttgtatcactgcaagcgcttcaacaccttcatccatgaagatatctggaacattcgtagtatctgcagcaccaccaatatccaatgcaagaacggcaagatgaactgccatgagggtgtagtgaaggtcacagattgcagggacacaggaagttccagggcacccaactgcagatatcgggccatagcgagcactagacgtgttgtcattgcctgtgagggtaacccacaggtgcctgtgcactttgacggttagatgccaccatgtagggattatcgcgagtggttgaccttacacttactccttaaatagcagtgagtaatgcatttgagctgtcccaggctctgtctcctcagctcatttcctactctttttctctatataactcattctattaaatacattgcaccaaagagatatggagacataaacctgtaatgaatgaggctgggcttttctgtaataagcttccttttataatactggtcagcttagctctctcagatcctatcctgtggaatttagttattatgtgtatttatgtagtatttcaaacatttcaaaatgctttcatctatgtttatcacattttaataccacagcacttataatgatgtcactacatatagaagctcaaagttaagggatttgctgaagactgtaaagttaatggaagaattgagacaaaaatccagtgtagctggccacttatccagggctttttctacttcatcacaaggaatgttttgaaagtgtctgctttttttatccttaaaattcacctgtcagggaggcattaaaaatttggaaatgtatgccagcaaaatgtgagctctgtattttttggcattcttatgtttgggtttaataagattaagaaaatgatactgggaattttctttttcctgaaactttgaatcaccctagtaagtcaaagtactaaaaaatgtactagatcattaagacttatgtgctcttactgattgaaagattttttatgttttccttgtaataaaggacctaaaccgaaggtacc

SEQ ID NO: 422718 - DNA, 620 bp, Homo sapiens
tggagaggcctccaggttcacacaactggaacccatctccaggaacaaacagctggaacccatctcccgttgaagggaaactgccagatttttgtaagattcttcctcctggtatgatgccaaaccacagggccgggatgacagatactgtgaaagcatcatgaggagacggggcctgacctcaccctgcaaagacatcaacacatttattcatggcaacaagcgcagcatcaaggccatctgtgaaaacaagaatggaaaccctcacagagaaaacctaagaataagcaagtcttctttccaggtcaccacttgcaagctacatggaggttccccctggcctccatgccagtaccgagccacagcggggttcagaaacgttgttgttgcttgtgaaaatggcttacctgtccacttggatcagtcaattttccgtcgtccgtaaccagcgggcccctggtcaagtgctggctctgctgtccttgccttccatttcccctctgcacccagaacagtggtggcaacattcattgccaagggcccaaagaaagagctacctggaccttttgttttctgtttgacaacatgtttaataaataaaaatgtcttgatatcagtaa

SEQ ID NO: 422719 - DNA, 1267 bp, Homo sapiens
gtcctgccaaagaaagcagcagcgaataagtacgtggcagatggtgctgtcgaccagtgtcaagaccaagtttcatgggttcctggacgctcagccaggggtagtctctgaagggccgcctggcaattgggagcagaagccagtttcccgccatctgctctccgtggaggcagtgctctcgcggctgctgcccgttggggtccagctgaggaaggagcgcggatcccaggctcgttctttgcctgggctgcccctgcggcccctggggcgggtgctgctgcggcgccagctccaagggcggatccaggcgggaggggcctcctcggagaagcggggcgcggtcccaactacgcagaggctggcacgccgaccctccacacctcaccacgcccccatctccgtccgtgtacacacactcacacaaggacgccaaccccacctagatgcaaagcaggattcaaaagaacatctttgcgttttctaccggctccccatcatcgtactagggaggaagaagcgggtgagaaacaaaacttctttccattgtcctgcccgtttctgcggacttgttctgaggccgaggagcctgtgttggaagagatggtgatgggcctgggcgttttgttgttggtcttcgtgctgggtctgggtctgaccccaccgaccctggctcaggataactccaggtacacacacttcctgacccagcactatgatgccaaaccacagggccgggatgacagatactgtgaaagcatcatgaggagacggggcctgacctcaccctgcaaagacatcaacacatttattcatggcaacaagcgcagcatcaaggccatctgtgaaaacaagaatggaaaccctcacagagaaaacctaagaataagcaagtcttctttccaggtcaccacttgcaagctacatggaggttccccctggcctccatgccagtaccgagccacagcggggttcagaaacgttgttgttgcttgtgaaaatggcttacctgtccacttggatcagtcaattttccgtcgtccgtaaccagcgggcccctggtcaagtgctggctctgctgtccttgccttccatttcccctctgcacccagaacagtggtggcaacattcattgccaagggcccaaagaaagcaacctgtggactagtagccaaccgtggactagtagccaaccgtggactagtagccaaccgtgtcctagttgtcaccaggggtcgtagttggttaccagggtcgtagtttgtaacca

SEQ ID NO: 422720 - DNA, 749 bp, Homo sapiens
tggagaggcctccaggttcacacaactggaacccatctccaggaacaaacagctggaacccatctcccgttgaagggaaactgccagatttttgtaagattcttcctcctgggagcctgtgttggaagagatggtgatgggcctgggcgttttgttgttggtcttcgtgctgggtctgggtctgaccccaccgaccctggctcaggataactccaggtacacacacttcctgacccagcactatgatgccaaaccacagggccgggatgacagatactgtgaaagcatcatgaggagacggggcctgacctcaccctgcaaagacatcaacacatttattcatggcaacaagcgcagcatcaaggccatctgtgaaaacaagaatggaaaccctcacagagaaaacctaagaataagcaagtcttctttccaggtcaccacttgcaagctacatggaggttccccctggcctccatgccagtaccgagccacagcggggttcagaaacgttgttgttgcttgtgaaaatggcttacctgtccacttggatcagtcaattttccgtcgtccgtaaccagcgggcccctggtcaagtgctggctctgctgtccttgccttccatttcccctctgcacccagaacagtggtggcaacattcattgccaagggcccaaagaaagagctacctggaccttttgttttctgtttgacaacatgtttaataaataaaaatgtcttgatatcagtaa

SEQ ID NO: 422721 - DNA, 1649 bp, Homo sapiens
gtcctgccaaagaaagcagcagcgaataagtacgtggcagatggtgctgtcgaccagtgtcaagaccaagtttcatgggttcctggacgctcagccaggggtagtctctgaagggccgcctggcaattgggagcagaagccagtttcccgccatctgctctccgtggaggcagtgctctcgcggctgctgcccgttggggtccagctgaggaaggagcgcggatcccaggctcgttctttgcctgggctgcccctgcggcccctggggcgggtgctgctgcggcgccagctccaagggcggatccaggcgggaggggcctcctcggagaagcggggcgcggtcccaactacgcagaggctggcacgccgaccctccacacctcaccacgcccccatctccgtccgtgtacacacactcacacaaggacgccaaccccacctagatgcaaagcaggattcaaaagaacatctttgcgttttctaccggctccccatcatcgtactagggaggaagaagcgggtgagaaacaaaacttctttccattgtcctgcccgtttctgcggacttgttctgaggccgaggagcctgtgttggaagagatggtgatgggcctgggcgttttgttgttggtcttcgtgctgggtctgggtctgaccccaccgaccctggctcaggataactccaggtacacacacttcctgacccagcactatgatgccaaaccacagggccgggatgacagatactgtgaaagcatcatgaggagacggggcctgacctcaccctgcaaagacatcaacacatttattcatggcaacaagcgcagcatcaaggccatctgtgaaaacaagaatggaaaccctcacagagaaaacctaagaataagcaagtcttctttccaggtcaccacttgcaagctacatggaggttccccctggcctccatgccagtaccgagccacagcggggttcagaaacgttgttgttgcttgtgaaaatggcttacctgtccacttggatcagtcaattttccgtcgtccgtaaccagcgggcccctggtcaagtgctggctctgctgtccttgccttccatttcccctctgcacccagaacagtggtggcaacattcattgccaagggcccaaagaaagagctacctggaccttttgttttctgtttgacaacatgtttaataaataaaaatgtcttgatatcagtaaaaaaaaaaaaaaaaaaaaaaaacgaaaatttttgttggggcgcgcgccttgggcctgagaaaaaaagtgtttcttatagaaacaccttttgcgtgttggggcggcgcgcgggggcgccaagtatgtgtataatgtgtaaacattgtggggcacatatagcgtgtgtcctctatataggagagatctcctggggcacattcgagagtatagtgtcgcttgggagttttctctttcaaccaaataaaaaaaaagcgcgccgggggggaggcaacacgcagacgtgttttttgtagaacaaaatcttccaagagatgggagagtgtctcgagaaggagtcaattaacgtggggattttataatctaataaagggagaggttccaagggaagacgtctgaaatttattaatattttactggccggggtgtggag

SEQ ID NO: 422722 - DNA, 1160 bp, Homo sapiens
tggagaggcctccaggttcacacaactggaacccatctccaggaacaaacagctggaacccatctcccgttgaagggaaactgccagatttttgagcctgtgttggaagagatggtgatgggcctgggcgttttgttgttggtcttcgtgctgggtctgggtctgaccccaccgaccctggctcaggataactccaggtacacacacttcctgacccagcactatgatgccaaaccacagggccgggatgacagatactgtgaaagcatcatgaggagacggggcctgacctcaccctgcaaagacatcaacacatttattcatggcaacaagcgcagcatcaaggccatctgtgaaaacaagaatggaaaccctcacagagaaaacctaagaataagcaagtcttctttccaggtcaccacttgcaagctacatggaggttccccctggcctccatgccagtaccgagccacagcggggttcagaaacgttgttgttgcttgtgaaaatggcttacctgtccacttggatcagtcaattttccgtcgtccgtaaccagcgggcccctggtcaagtgctggctctgctgtccttgccttccatttcccctctgcacccagaacagtggtggcaacattcattgccaagggcccaaagaaagagctacctggaccttttgttttctgtttgacaacatgtttaataaataaaaatgtcttgatatcagtaaaaaaaaaaaaaaaaaaaaaaaacgaaaatttttgttggggcgcgcgccttgggcctgagaaaaaaagtgtttcttatagaaacaccttttgcgtgttggggcggcgcgcgggggcgccaagtatgtgtataatgtgtaaacattgtggggcacatatagcgtgtgtcctctatataggagagatctcctggggcacattcgagagtatagtgtcgcttgggagttttctctttcaaccaaataaaaaaaaagcgcgccgggggggaggcaacacgcagacgtgttttttgtagaacaaaatcttccaagagatgggagagtgtctcgagaaggagtcaattaacgtggggattttataatctaataaagggagaggttccaagggaagacgtctgaaatttattaatattttactggccggggtgtggag

SEQ ID NO: 422723 - DNA, 731 bp, Homo sapiens
atgatgccgtgtcagagagcaaagctcctgtccttttggcctaatttggtgatgctgttcttgggtctaccacacctccttttgccctccgcaggagcctgtgttggaagagatggtgatgggcctgggcgttttgttgttggtcttcgtgctgggtctgggtctgaccccaccgaccctggctcaggataactccaggtacacacacttcctgacccagcactatgatgccaaaccacagggccgggatgacagatactgtgaaagcatcatgaggagacggggcctgacctcaccctgcaaagacatcaacacatttattcatggcaacaagcgcagcatcaaggccatctgtgaaaacaagaatggaaaccctcacagagaaaacctaagaataagcaagtcttctttccaggtcaccacttgcaagctacatggaggttccccctggcctccatgccagtaccgagccacagcggggttcagaaacgttgttgttgcttgtgaaaatggcttacctgtccacttggatcagtcaattttccgtcgtccgtaaccagcgggcccctggtcaagtgctggctctgctgtccttgccttccatttcccctctgcacccagaacagtggtggcaacattcattgccaagggcccaaagaaagagctacctggaccttttgttttctgtttgacaacatgtttaataaataaaaatgtcttgatatcagtaa

SEQ ID NO: 422724 - DNA, 1161 bp, Homo sapiens
atgatgccgtgtcagagagcaaagctcctgtccttttggcctaatttggtgatgctgttcttgggtctaccacacctccttttgccctccgcaggagcctgtgttggaagagatggtgatgggcctgggcgttttgttgttggtcttcgtgctgggtctgggtctgaccccaccgaccctggctcaggataactccaggtacacacacttcctgacccagcactatgatgccaaaccacagggccgggatgacagatactgtgaaagcatcatgaggagacggggcctgacctcaccctgcaaagacatcaacacatttattcatggcaacaagcgcagcatcaaggccatctgtgaaaacaagaatggaaaccctcacagagaaaacctaagaataagcaagtcttctttccaggtcaccacttgcaagctacatggaggttccccctggcctccatgccagtaccgagccacagcggggttcagaaacgttgttgttgcttgtgaaaatggcttacctgtccacttggatcagtcaattttccgtcgtccgtaaccagcgggcccctggtcaagtgctggctctgctgtccttgccttccatttcccctctgcacccagaacagtggtggcaacattcattgccaagggcccaaagaaagagctacctggaccttttgttttctgtttgacaacatgtttaataaataaaaatgtcttgatatcagtaaaaaaaaaaaaaaaaaaaaaaaacgaaaatttttgttggggcgcgcgccttgggcctgagaaaaaaagtgtttcttatagaaacaccttttgcgtgttggggcggcgcgcgggggcgccaagtatgtgtataatgtgtaaacattgtggggcacatatagcgtgtgtcctctatataggagagatctcctggggcacattcgagagtatagtgtcgcttgggagttttctctttcaaccaaataaaaaaaaagcgcgccgggggggaggcaacacgcagacgtgttttttgtagaacaaaatcttccaagagatgggagagtgtctcgagaaggagtcaattaacgtggggattttataatctaataaagggagaggttccaagggaagacgtctgaaatttattaatattttactggccggggtgtggag

SEQ ID NO: 422725 - DNA, 828 bp, Homo sapiens
tggagaggcctccaggttcacacaactggaacccatctccaggaacaaacagctggaacccatctcccgttgaagggaaactgccagatttttgtaagattcttcctcctgggagcctgtgttggaagagatggtgatgggcctgggcgttttgttgttggtcttcgtgctgggtctgggtctgaccccaccgaccctggctcaggataactccaggtacacacacttcctgacccagcactatgatgccaaaccacagggccgggatgacagatactgtgaaagcatcatgaggagacggggcctgacctcaccctgcaaagacatcaacacatttattcatggcaacaagcgcagcatcaaggccatctgtgaaaacaagaatggaaaccctcacagatggaggttccccctggcctccatgccagtaccgagccacagcggggttcagaaacgttgttgttgcttgtgaaaatggcttacctgtccacttggatcagtcaattttccgtcgtccgtaaccagcgggcccctggtcaagtgctggctctgctgtccttgccttccatttcccctctgcacccagaacagtggtggcaacattcattgccaagggcccaaagaaaggatctgaccttgttctgtgcacctggctactcactgctattcgagaacaacacactggtgtcctctgcaactccttctcggtcagccggttcgatacggtgtataaccaagtgattgacagtaacatatcgtgggctttcctctcggacgcgcagcacacccaggccaccacgcgcatccgcgacgctccaccccgcgcgt

SEQ ID NO: 422726 - DNA, 1995 bp, Homo sapiens
gtcctgccaaagaaagcagcagcgaataagtacgtggcagatggtgctgtcgaccagtgtcaagaccaagtttcatgggttcctggacgctcagccaggggtagtctctgaagggccgcctggcaattgggagcagaagccagtttcccgccatctgctctccgtggaggcagtgctctcgcggctgctgcccgttggggtccagctgaggaaggagcgcggatcccaggctcgttctttgcctgggctgcccctgcggcccctggggcgggtgctgctgcggcgccagctccaagggcggatccaggcgggaggggcctcctcggagaagcggggcgcggtcccaactacgcagaggctggcacgccgaccctccacacctcaccacgcccccatctccgtccgtgtacacacactcacacaaggacgccaaccccacctagatgcaaagcaggattcaaaagaacatctttgcgttttctaccggctccccatcatcgtactagggaggaagaagcgggtgagaaacaaaacttctttccattgtcctgcccgtttctgcggacttgttctgaggccgaggcacctctaagatactgatggctctgcagaggacccattcattgcttctgcttttgctgctgaccctgctggggctggggctggtccagccctcctatggccaggatggcatgtaccagcgattcctgcggcaacacgtgcaccctgaggagacaggtggcagtgatcgctactgcaacttgatgatgcaaagacggaagatgactttgtatcactgcaagcgcttcaacaccttcatccatgaagatatctggaacattcgtagtatctgcagcaccaccaatatccaatgcaagaacggcaagatgaactgccatgagggtgtagtgaaggtcacagattgcagggacacaggaagttccagggcacccaactgcagatatcgggccatagcgagcactagacgtgttgtcattgcctgtgagggtaacccacaggtgcctgtgcactttgacggttagatgccaccatgtagggattatcgcgagtggttgaccttacacttactccttaaatagcagtgagtaatgcatttgagctgtcccaggctctgtctcctcagctcatttcctactctttttctctatataactcattctattaaatacattgcaccaaagagatatggagacataaacctgtaatgaatgaggctgggcttttctgtaataagcttccttttataatactggtcagcttagctctctcagatcctatcctgtggaatttagttattatgtgtatttatgtagtatttcaaacatttcaaaatgctttcatctatgtttatcacattttaataccacagcacttataatgatgtcactacatatagaagctcaaagttaagggatttgctgaagactgtaaagttaatggaagaattgagacaaaaatccagtgtagctggccacttatccagggctttttctacttcatcacaaggaatgttttgaaagtgtctgctttttttatccttaaaattcacctgtcagggaggcattaaaaatttggaaatgtatgccagcaaaatgtgagctctgtattttttggcattcttatgtttgggtttaataagattaagaaaatgatactgggaattttctttttcctgaaactttgaatcaccctagtaagtcaaagtactaaaaaatgtactagatcattaagacttatgtgctcttactgattgaaagattttttatgttttccttgtaataaaggacctaaaccgaaggtaccaaaaaattgggtgtgaggagttcagttatatgtttgggattttttaggtagtgggtgttgagcttgaacgctttcttaattggtggctgcttttaggcctactatgggtgttaaattttttactctctctacaaggttttttcctagtgtccaaagagctgttcctctttg

SEQ ID NO: 422727 - DNA, 1778 bp, Homo sapiens
gtcctgccaaagaaagcagcagcgaataagtacgtggcagatggtgctgtcgaccagtgtcaagaccaagtttcatgggttcctggacgctcagccaggggtagtctctgaagggccgcctggcaattgggagcagaagccagtttcccgccatctgctctccgtggaggcagtgctctcgcggctgctgcccgttggggtccagctgaggaaggagcgcggatcccaggctcgttctttgcctgggctgcccctgcggcccctggggcgggtgctgctgcggcgccagctccaagggcggatccaggcgggaggggcctcctcggagaagcggggcgcggtcccaactacgcagaggctggcacgccgaccctccacacctcaccacgcccccatctccgtccgtgtacacacactcacacaaggacgccaaccccacctagatgcaaagcaggattcaaaagaacatctttgcgttttctaccggctccccatcatcgtactagggaggaagaagcgggtgagaaacaaaacttctttccattgtcctgcccgtttctgcggacttgttctgaggccgaggcacctctaagatactgatggctctgcagaggacccattcattgcttctgcttttgctgctgaccctgctggggctggggctggtccagccctcctatggccaggatggcatgtaccagcgattcctgcggcaacacgtgcaccctgaggagacaggtggcagtgatcgctactgcaacttgatgatgcaaagacggaagatatctggaacattcgtagtatctgcagcaccaccaatatccaatgcaagaacggcaagatgaactgccatgagggtgtagtgaaggtcacagattgcagggacacaggaagttccagggcacccaactgcagatatcgggccatagcgagcactagacgtgttgtcattgcctgtgagggtaacccacaggtgcctgtgcactttgacggttagatgccaccatgtagggattatcgcgagtggttgaccttacacttactccttaaatagcagtgagtaatgcatttgagctgtcccaggctctgtctcctcagctcatttcctactctttttctctatataactcattctattaaatacattgcaccaaagagatatggagacataaacctgtaatgaatgaggctgggcttttctgtaataagcttccttttataatactggtcagcttagctctctcagatcctatcctgtggaatttagttattatgtgtatttatgtagtatttcaaacatttcaaaatgctttcatctatgtttatcacattttaataccacagcacttataatgatgtcactacatatagaagctcaaagttaagggatttgctgaagactgtaaagttaatggaagaattgagacaaaaatccagtgtagctggccacttatccagggctttttctacttcatcacaaggaatgttttgaaagtgtctgctttttttatccttaaaattcacctgtcagggaggcattaaaaatttggaaatgtatgccagcaaaatgtgagctctgtattttttggcattcttatgtttgggtttaataagattaagaaaatgatactgggaattttctttttcctgaaactttgaatcaccctagtaagtcaaagtactaaaaaatgtactagatcattaagacttatgtgctcttactgattgaaagattttttatgttttccttgtaataaaggacctaaaccgaaggtacc

SEQ ID NO: 422728 - DNA, 1166 bp, Homo sapiens
gtcctgccaaagaaagcagcagcgaataagtacgtggcagatggtgctgtcgaccagtgtcaagaccaagtttcatgggttcctggacgctcagccaggggtagtctctgaagggccgcctggcaattgggagcagaagccagtttcccgccatctgctctccgtggaggcagtgctctcgcggctgctgcccgttggggtccagctgaggaaggagcgcggatcccaggctcgttctttgcctgggctgcccctgcggcccctggggcgggtgctgctgcggcgccagctccaagggcggatccaggcgggaggggcctcctcggagaagcggggcgcggtcccaactacgcagaggctggcacgccgaccctccacacctcaccacgcccccatctccgtccgtgtacacacactcacacaaggacgccaaccccacctagatgcaaagcaggattcaaaagaacatctttgcgttttctaccggctccccatcatcgtactagggaggaagaagcgggtgagaaacaaaacttctttccattgtcctgcccgtttctgcggacttgttctgaggccgaggagcctgtgttggaagagatggtgatgggcctgggcgttttgttgttggtcttcgtgctgggtctgggtctgaccccaccgaccctggctcaggataactccaggtacacacacttcctgacccagcactatgatgccaaaccacagggccgggatgacagatactgtgaaagcatcatgaggagacggggcctgacctcaccctgcaaagacatcaacacatttattcatggcaacaagcgcagcatcaaggccatctgtgaaaacaagaatggaaaccctcacagatggaggttccccctggcctccatgccagtaccgagccacagcggggttcagaaacgttgttgttgcttgtgaaaatggcttacctgtccacttggatcagtcaattttccgtcgtccgtaaccagcgggcccctggtcaagtgctggctctgctgtccttgccttccatttcccctctgcacccagaacagtggtggcaacattcattgccaagggcccaaagaaagagctacctggaccttttgttttctgtttgacaacatgtttaataaataaaaatgtcttgatatcagtaa

SEQ ID NO: 422729 - DNA, 417 bp, Homo sapiens
ggacatttgggttggttccaagtctttgctattgtgaatagtaccgcaataaacatacgtgtgcatgtgtctgcctgacaaaaaaaaggccaaaactatttggcccacctctgcaactgaaaccacagttccttcccattcacaaaggctgtatttccctttatttttcttgctctccattgtgctccttttttcaaaaaaaaaaactcatctgagggcaagatcaggagcctcttgcggccacagaaacacccaaagtgcctgcaccaatacagactttcacaaacatcaaatatgagaggaattaaaaaaatgagatttttttccatttggtctttactgaatcttcagtcattttaggcacatgacattacttatttgtgtcaattcttacctcctttccctcaaaccttttcc

SEQ ID NO: 422730 - DNA, 1172 bp, Homo sapiens
cgctccagagttcagccccgagccgcgcgagtcgactcacctacctcttttcaagccggcctagccccttcccggaacctcggctcccccccaacgaaactactgctaagccaactggactacacttcccagactgcttggagcctctctctccgcagaacctcgtcttccgcgagcttttcctggaggttctaggagggatgcccctcaatgccacgacgccatttcctactacgacttccatcatgctccgcgccgctccgggggcggtgacccctcttggcccacgtcttgtcagtgacgcacttcctgtcagtgacgcacttcccctctgctgggcgcgcggtggacggtctgaaagggagtgttcgggtttcgctggggcctcgcggctccagagcccagcatggcttcctcgcgagcctcttccacggcaaccaaaactaaagcacccgacgacttagttgctccggtcgtgaagaaaccacacatctattatggaagtttggaagagaaggagagggagcgtctggccaaaggagagtctgggattttggggaaagacggacttaaagcagggatcgaagctggaaatattaatataacctctggagaagtgtttgaaattgaagagcatatcagcgagcgacaggcagaagtattggctgagtttgagagaaggaagcgagcccggcagatcaatgtttccacagatgactcagaggtcaaagcttgccttagagccttgggggaacccatcacactttttggagagggtcctgctgaaagaagagaaaggttaagaaatatcctctcagttgtcggtactgatgccttgaaaaagaccaaaaaggatgatgagaagtctaaaaagtccaaagaagagtatcagcaaacctggtatcatgaaggaccaaatagcttgaaggtggcaagactatggattgctaattattcgttgcccagggcaatgaaacgcttggaagaggcccgactccataaggagattcctgagacaacaaggacctcccagatgcaagagctgcacaagtctctccgggtaagatgctcccagcaattgtcccacatcttaaaggttcttcatgtttatttgatttttctactttggctcacctctgggaaggtagaggcaactagagtgattcctccct

SEQ ID NO: 422731 - DNA, 3440 bp, Homo sapiens
  misc_feature (3417)..(3417): n is a, c, g, or t
  misc_feature (3419)..(3419): n is a, c, g, or t
cgctccagagttcagccccgagccgcgcgagtcgactcacctacctcttttcaagccggcctagccccttcccggaacctcggctcccccccaacgaaactactgctaagccaactggactacacttcccagactgcttggagcctctctctccgcagaacctcgtcttccgcgagcttttcctggaggttctaggagggatgcccctcaatgccacgacgccatttcctactacgacttccatcatgctccgcgccgctccgggggcggtgacccctcttggcccacgtcttgtcagtgacgcacttcctgtcagtgacgcacttcccctctgctgggcgcgcggtggacggtctgaaagggagtgttcgggtttcgctggggcctcgcggctccagagcccagcatggcttcctcgcgagcctcttccacggcaaccaaaactaaagcacccgacgacttagttgctccggtcgtgaagaaaccacacatctattatggaagtttggaagagaaggagagggagcgtctggccaaaggagagtctgggattttggggaaagacggacttaaagcagggatcgaagctggaaatattaatataacctctggagaagtgtttgaaattgaagagcatatcagcgagcgacaggcagaagtattggctgagtttgagagaaggaagcgagcccggcagatcaatgtttccacagatgactcagaggtcaaagcttgccttagagccttgggggaacccatcacactttttggagagggtcctgctgaaagaagagaaaggttaagaaatatcctctcagttgtcggtactgatgccttgaaaaagaccaaaaaggatgatgagaagtctaaaaagtccaaagaagagtatcagcaaacctggtatcatgaaggaccaaatagcttgaaggtggcaagactatggattgctaattattcgttgcccagggcaatgaaacgcttggaagaggcccgactccataaggagattcctgagacaacaaggacctcccagatgcaagagctgcacaagtctctccggtctttgaataatttttgcagtcagattggggatgatcggcctatctcctactgtcactttagtcccaattccaagatgctggccacagcttgttggagtgggctttgcaagctctggtctgttcctgattgcaacctccttcacactcttcgagggcataacacaaatgtaggagcaattgtattccatcccaaatccactgtctccttggacccaaaagatgtcaacctggcctcttgtgcggctgatggctctgtgaagctttggagtctcgacagtgatgaaccagtggcagatattgaaggccatacagtgcgtgtggcgcgggtaatgtggcatccttcaggacgtttcctgggcaccacctgctatgaccgttcatggcgcttatgggatttggaggctcaagaggagatcctgcatcaggaaggccatagcatgggtgtgtatgacattgccttccatcaagatggctctttggctggcactgggggactggatgcatttggtcgagtttgggacctacgcacaggacgttgtatcatgttcttagaaggccacctgaaagaaatctatggaataaatttctcccccaatggctatcacattgcaaccggcagtggtgacaacacctgcaaagtgtgggacctccgacagcggcgttgcgtctacaccatccctgctcatcagaacttagtgactggtgtcaagtttgagcctatccatgggaacttcttgcttactggtgcctatgataacacagccaagatctggacgcacccaggctggtccccgctgaagactctggctggccacgaaggcaaagtgatgggcctagatatttcttccgatgggcagctcatagccacttgctcatatgacaggaccttcaagctgtggatggctgaatagatgacaatgggaaaaggacttgaacctcaagctctctctaaggagctgttttcctcaaacgagaagaattgaagtgtttagttctatcatgttttctgccaattaccatgcatagaccctcagtagaattggatttccatgtcagcccccactccaggaaggcagcccaatccctaggtgatggggaacccctctcacggttgaaaatttattacctttttacgccctgccacgaactgtgtagacattgtttttattaatcttttgtttggccgggcgtggtggctcacgcctgtaatcctagcactttgggaggccgaggtgggtagatcgcttgagctcaggagttcaagacgagcctgggcaacatggcaaatgccgtctctgcaaaaaaatactaaaattagctggtcgcggtggcttctgcctgtgattccggctacttgggaggctgaggtgggagggattgcttaagcctgggaggcagaggttgcagtgagccgagattgcgccattgcactctagcctgtgtgacagagcaagaccctgtctcaaaaaaaaaaaaaatttgttcgaatgccttatagccttcctcacagcacccaggattgtgactgactctgcatttttaattcttgaaacttggctttccataacatggtacatgcttcaggactacatatgacccagagagcaaggtggctgaactatagtctggaagccctcaggtaaagaggcacatctcaccactcattggttaaacaatgcatcatagcgagcacttttcctttccctggagaatgggatgtgaagcagtagaccgcagccacgccgatggttatacagtgaagaagacttcacctcttcctattgagtttgcttggaatgctgacagcatcaggcaactctgaactgaacatttgctttgtcagaaaatatctttttttttactttgaagtttggcaaccttcatgttaccccaaagcaaaaccattgtgtcaggagtcaaacaaatgtttagaaagcaaacatgacgtctctattgtacaacctcctttctcttggctgtttaaaggatgtacttcgtgtattaaagggtactttatgttgaagtaacgaaaaaaccctaatgggtgttcctaaacctaaaccttttctttattccacatttgctacggtaaaatcctgttacaaaactaccctataaagaattattttctatagttaagcattttctgaatcctagccattggtccatagaggtctcttttttttggtttgggatataatggatgatctcaaatatggattactctgatttatgtctccttagcaccttgttaacaattttttttaaaatagaaggctgtttgcattttgggccagactgccagtaagccaggcctggactcaattacaattcttaacttgtctgtcagcacctntnaggggggatcctctatagacc

SEQ ID NO: 422732 - DNA, 3087 bp, Homo sapiens
cgctccagagttcagccccgagccgcgcgagtcgactcacctacctcttttcaagccggcctagccccttcccggaacctcggctcccccccaacgaaactactgctaagccaactggactacacttcccagactgcttggagcctctctctccgcagaacctcgtcttccgcgagcttttcctggaggttctaggagggatgcccctcaatgccacgacgccatttcctactacgacttccatcatgctccgcgccgctccgggggcggtgacccctcttggcccacgtcttgtcagtgacgcacttcctgtcagtgacgcacttcccctctgctgggcgcgcggtggacggtctgaaagggagtgttcgggtttcgctggggcctcgcggctccagagcccagcatggcttcctcgcgagcctcttccacggcaaccaaaactaaagcacccgacgacttagttgctccggtcgtgaagaaaccacacatctattatggaagtttggaagagaaggagagggagcgtctggccaaaggagagtctgggattttggggaaagacggacttaaagcagggatcgaagctggaaatattaatataacctctggagaagtgtttgaaattgaagagcatatcagcgagcgacaggcagaagtattggctgagtttgagagaaggaagcgagcccggcagatcaatgtttccacagatgactcagaggtcaaagcttgccttagagccttgggggaacccatcacactttttggagagggtcctgctgaaagaagagaaaggttaagaaatatcctctcagttgtcggtactgatgccttgaaaaagaccaaaaaggatgatgagaagtctaaaaagtccaaagaagagtatcagcaaacctggtatcatgaaggaccaaatagcttgaaggtggcaagactatggattgctaattattcgttgcccagggcaatgaaacgcttggaagaggcccgactccataaggagattcctgagacaacaaggacctcccagatgcaagagctgcacaagtctctccggtctttgaataatttttgcagtcagattggggatgatcggcctatctcctactgtcactttagtcccaattccaagatgctggccacagcttgttggagtgggctttgcaagctctggtctgttcctgattgcaacctccttcacactcttcgagggcataacacaaatgtaggagcaattgtattccatcccaaatccactgtctccttggacccaaaagatgtcaacctggcctcttgtgcggctgatggctctgtgaagctttggagtctcgacagtgatgaaccagtggcagatattgaaggccatacagtgcgtgtggcgcgggtaatgtggcatccttcaggacgtttcctgggcaccacctgctatgaccgttcatggcgcttatgggatttggaggctcaagaggagatcctgcatcaggaaggccatagcatgggtgtgtatgacattgccttccatcaagatggctctttggctggcactgggggactggatgcatttggtcgagtttgggacctacgcacaggacgttgtatcatgttcttagaaggccacctgaaagaaatctatggaataaatttctcccccaatggctatcacattgcaaccggcagtggtgacaacacctgcaaagtgtgggacctccgacagcggcgttgcgtctacaccatccctgctcatcagaacttagtgactggtgtcaagtttgagcctatccatgggaacttcttgcttactggtgcctatgataacacagccaagatctggacgcacccaggctggtccccgctgaagactctggctggccacgaaggcaaagtgatgggcctagatatttcttccgatgggcagctcatagccacttgctcatatgacaggaccttcaagctgtggatggctgaatagatgacaatgggaaaaggacttgaacctcaagctctctctaaggagctgttttcctcaaacgagaagaattgaagtgtttagttctatcatgttttctgccaattaccatgcatagaccctcagtagaattggatttccatgtcagcccccactccaggaaggcagcccaatccctaggtgatggggaacccctctcacggttgaaaatttattacctttttacgccctgccacgaactgtgtagacattgtttttattaatcttttgtttggccgggcgtggtggctcacgcctgtaatcctagcactttgggaggccgaggtgggtagatcgcttgagctcaggagttcaagacgagcctgggcaacatggcaaatgccgtctctgcaaaaaaatactaaaattagctggtcgcggtggcttctgcctgtgattccggctacttgggaggctgaggtgggagggattgcttaagcctgggaggcagaggttgcagtgagccgagattgcgccattgcactctagcctgtgtgacagagcaagaccctgtctcaaaaaaaaaaaaaatttgttcgaatgccttatagccttcctcacagcacccaggattgtgactgactctgcatttttaattcttgaaacttggctttccataacatggtacatgcttcaggactacatatgacccagagagcaaggtggctgaactatagtctggaagccctcaggtaaagaggcacatctcaccactcattggttaaacaatgcatcatagcgagcacttttcctttccctggagaatgggatgtgaagcagtagaccgcagccacgccgatggttatacagtgaagaagacttcacctcttcctattgagtttgcttggaatgctgacagcatcaggcaactctgaactgaacatttgctttgtcagaaaatatctttttttttactttgaagtttggcaaccttcatgttaccccaaagcaaaaccattgtgtcaggagtcaaacaaatgtttagaaagcaaacatgacgtctctattgtacaacctcctttctcttggctgtttaaaggatgtacttcgtgtattaaagggtactttatgttgaagta

SEQ ID NO: 422733 - DNA, 3896 bp, Homo sapiens
cgctccagagttcagccccgagccgcgcgagtcgactcacctacctcttttcaagccggcctagccccttcccggaacctcggctcccccccaacgaaactactgctaagccaactggactacacttcccagactgcttggagcctctctctccgcagaacctcgtcttccgcgagcttttcctggaggttctaggagggatgcccctcaatgccacgacgccatttcctactacgacttccatcatgctccgcgccgctccgggggcggtgacccctcttggcccacgtcttgtcagtgacgcacttcctgtcagtgacgcacttcccctctgctgggcgcgcggtggacggtctgaaagggagtgttcgggtttcgctggggcctcgcggctccagagcccagcatggcttcctcgcgagcctcttccacggcaaccaaaactaaagcacccgacgacttagttgctccggtcgtgaagaaaccacacatctattatggaagtttggaagagaaggagagggagcgtctggccaaaggagagtctgggattttggggaaagacggacttaaagcagggatcgaagctggaaatattaatataacctctggagaagtgtttgaaattgaagagcatatcagcgagcgacaggcagaagtattggctgagtttgagagaaggaagcgagcccggcagatcaatgtttccacagatgactcagaggtcaaagcttgccttagagccttgggggaacccatcacactttttggagagggtcctgctgaaagaagagaaaggttaagaaatatcctctcagttgtcggtactgatgccttgaaaaagaccaaaaaggatgatgagaagtctaaaaagtccaaagaagaggtagaacatgtctttaacttcacagtataaacatgaaggaaatgaggggataggtctctcgttttctgctttcagtggtttgttttgctgagatgttgggggaaatgtttttgaaggctctaccattcaagaagagttgctggcagtagttttggttcctttgtaagtatgaatggagctaagtgagttttccagtcaggaaagaatcatggcattcctggtataaccatgtagttacatatcatagaaaaaaattcagtagaaagtcctctgcctgatttcatcctattaccgaatgaattcaccttccttctgggcagttaaaatggagaaatgacagttataagaggagtagaatgcttcagatttgacctttctgctcttaatttgcctttcagtatcagcaaacctggtatcatgaaggaccaaatagcttgaaggtggcaagactatggattgctaattattcgttgcccagggcaatgaaacgcttggaagaggcccgactccataaggagattcctgagacaacaaggacctcccagatgcaagagctgcacaagtctctccggtctttgaataatttttgcagtcagattggggatgatcggcctatctcctactgtcactttagtcccaattccaagatgctggccacagcttgttggagtgggctttgcaagctctggtctgttcctgattgcaacctccttcacactcttcgagggcataacacaaatgtaggagcaattgtattccatcccaaatccactgtctccttggacccaaaagatgtcaacctggcctcttgtgcggctgatggctctgtgaagctttggagtctcgacagtgatgaaccagtggcagatattgaaggccatacagtgcgtgtggcgcgggtaatgtggcatccttcaggacgtttcctgggcaccacctgctatgaccgttcatggcgcttatgggatttggaggctcaagaggagatcctgcatcaggaaggccatagcatgggtgtgtatgacattgccttccatcaagatggctctttggctggcactgggggactggatgcatttggtcgagtttgggacctacgcacaggacgttgtatcatgttcttagaaggccacctgaaagaaatctatggaataaatttctcccccaatggctatcacattgcaaccggcagtggtgacaacacctgcaaagtgtgggacctccgacagcggcgttgcgtctacaccatccctgctcatcagaacttagtgactggtgtcaagtttgagcctatccatgggaacttcttgcttactggtgcctatgataacacagccaagatctggacgcacccaggctggtccccgctgaagactctggctggccacgaaggcaaagtgatgggcctagatatttcttccgatgggcagctcatagccacttgctcatatgacaggaccttcaagctgtggatggctgaatagatgacaatgggaaaaggacttgaacctcaagctctctctaaggagctgttttcctcaaacgagaagaattgaagtgtttagttctatcatgttttctgccaattaccatgcatagaccctcagtagaattggatttccatgtcagcccccactccaggaaggcagcccaatccctaggtgatggggaacccctctcacggttgaaaatttattacctttttacgccctgccacgaactgtgtagacattgtttttattaatcttttgtttggccgggcgtggtggctcacgcctgtaatcctagcactttgggaggccgaggtgggtagatcgcttgagctcaggagttcaagacgagcctgggcaacatggcaaatgccgtctctgcaaaaaaatactaaaattagctggtcgcggtggcttctgcctgtgattccggctacttgggaggctgaggtgggagggattgcttaagcctgggaggcagaggttgcagtgagccgagattgcgccattgcactctagcctgtgtgacagagcaagaccctgtctcaaaaaaaaaaaaaatttgttcgaatgccttatagccttcctcacagcacccaggattgtgactgactctgcatttttaattcttgaaacttggctttccataacatggtacatgcttcaggactacatatgacccagagagcaaggtggctgaactatagtctggaagccctcaggtaaagaggcacatctcaccactcattggttaaacaatgcatcatagcgagcacttttcctttccctggagaatgggatgtgaagcagtagaccgcagccacgccgatggttatacagtgaagaagacttcacctcttcctattgagtttgcttggaatgctgacagcatcaggcaactctgaactgaacatttgctttgtcagaaaatatctttttttttactttgaagtttggcaaccttcatgttaccccaaagcaaaaccattgtgtcaggagtcaaacaaatgtttagaaagcaaacatgacgtctctattgtacaacctcctttctcttggctgtttaaaggatgtacttcgtgtattaaagggtactttatgttgaagtaacgaaaaaaccctaatgggtgttcctaaacctaaaccttttctttattccacatttgctacggtaaaatcctgttacaaaactaccctataaagaattattttctatagttaagcattttctgaatcctagccattggtccatagaggtctcttttttttggtttgggatataatggatgatctcaaatatggattactctgatttatgtctccttagcaccttgttaacaattttttttaaaatagaaggctgtttgcattttgggccagactgccagtaagccaggcctggactcaattacaattcttaacttgtctgtcagcacctcttttcacctcaactatacagcctctgaactctcaaattacacagtaaattcaaaaaaatatataggaatttggaagaagaa

SEQ ID NO: 422734 - DNA, 2662 bp, Homo sapiens
cgctccagagttcagccccgagccgcgcgagtcgactcacctacctcttttcaagccggcctagccccttcccggaacctcggctcccccccaacgaaactactgctaagccaactggactacacttcccagactgcttggagcctctctctccgcagaacctcgtcttccgcgagcttttcctggaggttctaggagggatgcccctcaatgccacgacgccatttcctactacgacttccatcatgctccgcgccgctccgggggcggtgacccctcttggcccacgtcttgtcagtgacgcacttcctgtcagtgacgcacttcccctctgctgggcgcgcggtggacggtctgaaagggagtgttcgggtttcgctggggcctcgcggctccagagcccagcatggcttcctcgcgagcctcttccacggcaaccaaaactaaagcacccgacgacttagttgctccggtcgtgaagaaaccacacatctattatggaagtttggaagagaaggagagggagcgtctggccaaaggagagtctgggattttggggaaagacggacttaaagcagggatcgaagctggaaatattaatataacctctggagaagtgtttgaaattgaagagcatatcagcgagcgacaggcagaagtattggctgagtttgagagaaggaagcgagcccggcagatcaatgtttccacagatgactcagaggtcaaagcttgccttagagccttgggggaacccatcacactttttggagagggtcctgctgaaagaagagaaaggttaagaaatatcctctcagttgtcggtactgatgccttgaaaaagaccaaaaaggatgatgagaagtctaaaaagtccaaagaagagtatcagcaaacctggtatcatgaaggaccaaatagcttgaaggtggcaagactatggattgctaattattcgttgcccagggcaatgaaacgcttggaagaggcccgactccataaggagattcctgagacaacaaggacctcccagatgcaagagctgcacaagtctctccggtctttgaataatttttgcagtcagattggggatgatcggcctatctcctactgtcactttagtcccaattccaagatgctggccacagcttgttggagtgggctttgcaagctctggtctgttcctgattgcaacctccttcacactcttcgagggcataacacaaatgtaggagcaattgtattccatcccaaatccactgtctccttggacccaaaagatgtcaacctggcctcttgtgcggctgatggctctgtgaagctttggagtctcgacagtgatgaaccagtggcagatattgaaggccacgaactgtgtagacattgtttttattaatcttttgtttggccgggcgtggtggctcacgcctgtaatcctagcactttgggaggccgaggtgggtagatcgcttgagctcaggagttcaagacgagcctgggcaacatggcaaatgccgtctctgcaaaaaaatactaaaattagctggtcgcggtggcttctgcctgtgattccggctacttgggaggctgaggtgggagggattgcttaagcctgggaggcagaggttgcagtgagccgagattgcgccattgcactctagcctgtgtgacagagcaagaccctgtctcaaaaaaaaaaaaaatttgttcgaatgccttatagccttcctcacagcacccaggattgtgactgactctgcatttttaattcttgaaacttggctttccataacatggtacatgcttcaggactacatatgacccagagagcaaggtggctgaactatagtctggaagccctcaggtaaagaggcacatctcaccactcattggttaaacaatgcatcatagcgagcacttttcctttccctggagaatgggatgtgaagcagtagaccgcagccacgccgatggttatacagtgaagaagacttcacctcttcctattgagtttgcttggaatgctgacagcatcaggcaactctgaactgaacatttgctttgtcagaaaatatctttttttttactttgaagtttggcaaccttcatgttaccccaaagcaaaaccattgtgtcaggagtcaaacaaatgtttagaaagcaaacatgacgtctctattgtacaacctcctttctcttggctgtttaaaggatgtacttcgtgtattaaagggtactttatgttgaagtaacgaaaaaaccctaatgggtgttcctaaacctaaaccttttctttattccacatttgctacggtaaaatcctgttacaaaactaccctataaagaattattttctatagttaagcattttctgaatcctagccattggtccatagaggtctcttttttttggtttgggatataatggatgatctcaaatatggattactctgatttatgtctccttagcaccttgttaacaattttttttaaaatagaaggctgtttgcattttgggccagactgccagtaagccaggcctggactcaattacaattcttaacttgtctgtcagcacctcttttcacctcaactatacagcctctgaactctcaaattacacagtaaattcaaaaaaatatataggaatttggaagaagaa

SEQ ID NO: 422735 - DNA, 2016 bp, Homo sapiens
cgctccagagttcagccccgagccgcgcgagtcgactcacctacctcttttcaagccggcctagccccttcccggaacctcggctcccccccaacgaaactactgctaagccaactggactacacttcccagactgcttggagcctctctctccgcagaacctcgtcttccgcgagcttttcctggaggttctaggagggatgcccctcaatgccacgacgccatttcctactacgacttccatcatgctccgcgccgctccgggggcggtgacccctcttggcccacgtcttgtcagtgacgcacttcctgtcagtgacgcacttcccctctgctgggcgcgcggtggacggtctgaaagggagtgttcgggtttcgctggggcctcgcggctccagagcccagcatggcttcctcgcgagcctcttccacggcaaccaaaactaaagcacccgacgacttagttgctccggtcgtgaagaaaccacacatctattatggaagtttggaagagaaggagagggagcgtctggccaaaggagagtctgggattttggggaaagacggacttaaagcagggatcgaagctggaaatattaatataacctctggagaagtgtttgaaattgaagagcatatcagcgagcgacaggcagaagtattggctgagtttgagagaaggaagcgagcccggcagatcaatgtttccacagatgactcagaggtcaaagcttgccttagagccttgggggaacccatcacactttttggagagggtcctgctgaaagaagagaaaggttaagaaatatcctctcagttgtcggtactgatgccttgaaaaagaccaaaaaggatgatgagaagtctaaaaagtccaaagaagagtatcagcaaacctggtatcatgaaggaccaaatagcttgaaggtggcaagactatggattgctaattattcgttgcccagggcaatgaaacgcttggaagaggcccgactccataaggagattcctgagacaacaaggacctcccagatgcaagagctgcacaagtctctccggtctttgaataatttttgcagtcagattggggatgatcggcctatctcctactgtcactttagtcccaattccaagatgctggccacagcttgttggagtgggctttgcaagctctggtctgttcctgattgcaacctccttcacactcttcgagggcataacacaaatgtaggagcaattgtattccatcccaaatccactgtctccttggacccaaaagatgtcaacctggcctcttgtgcggctgatggctctgtgaagctttggagtctcgacaggtgaatatcactgttctgtggcccatactgccatcactaaagtagatgtttgattggttggtccccaggacctcagtaaaaatctggcatttaggccatgcgcagtggctcacaccttaaggctgaggcaggagaattgcttaaacccgggaaatggaggttgtggtgagccgagattgcacactgcactccagcttgggtgacagagcaagactccgtcttgaaagaacaaaaaaaaaaatctggcatttaacccccaagatggtttaagagtcaaggtaacctagtgtgaaaatgaagtaagtggaagatttcattcttaggccttttcttactaaaggagttatgtccgttttttcttacctgttaactttggatcttgatttttgtctatagcctagtgaccactatttcctagctccatttattccagaaagatccagcctacctcctacatgataaattaacaatgaactaaatataatattcttggcagttcgttggttcttagcaaacagccacaggggagaggaaagtgaggttctgtctagcagtattaccacggagatgtctcctcgcaatagcatcatcctttacctagaatgtattttccaactacaacagtttttaaaaatgtgtttatgtgattgttttccaaaaaaaaaaaacttcggaagc

SEQ ID NO: 422736 - DNA, 963 bp, Homo sapiens
tgacccagagagcaaggtggctgaactatagtctggaagccctcaggtaaagaggcacatctcaccactcattggttcatatgtagtcctgaagcatgtaccatgttatggactacatatgacccagagagcaaggtggctgaactatagtctggaagccctcaggtaaagaggcacatctcaccactcattggttaaacaatgcatcatagcgagcacttttcctttccctggagaatgggatgtgaagcagtagaccgcagccacgccgatggttatacagtgaagaagacttcacctcttcctattgagtttgcttggaatgctgacagcatcaggcaactctgaactgaacatttgctttgtcagaaaatatctttttttttactttgaagtttggcaaccttcatgttaccccaaagcaaaaccattgtgtcaggagtcaaacaaatgtttagaaagcaaacatgacgtctctattgtacaacctcctttctcttggctgtttaaaggatgtacttcgtgtattaaagggtactttatgttgaagtaacgaaaaaaccctaatgggtgttcctaaacctaaaccttttctttattccacatttgctacggtaaaatcctgttacaaaactaccctataaagaattattttctatagttaagcattttctgaatcctagccattggtccatagaggtctcttttttttggtttgggatataatggatgatctcaaatatggattactctgatttatgtctccttagcaccttgttaacaattttttttaaaatagaaggctgtttgcattttgggccagactgccagtaagccaggcctggactcaattacaattcttaacttgtctgtcagcacctcttttcacctcaactatacagcctctgaactctcaaattacacagtaaattcaaaaaaatatataggaatttggaagaagaa

SEQ ID NO: 422737 - DNA, 3498 bp, Homo sapiens
cgctccagagttcagccccgagccgcgcgagtcgactcacctacctcttttcaagccggcctagccccttcccggaacctcggctcccccccaacgaaactactgctaagccaactggactacacttcccagactgcttggagcctctctctccgcagaacctcgtcttccgcgagcttttcctggaggttctaggagggatgcccctcaatgccacgacgccatttcctactacgacttccatcatgctccgcgccgctccgggggcggtgacccctcttggcccacgtcttgtcagtgacgcacttcctgtcagtgacgcacttcccctctgctgggcgcgcggtggacggtctgaaagggagtgttcgggtttcgctggggcctcgcggctccagagcccagcatggcttcctcgcgagcctcttccacggcaaccaaaactaaagcacccgacgacttagttgctccggtcgtgaagaaaccacacatctattatggaagtttggaagagaaggagagggagcgtctggccaaaggagagtctgggattttggggaaagacggacttaaagcagggatcgaagctggaaatattaatataacctctggagaagtgtttgaaattgaagagcatatcagcgagcgacaggcagaagtattggctgagtttgagagaaggaagcgagcccggcagatcaatgtttccacagatgactcagaggtcaaagcttgccttagagccttgggggaacccatcacactttttggagagggtcctgctgaaagaagagaaaggttaagaaatatcctctcagttgtcggtactgatgccttgaaaaagaccaaaaaggatgatgagaagtctaaaaagtccaaagaagagtatcagcaaacctggtatcatgaaggaccaaatagcttgaaggtggcaagactatggattgctaattattcgttgcccagggcaatgaaacgcttggaagaggcccgactccataaggagattcctgagacaacaaggacctcccagatgcaagagctgcacaagtctctccggtctttgaataatttttgcagtcagattggggatgatcggcctatctcctactgtcactttagtcccaattccaagatgctggccacagcttgttggagtgggctttgcaagctctggtctgttcctgattgcaacctccttcacactcttcgagggcataacacaaatgtaggagcaattgtattccatcccaaatccactgtctccttggacccaaaagatgtcaacctggcctcttgtgcggctgatggctctgtgaagctttggagtctcgacagtgatgaaccagtggcagatattgaaggccatacagtgcgtgtggcgcgggtaatgtggcatccttcaggacgtttcctgggcaccacctgctatgaccgttcatggcgcttatgggatttggaggctcaagaggagatcctgcatcaggaaggccatagcatgggtgtgtatgacattgccttccatcaagatggctctttggctggcactgggggactggatgcatttggtcgagtttgggacctacgcacaggacgttgtatcatgttcttagaaggccacctgaaagaaatctatggaataaatttctcccccaatggctatcacattgcaaccggcagtggtgacaacacctgcaaagtgtgggacctccgacagcggcgttgcgtctacaccatccctgctcatcagaacttagtgactggtgtcaagtttgagcctatccatgggaacttcttgcttactggtgcctatgataacacagccaagatctggacgcacccaggctggtccccgctgaagactctggctggccacgaaggcaaagtgatgggcctagatatttcttccgatgggcagctcatagccacttgctcatatgacaggaccttcaagctgtggatggctgaatagatgacaatgggaaaaggacttgaacctcaagctctctctaaggagctgttttcctcaaacgagaagaattgaagtgtttagttctatcatgttttctgccaattaccatgcatagaccctcagtagaattggatttccatgtcagcccccactccaggaaggcagcccaatccctaggtgatggggaacccctctcacggttgaaaatttattacctttttacgccctgccacgaactgtgtagacattgtttttattaatcttttgtttggccgggcgtggtggctcacgcctgtaatcctagcactttgggaggccgaggtgggtagatcgcttgagctcaggagttcaagacgagcctgggcaacatggcaaatgccgtctctgcaaaaaaatactaaaattagctggtcgcggtggcttctgcctgtgattccggctacttgggaggctgaggtgggagggattgcttaagcctgggaggcagaggttgcagtgagccgagattgcgccattgcactctagcctgtgtgacagagcaagaccctgtctcaaaaaaaaaaaaaatttgttcgaatgccttatagccttcctcacagcacccaggattgtgactgactctgcatttttaattcttgaaacttggctttccataacatggtacatgcttcaggactacatatgacccagagagcaaggtggctgaactatagtctggaagccctcaggtaaagaggcacatctcaccactcattggttaaacaatgcatcatagcgagcacttttcctttccctggagaatgggatgtgaagcagtagaccgcagccacgccgatggttatacagtgaagaagacttcacctcttcctattgagtttgcttggaatgctgacagcatcaggcaactctgaactgaacatttgctttgtcagaaaatatctttttttttactttgaagtttggcaaccttcatgttaccccaaagcaaaaccattgtgtcaggagtcaaacaaatgtttagaaagcaaacatgacgtctctattgtacaacctcctttctcttggctgtttaaaggatgtacttcgtgtattaaagggtactttatgttgaagtaacgaaaaaaccctaatgggtgttcctaaacctaaaccttttctttattccacatttgctacggtaaaatcctgttacaaaactaccctataaagaattattttctatagttaagcattttctgaatcctagccattggtccatagaggtctcttttttttggtttgggatataatggatgatctcaaatatggattactctgatttatgtctccttagcaccttgttaacaattttttttaaaatagaaggctgtttgcattttgggccagactgccagtaagccaggcctggactcaattacaattcttaacttgtctgtcagcacctcttttcacctcaactatacagcctctgaactctcaaattacacagtaaattcaaaaaaatatataggaatttggaagaagaa

SEQ ID NO: 422738 - DNA, 3150 bp, Homo sapiens
  misc_feature (62)..(62): n is a, c, g, or t
tcgttctttgataggggggagtgtcgggttcgctggggctcgcgggtcagagccaggatggnttcctcgggagctcttccacgcagcaaccaaaactaaagcacccgacgacttagttgctccggtcgtgaagaaaccacacatctattatggaagtttggaagagaaggagagggagcgtctggccaaaggagagtctgggattttggggaaagacggacttaaagcagggatcgaagctggaaatattaatataacctctggagaagtgtttgaaattgaagagcatatcagcgagcgacaggcagaagtattggctgagtttgagagaaggaagcgagcccggcagatcaatgtttccacagatgactcagaggtcaaagcttgccttagagccttgggggaacccatcacactttttggagagggtcctgctgaaagaagagaaaggttaagaaatatcctctcagttgtcggtactgatgccttgaaaaagaccaaaaaggatgatgagaagtctaaaaagtccaaagaagagtatcagcaaacctggtatcatgaaggaccaaatagcttgaaggtggcaagactatggattgctaattattcgttgcccagggcaatgaaacgcttggaagaggcccgactccataaggagattcctgagacaacaaggacctcccagatgcaagagctgcacaagtctctccggtctttgaataatttttgcagtcagattggggatgatcggcctatctcctactgtcactttagtcccaattccaagatgctggccacagcttgttggagtgggctttgcaagctctggtctgttcctgattgcaacctccttcacactcttcgagggcataacacaaatgtaggagcaattgtattccatcccaaatccactgtctccttggacccaaaagatgtcaacctggcctcttgtgcggctgatggctctgtgaagctttggagtctcgacagtgatgaaccagtggcagatattgaaggccatacagtgcgtgtggcgcgggtaatgtggcatccttcaggacgtttcctgggcaccacctgctatgaccgttcatggcgcttatgggatttggaggctcaagaggagatcctgcatcaggaaggccatagcatgggtgtgtatgacattgccttccatcaagatggctctttggctggcactgggggactggatgcatttggtcgagtttgggacctacgcacaggacgttgtatcatgttcttagaaggccacctgaaagaaatctatggaataaatttctcccccaatggctatcacattgcaaccggcagtggtgacaacacctgcaaagtgtgggacctccgacagcggcgttgcgtctacaccatccctgctcatcagaacttagtgactggtgtcaagtttgagcctatccatgggaacttcttgcttactggtgcctatgataacacagccaagatctggacgcacccaggctggtccccgctgaagactctggctggccacgaaggcaaagtgatgggcctagatatttcttccgatgggcagctcatagccacttgctcatatgacaggaccttcaagctgtggatggctgaatagatgacaatgggaaaaggacttgaacctcaagctctctctaaggagctgttttcctcaaacgagaagaattgaagtgtttagttctatcatgttttctgccaattaccatgcatagaccctcagtagaattggatttccatgtcagcccccactccaggaaggcagcccaatccctaggtgatggggaacccctctcacggttgaaaatttattacctttttacgccctgccacgaactgtgtagacattgtttttattaatcttttgtttggccgggcgtggtggctcacgcctgtaatcctagcactttgggaggccgaggtgggtagatcgcttgagctcaggagttcaagacgagcctgggcaacatggcaaatgccgtctctgcaaaaaaatactaaaattagctggtcgcggtggcttctgcctgtgattccggctacttgggaggctgaggtgggagggattgcttaagcctgggaggcagaggttgcagtgagccgagattgcgccattgcactctagcctgtgtgacagagcaagaccctgtctcaaaaaaaaaaaaaatttgttcgaatgccttatagccttcctcacagcacccaggattgtgactgactctgcatttttaattcttgaaacttggctttccataacatggtacatgcttcaggactacatatgacccagagagcaaggtggctgaactatagtctggaagccctcaggtaaagaggcacatctcaccactcattggttaaacaatgcatcatagcgagcacttttcctttccctggagaatgggatgtgaagcagtagaccgcagccacgccgatggttatacagtgaagaagacttcacctcttcctattgagtttgcttggaatgctgacagcatcaggcaactctgaactgaacatttgctttgtcagaaaatatctttttttttactttgaagtttggcaaccttcatgttaccccaaagcaaaaccattgtgtcaggagtcaaacaaatgtttagaaagcaaacatgacgtctctattgtacaacctcctttctcttggctgtttaaaggatgtacttcgtgtattaaagggtactttatgttgaagtaacgaaaaaaccctaatgggtgttcctaaacctaaaccttttctttattccacatttgctacggtaaaatcctgttacaaaactaccctataaagaattattttctatagttaagcattttctgaatcctagccattggtccatagaggtctcttttttttggtttgggatataatggatgatctcaaatatggattactctgatttatgtctccttagcaccttgttaacaattttttttaaaatagaaggctgtttgcattttgggccagactgccagtaagccaggcctggactcaattacaattcttaacttgtctgtcagcacctcttttcacctcaactatacagcctctgaactctcaaattacacagtaaattcaaaaaaatatataggaatttggaagaagaa

SEQ ID NO: 422739 - DNA, 3839 bp, Homo sapiens
cgctccagagttcagccccgagccgcgcgagtcgactcacctacctcttttcaagccggcctagccccttcccggaacctcggctcccccccaacgaaactactgctaagccaactggactacacttcccagactgcttggagcctctctctccgcagaacctcgtcttccgcgagcttttcctggaggttctaggagggatgcccctcaatgccacgacgccatttcctactacgacttccatcatgctccgcgccgctccgggggcggtgacccctcttggcccacgtcttgtcagtgacgcacttcctgtcagtgacgcacttcccctctgctgggcgcgcggtggacggtctgaaagggagtgttcgggtttcgctggggcctcgcggctccagagcccagcatggcttcctcgcgagcctcttccacggcaaccaaaactaaagcacccgacgacttagttgctccggtcgtgaagaaaccacacatctattatggaagtttggaagagaaggagagggagcgtctggccaaaggagagtctgggattttggggaaagacggacttaaagcagggatcgaagctggaaatattaatataacctctggagaagtgtttgaaattgaagagcatatcagcgagcgacaggcagaagtattggctgagtttgagagaaggaagcgagcccggcagatcaatgtttccacagatgactcagaggtcaaagcttgccttagagccttgggggaacccatcacactttttggagagggtcctgctgaaagaagagaaaggttaagaaatatcctctcagttgtcggtactgatgccttgaaaaagaacttcacagtataaacatgaaggaaatgaggggataggtctctcgttttctgctttcagtggtttgttttgctgagatgttgggggaaatgtttttgaaggctctaccattcaagaagagttgctggcagtagttttggttcctttgtaagtatgaatggagctaagtgagttttccagtcaggaaagaatcatggcattcctggtataaccatgtagttacatatcatagaaaaaaattcagtagaaagtcctctgcctgatttcatcctattaccgaatgaattcaccttccttctgggcagttaaaatggagaaatgacagttataagaggagtagaatgcttcagatttgacctttctgctcttaatttgcctttcagtatcagcaaacctggtatcatgaaggaccaaatagcttgaaggtggcaagactatggattgctaattattcgttgcccagggcaatgaaacgcttggaagaggcccgactccataaggagattcctgagacaacaaggacctcccagatgcaagagctgcacaagtctctccggtctttgaataatttttgcagtcagattggggatgatcggcctatctcctactgtcactttagtcccaattccaagatgctggccacagcttgttggagtgggctttgcaagctctggtctgttcctgattgcaacctccttcacactcttcgagggcataacacaaatgtaggagcaattgtattccatcccaaatccactgtctccttggacccaaaagatgtcaacctggcctcttgtgcggctgatggctctgtgaagctttggagtctcgacagtgatgaaccagtggcagatattgaaggccatacagtgcgtgtggcgcgggtaatgtggcatccttcaggacgtttcctgggcaccacctgctatgaccgttcatggcgcttatgggatttggaggctcaagaggagatcctgcatcaggaaggccatagcatgggtgtgtatgacattgccttccatcaagatggctctttggctggcactgggggactggatgcatttggtcgagtttgggacctacgcacaggacgttgtatcatgttcttagaaggccacctgaaagaaatctatggaataaatttctcccccaatggctatcacattgcaaccggcagtggtgacaacacctgcaaagtgtgggacctccgacagcggcgttgcgtctacaccatccctgctcatcagaacttagtgactggtgtcaagtttgagcctatccatgggaacttcttgcttactggtgcctatgataacacagccaagatctggacgcacccaggctggtccccgctgaagactctggctggccacgaaggcaaagtgatgggcctagatatttcttccgatgggcagctcatagccacttgctcatatgacaggaccttcaagctgtggatggctgaatagatgacaatgggaaaaggacttgaacctcaagctctctctaaggagctgttttcctcaaacgagaagaattgaagtgtttagttctatcatgttttctgccaattaccatgcatagaccctcagtagaattggatttccatgtcagcccccactccaggaaggcagcccaatccctaggtgatggggaacccctctcacggttgaaaatttattacctttttacgccctgccacgaactgtgtagacattgtttttattaatcttttgtttggccgggcgtggtggctcacgcctgtaatcctagcactttgggaggccgaggtgggtagatcgcttgagctcaggagttcaagacgagcctgggcaacatggcaaatgccgtctctgcaaaaaaatactaaaattagctggtcgcggtggcttctgcctgtgattccggctacttgggaggctgaggtgggagggattgcttaagcctgggaggcagaggttgcagtgagccgagattgcgccattgcactctagcctgtgtgacagagcaagaccctgtctcaaaaaaaaaaaaaatttgttcgaatgccttatagccttcctcacagcacccaggattgtgactgactctgcatttttaattcttgaaacttggctttccataacatggtacatgcttcaggactacatatgacccagagagcaaggtggctgaactatagtctggaagccctcaggtaaagaggcacatctcaccactcattggttaaacaatgcatcatagcgagcacttttcctttccctggagaatgggatgtgaagcagtagaccgcagccacgccgatggttatacagtgaagaagacttcacctcttcctattgagtttgcttggaatgctgacagcatcaggcaactctgaactgaacatttgctttgtcagaaaatatctttttttttactttgaagtttggcaaccttcatgttaccccaaagcaaaaccattgtgtcaggagtcaaacaaatgtttagaaagcaaacatgacgtctctattgtacaacctcctttctcttggctgtttaaaggatgtacttcgtgtattaaagggtactttatgttgaagtaacgaaaaaaccctaatgggtgttcctaaacctaaaccttttctttattccacatttgctacggtaaaatcctgttacaaaactaccctataaagaattattttctatagttaagcattttctgaatcctagccattggtccatagaggtctcttttttttggtttgggatataatggatgatctcaaatatggattactctgatttatgtctccttagcaccttgttaacaattttttttaaaatagaaggctgtttgcattttgggccagactgccagtaagccaggcctggactcaattacaattcttaacttgtctgtcagcacctcttttcacctcaactatacagcctctgaactctcaaattacacagtaaattcaaaaaaatatataggaatttggaagaagaa

SEQ ID NO: 422740 - DNA, 2466 bp, Homo sapiens
  misc_feature (2443)..(2443): n is a, c, g, or t
  misc_feature (2445)..(2445): n is a, c, g, or t
cgctccagagttcagccccgagccgcgcgagtcgactcacctacctcttttcaagccggcctagccccttcccggaacctcggctcccccccaacgaaactactgctaagccaactggactacacttcccagactgcttggagcctctctctccgcagaacctcgtcttccgcgagcttttcctggaggttctaggagggatgcccctcaatgccacgacgccatttcctactacgacttccatcatgctccgcgccgctccgggggcggtgacccctcttggcccacgtcttgtcagtgacgcacttcctgtcagtgacgcacttcccctctgctgggcgcgcggtggacggtctgaaagggagtgttcgggtttcgctggggcctcgcggctccagagcccagcatggcttcctcgcgagcctcttccacggcaaccaaaactaaagcacccgacgacttagttgctccggtcgtgaagaaaccacacatctattatggaagtttggaagagaaggagagggagcgtctggccaaaggagagtctgggattttggggaaagacggacttaaagcagggatcgaagctggaaatattaatataacctctggagaagtgtttgaaattgaagagcatatcagcgagcgacaggcagaagtattggctgagtttgagagaaggaagcgagcccggcagatcaatgtttccacagatgactcagaggtcaaagcttgccttagagccttgggggaacccatcacactttttggagagggtcctgctgaaagaagagaaaggttaagaaatatcctctcagttgtcggtactgatgccttgaaaaagaccaaaaaggatgatgagaagtctaaaaagtccaaagaagagtatcagcaaacctggtatcatgaaggaccaaatagcttgaaggtggcaagactatggattgctaattattcgttgcccagggcaatgaaacgcttggaagaggcccgactccataaggagattcctgagacaacaaggacctcccagatgcaagagctgcacaagtctctccggtctttgaataatttttgcagtcagattggggatgatcggcctatctcctactgtcactttagtcccaattccaagatgctggccacagcttgttggagtgggctttgcaagctctggtctgttcctgattgcaacctccttcacactcttcgagggcataacacaaatgtaggagcaattgtattccatcccaaatccactgtctccttggacccaaaagatgtcaacctggcctcttgtgcggctgatggctctgtgaagctttggagtctcgacagtgatgaaccagtggcagatattgaaggccatacagtgcgtgtggcgcgggtaatgtggcatccttcaggacgtttcctgggcaccacctgctatgaccgttcatggcgcttatgggatttggaggctcaagaggagatcctgcatcaggaaggccatagcatgggtgtgtatgacattgccttccatcaagatggctctttggctggcactgggggactggatgcatttggtcgagtttgggacctacgcacaggacgttgtatcatgttcttagaaggccacctgaaagaaatctatggaataaatttctcccccaatggctatcacattgcaaccggcagtggtgacaacacctgcaaagtgtgggacctccgacagcggcgttgcgtctacaccatccctgctcatcagaacttagtgactggtgtcaagtttgagcacttttcctttccctggagaatgggatgtgaagcagtagaccgcagccacgccgatggttatacagtgaagaagacttcacctcttcctattgagtttgcttggaatgctgacagcatcaggcaactctgaactgaacatttgctttgtcagaaaatatctttttttttactttgaagtttggcaaccttcatgttaccccaaagcaaaaccattgtgtcaggagtcaaacaaatgtttagaaagcaaacatgacgtctctattgtacaacctcctttctcttggctgtttaaaggatgtacttcgtgtattaaagggtactttatgttgaagtaacgaaaaaaccctaatgggtgttcctaaacctaaaccttttctttattccacatttgctacggtaaaatcctgttacaaaactaccctataaagaattattttctatagttaagcattttctgaatcctagccattggtccatagaggtctcttttttttggtttgggatataatggatgatctcaaatatggattactctgatttatgtctccttagcaccttgttaacaattttttttaaaatagaaggctgtttgcattttgggccagactgccagtaagccaggcctggactcaattacaattcttaacttgtctgtcagcacctntnaggggggatcctctatagacc

SEQ ID NO: 422741 - DNA, 371 bp, Homo sapiens
ggaggaattaatttaattacactttgtaatgtgttccctcttataaaatctccagagtgagattttcctttatatggaatcatctgcatttaaaaaaaaacttcgtaaaacatgcaaagagcagctgcctatatttgcagctgcaagacagacatttttactacacagtttctgcttgaaccatgacaggtgaagtttaaaaggattcattctaggcaaagtggttagtctttaaaaagttttgttgttgttgttcttgttttatttctagcccaatcaagcatcctttttggaaagttctttctccagtttcagaaatgtagagcctagttatgcttctcattcctcctaatacaaaagatgtttgtatt

SEQ ID NO: 422742 - DNA, 268 bp, Homo sapiens
ctaaagtcataatctagtatgcatagattgtaaacttttagaaattagaaacttgaaaacctacacttttgctttggtgattttacaggtttgtacaaacataattgagaaaaatgcaaacccagagtggaatcaggtcgtcaatcttcagatcaagtttccttcagtgtgtgaaaaaataaaactaacaatatatgactggtgagttgaaaatacgtatgtgtctaattcaacataaaataaacattggatattgtgaaacattact

SEQ ID NO: 422743 - DNA, 6621 bp, Homo sapiens
cggctcacacaggcgggtgccccttggggatgaggcctccaaaggaaggatcaggcagcaatatttgctgttctgctatatttgctgttctgcagcctccattggtgatatccaggcaaacaagatctggaatggacctccagcaaactccaacagacctgccctgaaggacctgactggtgaccagagcagatccctgccgtacaagctgatctccctgctaaatgaaaaagggcaagatactggggccaccattgacttggtgatcggctatgatccgccttctgctccacatccaaatgacctgagcgggcccagcgtgccaggcatgggaggagatggggaagaagatgaaggtgatgaagacaggttggacaatgcagtcaggggccctgggcccaaggggccagttgggacggtgtcggaagctcagcttgctcggaggctcaccaaagtaaagaacagccggcggatgctgtcaaataagccacaggacttccagatccgcgtccgagtgattgagggccgacagttaagtggtaacaacataaggcctgtggtcaaagttcacgtctgtggccagacacaccgaacaagaatcaagagaggaaacaaccctttttttgatgagttgtttttctacaatgtcaacatgaccccttctgaattgatggatgagatcatcagcatccgggtttataattctcactctctgcgggcagattgtctgatgggggaatttaagattgatgttggatttgtttatgatgaacctggccatgctgtcatgagaaagtggcttcttctcaatgacccggaagataccagttcaggttctaaaggttatatgaaagtcagcatgtttgtcctgggaaccggagatgagcctcctcctgagagacgagatcgtgataatgacagtgatgatgtggagagtaatttgttactccctgctggcattgccctccggtgggtgaccttcttgctgaaaatctaccgagctgaggacatcccccagatggatgatgccttctcacagacagtaaaggaaatatttggaggcaatgcagataagaaaaatctcgtggatccttttgtagaagtttcctttgctggaaaaaaggtttgtacaaacataattgagaaaaatgcaaacccagagtggaatcaggtcgtcaatcttcagatcaagtttccttcagtgtgtgaaaaaataaaactaacaatatatgactgggaccgtcttactaaaaatgatgtagttggaacaacatatctacacctctctaaaattgctgcctctggtggggaagtggaagatttctcatcttcgggaactggggctgcatcatatacagtaaacacaggagaaacagaggtaggctttgttccaacgtttggaccttgttacctgaatctttatggaagccccagagagtacacgggattcccagacccctatgatgagctgaatactggaaagggggaaggagttgcctacagaggcaggatcttggttgaattagccacttttcttgagaagacaccaccagataaaaagcttgagcccatttcaaatgatgacctgctggttgttgagaaataccagcgaaggcggaagtacagcctgtctgccgtgtttcattcagccaccatgttgcaagatgttggtgaggccattcagtttgaagtcagcattgggaactatggcaacaagtttgacaccacctgtaagcctttggcatcaacaactcagtacagccgtgctgtatttgatggcaactactattattacttgccttgggcccacaccaagccagttgttaccctgacttcatactgggaggatattagtcatcgcctggatgcggtgaacactctcctagctatggcagaacggctgcaaacaaatatagaagctctaaaatcagggatacaaggtaaaattcctgcaaaccagctggctgaattgtggctgaagctgatagatgaagttatagaagacacgagatacacgttgcctctcacagaaggaaaagccaacgtcacagttctcgatactcagatccgaaagctgcggtccaggtctctctcccaaatacatgaggcggctgtgaggatgaggtcggaagccacagatgtgaagtccacactggcagaaattgaggactggcttgataaattaatgcagctgactgaagagccacagaacagcatgcctgacatcatcatctggatgatccggggagagaagagactggcctatgcacgaattcccgcacatcaggtcttgtactccaccagtggtgagaatgcatctggaaaatactgtgggaaaacccaaaccatctttctgaagtatccacaggagaaaaacaacgggccaaaggtgcctgtggagttgcgagtgaacatctggctaggcttaagtgctgtggagaagaagtttaacagcttcgcagaaggaactttcaccgtctttgctgaaatgtatgaaaatcaagctctcatgtttggaaaatggggtacttctggattagtaggacgtcataagttttctgatgtcacaggaaaaataaaactcaagagggaattttttctgcctccaaaaggctgggaatgggaaggagagtggatagttgatcctgaaagaagcttgctgactgaggcagatgcaggtcacacggagttcactgatgaagtctatcagaacgagagccgctaccccgggggcgactggaagccggccgaggacacctacacggatgcgaacggcgataaagcagcatcacccagcgagttgacttgtcctccaggttgggaatgggaagatgatgcatggtcttatgacataaatcgagcggtggatgagaaaggctgggaatatggaatcaccattcctcctgatcataagcccaaatcctgggttgcagcagagaaaatgtaccacactcatagacggcgaaggctggtccgaaaacgcaagaaagatttaacacagactgcttcaagcaccgcaagggccatggaggaattgcaagaccaagagggctgggaatatgcttctctaattggctggaaatttcactggaaacaacgtagttcagataccttccgccgcagacgctggaggagaaaaatggctccttcagaaacacatggtgcagctgccatctttaaacttgaaggtgcccttggggcagacactaccgaagatggggatgagaagagcctggagaaacagaagcacagtgccaccactgtgttcggagcaaacacccccattgtttcctgcaattttgacagagtctacatctaccatctgcgctgctatgtctatcaagccagaaacctcttggctttagataaggatagcttttcagatccatatgctcatatctgtttcctccatcggagcaaaaccactgagatcatccattcaaccctgaatcccacgtgggaccaaacaattatattcgatgaagttgaaatctatggggaaccccaaacagttctacagaatccacccaaagttatcatggaactttttgacaatgaccaagtgggcaaagatgaatttttaggacgaagcattttctctcctgtggtgaaactgaactcagaaatggacatcacacccaaacttctctggcacccagtaatgaatggagacaaagcctgcggggatgttcttgtaactgcagagctgattctgaggggcaaggatggctccaaccttcccattcttccccctcaaagggcgccaaatctatacatggtcccccaggggatcaggcctgtggtccagctcactgccattgagattctagcttggggcttaagaaatatgaaaaacttccagatggcttctatcacatcccccagtcttgttgtggagtgtggaggagaaagggtggaatcggtggtgatcaaaaaccttaagaagacacccaactttccaagttctgttctcttcatgaaagtgttcttgcccaaggaggaattgtacatgcccccactggtgatcaaggtcatcgaccacaggcagtttgggcggaagcctgtcgtcggccagtgcaccatcgagcgcctggaccgctttcgctgtgacccttatgcagggaaagaggacatcgtcccacagctcaaagcctcccttctgtctgccccaccatgccgggacatcgttatcgaaatggaagacaccaaaccattactggcttctaagctgacagaaaaggaggaagaaatcgtggactggtggagtaaattttatgcttcctcaggggaacatgaaaaatgcggacagtatattcagaaaggctattccaagctcaagatatataattgtgaactagaaaatgtagcagaatttgagggcctgacagacttctcagatacgttcaagttgtaccgaggcaagtcggatgaaaatgaagatccttctgtggttggagagtttaagggctcctttcggatctaccctctgccggatgaccccagcgtgccagcccctcccagacagtttcgggaattacctgacagcgtcccacaggaatgcacggttaggatttacattgttcgaggcttagagctccagccccaggacaacaatggcctgtgtgacccttacataaaaataacactgggcaaaaaagtcattgaagaccgagatcactacattcccaacactctcaacccagtctttggcaggatgtacgaactgagctgctacttacctcaagaaaaagacctgaaaatttctgtctatgattatgacacctttacccgggatgaaaaagtaggagaaacaattattgatctggaaaaccgattcctttcccgctttgggtcccactgcggcataccagaggagtactgtgtttctggagtcaatacctggcgagatcaactgagaccaacacagctgcttcaaaatgtcgccagattcaaaggcttcccacaacccatcctttccgaagatgggagtagaatcagatatggaggacgagactacagcttggatgaatttgaagccaacaaaatcctgcaccagcacctcggggcccctgaagagcggcttgctcttcacatcctcaggactcaggggctggtccctgagcacgtggaaacaaggactttgcacagcaccttccagcccaacatttcccagggaaaacttcagatgtgggtggatgttttccccaagagtttggggccaccaggccctcctttcaacatcacaccccggaaagccaagaaatactacctgcgtgtgatcatctggaacaccaaggacgttatcttggacgagaaaagcatcacaggagaggaaatgagtgacatctacgtcaaaggctggattcctggcaatgaagaaaacaaacagaaaacagatgtccattacagatctttggatggtgaagggaattttaactggcgatttgttttcccgtttgactaccttccagccgaacaactctgtatcgttgcgaaaaaagagcatttctggagtattgaccaaacggaatttcgaatcccacccaggctgatcattcagatatgggacaatgacaagttttctctggatgactacttgggtttcctagaacttgacttgcgtcacacgatcattcctgcaaaatcaccagagaaatgcagattggacatgattccggacctcaaagccatgaacccccttaaagccaagacagcctccctctttgagcagaagtccatgaaaggatggtggccatgctacgcagagaaagatggcgcccgcgtaatggctgggaaagtggagatgacattggaaatcctcaacgagaaggaggccgacgagaggccagccgggaaggggcgggacgaacccaacatgaaccccaagctggacttaccaaatcgaccagaaacctccttcctctggttcaccaacccatgcaagaccatgaagttcatcgtgtggcgccgctttaagtgggtcatcatcggcttgctgttcctgcttatcctgctgctcttcgtggccgtgctcctctactctttgccgaactatttgtcaatgaagattgtaaagccaaatgtgtaacaaaggcaaaggcttaatttccagagtcatccagcaatgagagaatcctgcctctgtagaccaacatccagtgtgattttgtgtctgagaccacaccccagtagcaggttacgccatgtcaccgagccccattgattcccagagggtcttagtcctggaaagtcaggccaacaagcaacgtttgcatcatgttatctcttaagtattaaaagttttattttctaaagtttaaatcatgtttttcaaaatatttttcaaggtggctggttccatttaaaaatcatctttttatatgtgtcttcggttctagacttcagcttttggaaattgctaaatagaattcaaaaatctctgcatcctgaggtgatatacttcatatttgtaatcaactgaaagagctgtgcattataaaatcagttagaatagttagaacaattcttatttatgcccacaaccattgctatattttgtatggatgtcataaaagtctatttaacctctgtaatgaaactaaataaaaatgtttcaccttt

SEQ ID NO: 422744 - DNA, 877 bp, Homo sapiens
taaacttcatgttcctggggtctccatatctatgtgacctgttatatggtttgccctcttcctcacgggacatgtgcacgagcagctgacagaaaaggaggaagaaatcgtggactggtggagtaaattttatgcttcctcaggggaacatgaaaaatgcggacagtatattcagaaaggctattccaagctcaaggtacctggatctatgctgctatgggtggagaatcaacatcctttgaaactggccacaggaagagctaagaggatgactaaaaggtcccttgggtgggtgctaatgagcagggcccaggaaaacctctgtcttcccggagagccctcttgcatgagtttcggctttgccaagattccagggacttgaggacagctattgagttatggttacgtgactgccacattggggcttggaggcatctggcagatggttgggaatgggctggcaccacactaattaggccacgatgatccagtttgactcagggaaacccagaagtcatagtgctctttgcagaatgacacaagatgtcaacatgctttgttgtgtactttgaacagggattggtttcacaagctgaaaagttgaatctgtcacatgtatgcagcataaaatcacagccgtgagaacatgtatacagcaggaagacaagcgactgagctaggcacggctgactagctctgagctttctgttcatgttttgaattttctaattcttcattcaattttcagcctgtagtgtcctcaagcagaagcagtgctaaagttttcagaacagtgtatatgagaaaaaaaaactttagaatgagaaatatctggtcattgaaataattttccccatcaaagcaaaaaaaaaaaaaa

SEQ ID NO: 422745 - DNA, 170 bp, Homo sapiens
tccatgccccgctcccttctaagccaatagcagatgtggctaatccatcacagcactttttcccaatgactgcttttattccaaaaaagctgcaaacaccgagccacctagactagtttatcaaacttggcacttagagtgaagcctgttcacatgcctacaacttcttg

SEQ ID NO: 422746 - DNA, 6864 bp, Homo sapiens
  misc_feature (37)..(37): n is a, c, g, or t
aaatcctcccttcactgggagagaacttctctcccanggcggtgcgacccggagctccagcgccctgggagaaatcctcccttcactgggagagaacttctctcccagggcggtgcgacccggagctccagcgcccgagtctccacttcgtttgctgaaacttgctttctaccagctaagaaccatgctgcgagtgattgtggaatctgccagcaatatccctaaaacgaaatttggcaagccggatcctattgtttctgtcatttttaaggatgagaaaaagaaaacaaagaaagttgataatgaattgaaccctgtctggaatgagattttggagtttgacttgaggggtataccactggacttttcatcttcccttgggattattgtgaaagattttgagacaattggacaaaataaattaattggcacggcgactgtagccctgaaggacctgactggtgaccagagcagatccctgccgtacaagctgatctccctgctaaatgaaaaagggcaagatactggggccaccattgacttggtgatcggctatgatccgccttctgctccacatccaaatgacctgagcgggcccagcgtgccaggcatgggaggagatggggaagaagatgaaggtgatgaagacaggttggacaatgcagtcaggggccctgggcccaaggggccagttgggacggtgtcggaagctcagcttgctcggaggctcaccaaagtaaagaacagccggcggatgctgtcaaataagccacaggacttccagatccgcgtccgagtgattgagggccgacagttaagtggtaacaacataaggcctgtggtcaaagttcacgtctgtggccagacacaccgaacaagaatcaagagaggaaacaaccctttttttgatgagttgtttttctacaatgtcaacatgaccccttctgaattgatggatgagatcatcagcatccgggtttataattctcactctctgcgggcagattgtctgatgggggaatttaagattgatgttggatttgtttatgatgaacctggccatgctgtcatgagaaagtggcttcttctcaatgacccggaagataccagttcaggttctaaaggttatatgaaagtcagcatgtttgtcctgggaaccggagatgagcctcctcctgagagacgagatcgtgataatgacagtgatgatgtggagagtaatttgttactccctgctggcattgccctccggtgggtgaccttcttgctgaaaatctaccgagctgaggacatcccccagatggatgatgccttctcacagacagtaaaggaaatatttggaggcaatgcagataagaaaaatctcgtggatccttttgtagaagtttcctttgctggaaaaaaggtttgtacaaacataattgagaaaaatgcaaacccagagtggaatcaggtcgtcaatcttcagatcaagtttccttcagtgtgtgaaaaaataaaactaacaatatatgactgggaccgtcttactaaaaatgatgtagttggaacaacatatctacacctctctaaaattgctgcctctggtggggaagtggaagtaaacacaggagaaacagaggtaggctttgttccaacgtttggaccttgttacctgaatctttatggaagccccagagagtacacgggattcccagacccctatgatgagctgaatactggaaagggggaaggagttgcctacagaggcaggatcttggttgaattagccacttttcttgagaagacaccaccagataaaaagcttgagcccatttcaaatgatgacctgctggttgttgagaaataccagcgaaggcggaagtacagcctgtctgccgtgtttcattcagccaccatgttgcaagatgttggtgaggccattcagtttgaagtcagcattgggaactatggcaacaagtttgacaccacctgtaagcctttggcatcaacaactcagtacagccgtgctgtatttgatggcaactactattattacttgccttgggcccacaccaagccagttgttaccctgacttcatactgggaggatattagtcatcgcctggatgcggtgaacactctcctagctatggcagaacggctgcaaacaaatatagaagctctaaaatcagggatacaaggtaaaattcctgcaaaccagctggctgaattgtggctgaagctgatagatgaagttatagaagacacgagatacacgttgcctctcacagaaggaaaagccaacgtcacagttctcgatactcagatccgaaagctgcggtccaggtctctctcccaaatacatgaggcggctgtgaggatgaggtcggaagccacagatgtgaagtccacactggcagaaattgaggactggcttgataaattaatgcagctgactgaagagccacagaacagcatgcctgacatcatcatctggatgatccggggagagaagagactggcctatgcacgaattcccgcacatcaggtcttgtactccaccagtggtgagaatgcatctggaaaatactgtgggaaaacccaaaccatctttctgaagtatccacaggagaaaaacaacgggccaaaggtgcctgtggagttgcgagtgaacatctggctaggcttaagtgctgtggagaagaagtttaacagcttcgcagaaggaactttcaccgtctttgctgaaatgtatgaaaatcaagctctcatgtttggaaaatggggtacttctggattagtaggacgtcataagttttctgatgtcacaggaaaaataaaactcaagagggaattttttctgcctccaaaaggctgggaatgggaaggagagtggatagttgatcctgaaagaagcttgctgactgaggcagatgcaggtcacacggagttcactgatgaagtctatcagaacgagagccgctaccccgggggcgactggaagccggccgaggacacctacacggatgcgaacggcgataaagcagcatcacccagcgagttgacttgtcctccaggttgggaatgggaagatgatgcatggtcttatgacataaatcgagcggtggatgagaaaggctgggaatatggaatcaccattcctcctgatcataagcccaaatcctgggttgcagcagagaaaatgtaccacactcatagacggcgaaggctggtccgaaaacgcaagaaagatttaacacagactgcttcaagcaccgcaagggccatggaggaattgcaagaccaagagggctgggaatatgcttctctaattggctggaaatttcactggaaacaacgtagttcagataccttccgccgcagacgctggaggagaaaaatggctccttcagaaacacatggtgcagctgccatctttaaacttgaaggtgcccttggggcagacactaccgaagatggggatgagaagagcctggagaaacagaagcacagtgccaccactgtgttcggagcaaacacccccattgtttcctgcaattttgacagagtctacatctaccatctgcgctgctatgtctatcaagccagaaacctcttggctttagataaggatagcttttcagatccatatgctcatatctgtttcctccatcggagcaaaaccactgagatcatccattcaaccctgaatcccacgtgggaccaaacaattatattcgatgaagttgaaatctatggggaaccccaaacagttctacagaatccacccaaagttatcatggaactttttgacaatgaccaagtgggcaaagatgaatttttaggacgaagcattttctctcctgtggtgaaactgaactcagaaatggacatcacacccaaacttctctggcacccagtaatgaatggagacaaagcctgcggggatgttcttgtaactgcagagctgattctgaggggcaaggatggctccaaccttcccattcttccccctcaaagggcgccaaatctatacatggtcccccaggggatcaggcctgtggtccagctcactgccattgagattctagcttggggcttaagaaatatgaaaaacttccagatggcttctatcacatcccccagtcttgttgtggagtgtggaggagaaagggtggaatcggtggtgatcaaaaaccttaagaagacacccaactttccaagttctgttctcttcatgaaagtgttcttgcccaaggaggaattgtacatgcccccactggtgatcaaggtcatcgaccacaggcagtttgggcggaagcctgtcgtcggccagtgcaccatcgagcgcctggaccgctttcgctgtgacccttatgcagggaaagaggacatcgtcccacagctcaaagcctcccttctgtctgccccaccatgccgggacatcgttatcgaaatggaagacaccaaaccattactggcttctaagctgacagaaaaggaggaagaaatcgtggactggtggagtaaattttatgcttcctcaggggaacatgaaaaatgcggacagtatattcagaaaggctattccaagctcaagatatataattgtgaactagaaaatgtagcagaatttgagggcctgacagacttctcagatacgttcaagttgtaccgaggcaagtcggatgaaaatgaagatccttctgtggttggagagtttaagggctcctttcggatctaccctctgccggatgaccccagcgtgccagcccctcccagacagtttcgggaattacctgacagcgtcccacaggaatgcacggttaggatttacattgttcgaggcttagagctccagccccaggacaacaatggcctgtgtgacccttacataaaaataacactgggcaaaaaagtcattgaagaccgagatcactacattcccaacactctcaacccagtctttggcaggatgtacgaactgagctgctacttacctcaagaaaaagacctgaaaatttctgtctatgattatgacacctttacccgggatgaaaaagtaggagaaacaattattgatctggaaaaccgattcctttcccgctttgggtcccactgcggcataccagaggagtactgtgtttctggagtcaatacctggcgagatcaactgagaccaacacagctgcttcaaaatgtcgccagattcaaaggcttcccacaacccatcctttccgaagatgggagtagaatcagatatggaggacgagactacagcttggatgaatttgaagccaacaaaatcctgcaccagcacctcggggcccctgaagagcggcttgctcttcacatcctcaggactcaggggctggtccctgagcacgtggaaacaaggactttgcacagcaccttccagcccaacatttcccagggaaaacttcagatgtgggtggatgttttccccaagagtttggggccaccaggccctcctttcaacatcacaccccggaaagccaagaaatactacctgcgtgtgatcatctggaacaccaaggacgttatcttggacgagaaaagcatcacaggagaggaaatgagtgacatctacgtcaaaggctggattcctggcaatgaagaaaacaaacagaaaacagatgtccattacagatctttggatggtgaagggaattttaactggcgatttgttttcccgtttgactaccttccagccgaacaactctgtatcgttgcgaaaaaagagcatttctggagtattgaccaaacggaatttcgaatcccacccaggctgatcattcagatatgggacaatgacaagttttctctggatgactacttgggtttcctagaacttgacttgcgtcacacgatcattcctgcaaaatcaccagagaaatgcagattggacatgattccggacctcaaagccatgaacccccttaaagccaagacagcctccctctttgagcagaagtccatgaaaggatggtggccatgctacgcagagaaagatggcgcccgcgtaatggctgggaaagtggagatgacattggaaatcctcaacgagaaggaggccgacgagaggccagccgggaaggggcgggacgaacccaacatgaaccccaagctggacttaccaaatcgaccagaaacctccttcctctggttcaccaacccatgcaagaccatgaagttcatcgtgtggcgccgctttaagtgggtcatcatcggcttgctgttcctgcttatcctgctgctcttcgtggccgtgctcctctactctttgccgaactatttgtcaatgaagattgtaaagccaaatgtgtaacaaaggcaaaggcttaatttccagagtcatccagcaatgagagaatcctgcctctgtagaccaacatccagtgtgattttgtgtctgagaccacaccccagtagcaggttacgccatgtcaccgagccccattgattcccagagggtcttagtcctggaaagtcaggccaacaagcaacgtttgcatcatgttatctcttaagtattaaaagttttattttctaaagtttaaatcatgtttttcaaaatatttttcaaggtggctggttccatttaaaaatcatctttttatatgtgtcttcggttctagacttcagcttttggaaattgctaaatagaattcaaaaatctctgcatcctgaggtgatatacttcatatttgtaatcaactgaaagagctgtgcattataaaatcagttagaatagttagaacaattcttatttatgcccacaaccattgctatattttgtatggatgtcataaaagtctatttaacctctgtaatgaaactaaataaaaatgtttcaccttt

SEQ ID NO: 422747 - DNA, 6825 bp, Homo sapiens
atgatcaccttggtgcttggcaagaaaatgaggagagtttctcttctgccattagggtggaaagagcagttgtgaattaggaggctcaagcaggaaacagtacaaatagatcacgagcagatctctagagagaagatctgcagtgggagggatggagttgaagcttgtcattgcaagactgcagtgttccgtgatgtttcttcctttttccatcctaacactaatgagaactcagcaatccctggctgggtccaacggtgccatctcctctcattgtccctgtgatctctgccattctcttggtctcttcgaaggcaacctgagcaacagccccgatgtactgtgaacacattttcctaaagaatttttccaagtcacaagaagtcccaagtcagtgtcaccaagaggatctccttcacctgccactttaggaacacttaaaacataatggcagacaaaaccgtgtcctggaaacctgagcctttggacatttacaggataagggctatccctcactgggtttctttctgatattttaggagatggggaagaagatgaaggtgatgaagacaggttggacaatgcagtcaggggccctgggcccaaggggccagttgggacggtgtcggaagctcagcttgctcggaggctcaccaaagtaaagaacagccggcggatgctgtcaaataagccacaggacttccagatccgcgtccgagtgattgagggccgacagttaagtggtaacaacataaggcctgtggtcaaagttcacgtctgtggccagacacaccgaacaagaatcaagagaggaaacaaccctttttttgatgagttgtttttctacaatgtcaacatgaccccttctgaattgatggatgagatcatcagcatccgggtttataattctcactctctgcgggcagattgtctgatgggggaatttaagattgatgttggatttgtttatgatgaacctggccatgctgtcatgagaaagtggcttcttctcaatgacccggaagataccagttcaggttctaaaggttatatgaaagtcagcatgtttgtcctgggaaccggagatgagcctcctcctgagagacgagatcgtgataatgacagtgatgatgtggagagtaatttgttactccctgctggcattgccctccggtgggtgaccttcttgctgaaaatctaccgagctgaggacatcccccagatggatgatgccttctcacagacagtaaaggaaatatttggaggcaatgcagataagaaaaatctcgtggatccttttgtagaagtttcctttgctggaaaaaaggtttgtacaaacataattgagaaaaatgcaaacccagagtggaatcaggtcgtcaatcttcagatcaagtttccttcagtgtgtgaaaaaataaaactaacaatatatgactgggaccgtcttactaaaaatgatgtagttggaacaacatatctacacctctctaaaattgctgcctctggtggggaagtggaagatttctcatcttcgggaactggggctgcatcatatacagtaaacacaggagaaacagaggtaggctttgttccaacgtttggaccttgttacctgaatctttatggaagccccagagagtacacgggattcccagacccctatgatgagctgaatactggaaagggggaaggagttgcctacagaggcaggatcttggttgaattagccacttttcttgagaagacaccaccagataaaaagcttgagcccatttcaaatgatgacctgctggttgttgagaaataccagcgaaggcggaagtacagcctgtctgccgtgtttcattcagccaccatgttgcaagatgttggtgaggccattcagtttgaagtcagcattgggaactatggcaacaagtttgacaccacctgtaagcctttggcatcaacaactcagtacagccgtgctgtatttgatggcaactactattattacttgccttgggcccacaccaagccagttgttaccctgacttcatactgggaggatattagtcatcgcctggatgcggtgaacactctcctagctatggcagaacggctgcaaacaaatatagaagctctaaaatcagggatacaaggtaaaattcctgcaaaccagctggctgaattgtggctgaagctgatagatgaagttatagaagacacgagatacacgttgcctctcacagaaggaaaagccaacgtcacagttctcgatactcagatccgaaagctgcggtccaggtctctctcccaaatacatgaggcggctgtgaggatgaggtcggaagccacagatgtgaagtccacactggcagaaattgaggactggcttgataaattaatgcagctgactgaagagccacagaacagcatgcctgacatcatcatctggatgatccggggagagaagagactggcctatgcacgaattcccgcacatcaggtcttgtactccaccagtggtgagaatgcatctggaaaatactgtgggaaaacccaaaccatctttctgaagtatccacaggagaaaaacaacgggccaaaggtgcctgtggagttgcgagtgaacatctggctaggcttaagtgctgtggagaagaagtttaacagcttcgcagaaggaactttcaccgtctttgctgaaatgtatgaaaatcaagctctcatgtttggaaaatggggtacttctggattagtaggacgtcataagttttctgatgtcacaggaaaaataaaactcaagagggaattttttctgcctccaaaaggctgggaatgggaaggagagtggatagttgatcctgaaagaagcttgctgactgaggcagatgcaggtcacacggagttcactgatgaagtctatcagaacgagagccgctaccccgggggcgactggaagccggccgaggacacctacacggatgcgaacggcgataaagcagcatcacccagcgagttgacttgtcctccaggttgggaatgggaagatgatgcatggtcttatgacataaatcgagcggtggatgagaaaggctgggaatatggaatcaccattcctcctgatcataagcccaaatcctgggttgcagcagagaaaatgtaccacactcatagacggcgaaggctggtccgaaaacgcaagaaagatttaacacagactgcttcaagcaccgcaagggccatggaggaattgcaagaccaagagggctgggaatatgcttctctaattggctggaaatttcactggaaacaacgtagttcagataccttccgccgcagacgctggaggagaaaaatggctccttcagaaacacatggtgcagctgccatctttaaacttgaaggtgcccttggggcagacactaccgaagatggggatgagaagagcctggagaaacagaagcacagtgccaccactgtgttcggagcaaacacccccattgtttcctgcaattttgacagagtctacatctaccatctgcgctgctatgtctatcaagccagaaacctcttggctttagataaggatagcttttcagatccatatgctcatatctgtttcctccatcggagcaaaaccactgagatcatccattcaaccctgaatcccacgtgggaccaaacaattatattcgatgaagttgaaatctatggggaaccccaaacagttctacagaatccacccaaagttatcatggaactttttgacaatgaccaagtgggcaaagatgaatttttaggacgaagcattttctctcctgtggtgaaactgaactcagaaatggacatcacacccaaacttctctggcacccagtaatgaatggagacaaagcctgcggggatgttcttgtaactgcagagctgattctgaggggcaaggatggctccaaccttcccattcttccccctcaaagggcgccaaatctatacatggtcccccaggggatcaggcctgtggtccagctcactgccattgagattctagcttggggcttaagaaatatgaaaaacttccagatggcttctatcacatcccccagtcttgttgtggagtgtggaggagaaagggtggaatcggtggtgatcaaaaaccttaagaagacacccaactttccaagttctgttctcttcatgaaagtgttcttgcccaaggaggaattgtacatgcccccactggtgatcaaggtcatcgaccacaggcagtttgggcggaagcctgtcgtcggccagtgcaccatcgagcgcctggaccgctttcgctgtgacccttatgcagggaaagaggacatcgtcccacagctcaaagcctcccttctgtctgccccaccatgccgggacatcgttatcgaaatggaagacaccaaaccattactggcttctaagctgacagaaaaggaggaagaaatcgtggactggtggagtaaattttatgcttcctcaggggaacatgaaaaatgcggacagtatattcagaaaggctattccaagctcaagatatataattgtgaactagaaaatgtagcagaatttgagggcctgacagacttctcagatacgttcaagttgtaccgaggcaagtcggatgaaaatgaagatccttctgtggttggagagtttaagggctcctttcggatctaccctctgccggatgaccccagcgtgccagcccctcccagacagtttcgggaattacctgacagcgtcccacaggaatgcacggttaggatttacattgttcgaggcttagagctccagccccaggacaacaatggcctgtgtgacccttacataaaaataacactgggcaaaaaagtcattgaagaccgagatcactacattcccaacactctcaacccagtctttggcaggatgtacgaactgagctgctacttacctcaagaaaaagacctgaaaatttctgtctatgattatgacacctttacccgggatgaaaaagtaggagaaacaattattgatctggaaaaccgattcctttcccgctttgggtcccactgcggcataccagaggagtactgtgtttctggagtcaatacctggcgagatcaactgagaccaacacagctgcttcaaaatgtcgccagattcaaaggcttcccacaacccatcctttccgaagatgggagtagaatcagatatggaggacgagactacagcttggatgaatttgaagccaacaaaatcctgcaccagcacctcggggcccctgaagagcggcttgctcttcacatcctcaggactcaggggctggtccctgagcacgtggaaacaaggactttgcacagcaccttccagcccaacatttcccagggaaaacttcagatgtgggtggatgttttccccaagagtttggggccaccaggccctcctttcaacatcacaccccggaaagccaagaaatactacctgcgtgtgatcatctggaacaccaaggacgttatcttggacgagaaaagcatcacaggagaggaaatgagtgacatctacgtcaaaggctggattcctggcaatgaagaaaacaaacagaaaacagatgtccattacagatctttggatggtgaagggaattttaactggcgatttgttttcccgtttgactaccttccagccgaacaactctgtatcgttgcgaaaaaagagcatttctggagtattgaccaaacggaatttcgaatcccacccaggctgatcattcagatatgggacaatgacaagttttctctggatgactacttgggtttcctagaacttgacttgcgtcacacgatcattcctgcaaaatcaccagagaaatgcagattggacatgattccggacctcaaagccatgaacccccttaaagccaagacagcctccctctttgagcagaagtccatgaaaggatggtggccatgctacgcagagaaagatggcgcccgcgtaatggctgggaaagtggagatgacattggaaatcctcaacgagaaggaggccgacgagaggccagccgggaaggggcgggacgaacccaacatgaaccccaagctggacttaccaaatcgaccagaaacctccttcctctggttcaccaacccatgcaagaccatgaagttcatcgtgtggcgccgctttaagtgggtcatcatcggcttgctgttcctgcttatcctgctgctcttcgtggccgtgctcctctactctttgccgaactatttgtcaatgaagattgtaaagccaaatgtgtaacaaaggcaaaggcttaatttccagagtcatccagcaatgagagaatcctgcctctgtagaccaacatccagtgtgattttgtgtctgagaccacaccccagtagcaggttacgccatgtcaccgagccccattgattcccagagggtcttagtcctggaaagtcaggccaacaagcaacgtttgcatcatgttatctcttaagtattaaaagttttattttctaaagtttaaatcatgtttttcaaaatatttttcaaggtggctggttccatttaaaaatcatctttttatatgtgtcttcggttctagacttcagcttttggaaattgctaaatagaattcaaaaatctctgcatcctgaggtgatatacttcatatttgtaatcaactgaaagagctgtgcattataaaatcagttagaatagttagaacaattcttatttatgcccacaaccattgctatattttgtatggatgtcataaaagtctatttaacctctgtaatgaaactaaataaaaatgtttcaccttt

SEQ ID NO: 422748 - DNA, 7449 bp, Homo sapiens
  misc_feature (37)..(37): n is a, c, g, or t
  misc_feature (5146)..(5146): n is a, c, g, or t
  misc_feature (5149)..(5151): n is a, c, g, or t
aaatcctcccttcactgggagagaacttctctcccanggcggtgcgacccggagctccagcgccctgggagaaatcctcccttcactgggagagaacttctctcccagggcggtgcgacccggagctccagcgcccgagtctccacttcgtttgctgaaacttgctttctaccagctaagaaccatgctgcgagtgattgtggaatctgccagcaatatccctaaaacgaaatttggcaagccggatcctattgtttctgtcatttttaaggatgagaaaaagaaaacaaagaaagttgataatgaattgaaccctgtctggaatgagattttggagtttgacttgaggggtataccactggacttttcatcttcccttgggattattgtgaaagattttgagacaattggacaaaataaattaattggcacggcgactgtagccctgaaggacctgactggtgaccagagcagatccctgccgtacaagctgatctccctgctaaatgaaaaagggcaagatactggggccaccattgacttggtgatcggctatgatccgccttctgctccacatccaaatgacctgagcgggcccagcgtgccaggcatgggaggagatggggaagaagatgaaggtgatgaagacaggttggacaatgcagtcaggggccctgggcccaaggggccagttgggacggtgtcggaagctcagcttgctcggaggctcaccaaagtaaagaacagccggcggatgctgtcaaataagccacaggacttccagatccgcgtccgagtgattgagggccgacagttaagtggtaacaacataaggcctgtggtcaaagttcacgtctgtggccagacacaccgaacaagaatcaagagaggaaacaaccctttttttgatgagttgtttttctacaatgtcaacatgaccccttctgaattgatggatgagatcatcagcatccgggtttataattctcactctctgcgggcagattgtctgatgggggaatttaagattgatgttggatttgtttatgatgaacctggccatgctgtcatgagaaagtggcttcttctcaatgacccggaagataccagttcaggttctaaaggttatatgaaagtcagcatgtttgtcctgggaaccggagatgagcctcctcctgagagacgagatcgtgataatgacagtgatgatgtggagagtaatttgttactccctgctggcattgccctccggtgggtgaccttcttgctgaaaatctaccgagctgaggacatcccccagagtatgtactgatttaatcttgccccagaattgttgattatgtgtgtgatgaaatgtgttaaaaatcaaactttaatagtgattcgtgtccctatcgtatgtttttcttctgaaagggcttcatgggcttattttcattcattctggcccagttgaaagctacctgagcaggctcatggcacagctagttggttgctgatcatgttccttgttgagtacctgcctttggcccatttgactctctctcttgctattctatatcttctctttattctagaggatgctaaagagatatgagcagtcagcacttccaaccccttttatcccaaatgaaaatgtgaactgttattatcaaatcaaggtgtttgctatccactaatttttgtattttcaatagagaaggggtttcaccatgttgaccaggatggccttgctcttctgacctcatgatccaccagccttggcctctcaaagtcctgggattacaggcatgagccactgcgcctagcctgttgcaactattttgatgtataagagaacttttaaaattttgccaaatttctgggaattgaatttaatttctgctgtataactattaccttccagtggatgatgccttctcacagacagtaaaggaaatatttggaggcaatgcagataagaaaaatctcgtggatccttttgtagaagtttcctttgctggaaaaaaggtttgtacaaacataattgagaaaaatgcaaacccagagtggaatcaggtcgtcaatcttcagatcaagtttccttcagtgtgtgaaaaaataaaactaacaatatatgactgggaccgtcttactaaaaatgatgtagttggaacaacatatctacacctctctaaaattgctgcctctggtggggaagtggaagtaaacacaggagaaacagaggtaggctttgttccaacgtttggaccttgttacctgaatctttatggaagccccagagagtacacgggattcccagacccctatgatgagctgaatactggaaagggggaaggagttgcctacagaggcaggatcttggttgaattagccacttttcttgagaagacaccaccagataaaaagcttgagcccatttcaaatgatgacctgctggttgttgagaaataccagcgaaggcggaagtacagcctgtctgccgtgtttcattcagccaccatgttgcaagatgttggtgaggccattcagtttgaagtcagcattgggaactatggcaacaagtttgacaccacctgtaagcctttggcatcaacaactcagtacagccgtgctgtatttgatggcaactactattattacttgccttgggcccacaccaagccagttgttaccctgacttcatactgggaggatattagtcatcgcctggatgcggtgaacactctcctagctatggcagaacggctgcaaacaaatatagaagctctaaaatcagggatacaaggtaaaattcctgcaaaccagctggctgaattgtggctgaagctgatagatgaagttatagaagacacgagatacacgttgcctctcacagaaggaaaagccaacgtcacagttctcgatactcagatccgaaagctgcggtccaggtctctctcccaaatacatgaggcggctgtgaggatgaggtcggaagccacagatgtgaagtccacactggcagaaattgaggactggcttgataaattaatgcagctgactgaagagccacagaacagcatgcctgacatcatcatctggatgatccggggagagaagagactggcctatgcacgaattcccgcacatcaggtcttgtactccaccagtggtgagaatgcatctggaaaatactgtgggaaaacccaaaccatctttctgaagtatccacaggagaaaaacaacgggccaaaggtgcctgtggagttgcgagtgaacatctggctaggcttaagtgctgtggagaagaagtttaacagcttcgcagaaggaactttcaccgtctttgctgaaatgtatgaaaatcaagctctcatgtttggaaaatggggtacttctggattagtaggacgtcataagttttctgatgtcacaggaaaaataaaactcaagagggaattttttctgcctccaaaaggctgggaatgggaaggagagtggatagttgatcctgaaagaagcttgctgactgaggcagatgcaggtcacacggagttcactgatgaagtctatcagaacgagagccgctaccccgggggcgactggaagccggccgaggacacctacacggatgcgaacggcgataaagcagcatcacccagcgagttgacttgtcctccaggttgggaatgggaagatgatgcatggtcttatgacataaatcgagcggtggatgagaaaggctgggaatatggaatcaccattcctcctgatcataagcccaaatcctgggttgcagcagagaaaatgtaccacactcatagacggcgaaggctggtccgaaaacgcaagaaagatttaacacagactgcttcaagcaccgcaagggccatggaggaattgcaagaccaagagggctgggaatatgcttctctaattggctggaaatttcactggaaacaacgtagttcagataccttccgccgcagacgctggaggagaaaaatggctccttcagaaacacatggtgcagctgccatctttaaacttgaaggtgcccttggggcagacactaccgaagatggggatgagaagagcctggagaaacagaagcacagtgccaccactgtgttcggagcaaacacccccattgtttcctgcaattttgacagagtctacatctaccatctgcgctgctatgtctatcaagccagaaacctcttggctttagataaggatagcttttcagatccatatgctcatatctgtttcctccatcggagcaaaaccactgagatcatccattcaaccctgaatcccacgtgggaccaaacaattatattcgatgaagttgaaatctatggggaaccccaaacagttctacagaatccacccaaagttatcatggaactttttgacaatgaccaagtgggcaaagatgaatttttaggacgaagcattttctctcctgtggtgaaactgaactcagaaatggacatcacacccaaacttctctggcacccagtaatgaatggagacaaagcctgcggggatgttcttgtaactgcagagctgattctgaggggcaaggatggctccaaccttcccattcttccccctcaaagggcgccaaatctatacatggtcccccaggggatcaggcctgtggtccagctcactgccattgagattctagcttggggcttaagaaatatgaaaaacttccagatggcttctatcacatcccccagtcttgttgtggagtgtggaggagaaagggtggaatcggtggtgatcaaaaaccttaagaagacacccaactttccaagttctgttctcttcatgaaagtgttcttgcccaaggaggaattgtacatgcccccactggtgatcaaggtcatcgaccacaggcagtttgggcggaagcctgtcgtcggccagtgcaccatcgagcgcctggaccgctttcgctgtgacccttatgcagggaaagaggacatcgtcccacagctcaaagcctcccttctgtctgccccaccatgccgggacatcgttatcgaaatggaagacaccaaaccattactggcttctaagctgacagaaaagtgcttaagcagtatgtcaacagcactcagcaaaatggcttctccagcgacagtgcatntgnnngaaaaggaggaagaaatcgtggactggtggagtaaattttatgcttcctcaggggaacatgaaaaatgcggacagtatattcagaaaggctattccaagctcaagatatataattgtgaactagaaaatgtagcagaatttgagggcctgacagacttctcagatacgttcaagttgtaccgaggcaagtcggatgaaaatgaagatccttctgtggttggagagtttaagggctcctttcggatctaccctctgccggatgaccccagcgtgccagcccctcccagacagtttcgggaattacctgacagcgtcccacaggaatgcacggttaggatttacattgttcgaggcttagagctccagccccaggacaacaatggcctgtgtgacccttacataaaaataacactgggcaaaaaagtcattgaagaccgagatcactacattcccaacactctcaacccagtctttggcaggatgtacgaactgagctgctacttacctcaagaaaaagacctgaaaatttctgtctatgattatgacacctttacccgggatgaaaaagtaggagaaacaattattgatctggaaaaccgattcctttcccgctttgggtcccactgcggcataccagaggagtactgtgtttctggagtcaatacctggcgagatcaactgagaccaacacagctgcttcaaaatgtcgccagattcaaaggcttcccacaacccatcctttccgaagatgggagtagaatcagatatggaggacgagactacagcttggatgaatttgaagccaacaaaatcctgcaccagcacctcggggcccctgaagagcggcttgctcttcacatcctcaggactcaggggctggtccctgagcacgtggaaacaaggactttgcacagcaccttccagcccaacatttcccagatactacctgcgtgtgatcatctggaacaccaaggacgttatcttggacgagaaaagcatcacaggagaggaaatgagtgacatctacgtcaaaggctggattcctggcaatgaagaaaacaaacagaaaacagatgtccattacagatctttggatggtgaagggaattttaactggcgatttgttttcccgtttgactaccttccagccgaacaactctgtatcgttgcgaaaaaagagcatttctggagtattgaccaaacggaatttcgaatcccacccaggctgatcattcagatatgggacaatgacaagttttctctggatgactacttgggtttcctagaacttgacttgcgtcacacgatcattcctgcaaaatcaccagagaaatgcagattggacatgattccggacctcaaagccatgaacccccttaaagccaagacagcctccctctttgagcagaagtccatgaaaggatggtggccatgctacgcagagaaagatggcgcccgcgtaatggctgggaaagtggagatgacattggaaatcctcaacgagaaggaggccgacgagaggccagccgggaaggggcgggacgaacccaacatgaaccccaagctggacttaccaaatcgaccagaaacctccttcctctggttcaccaacccatgcaagaccatgaagttcatcgtgtggcgccgctttaagtgggtcatcatcggcttgctgttcctgcttatcctgctgctcttcgtggccgtgctcctctactctttgccgaactatttgtcaatgaagattgtaaagccaaatgtgtaacaaaggcaaaggcttaatttccagagtcatccagcaatgagagaatcctgcctctgtagaccaacatccagtgtgattttgtgtctgagaccacaccccagtagcaggttacgccatgtcaccgagccccattgattcccagagggtcttagtcctggaaagtcaggccaacaagcaacgtttgcatcatgttatctcttaagtattaaaagttttattttctaaagtttaaatcatgtttttcaaaatatttttcaaggtggctggttccatttaaaaatcatctttttatatgtgtcttcggttctagacttcagcttttggaaattgctaaatagaattcaaaaatctctgcatcctgaggtgatatacttcatatttgtaatcaactgaaagagctgtgcattataaaatcagttagaatagttagaacaattcttatttatgcccacaaccattgctatattttgtatggatgtcataaaagtctatttaacctctgtaatgaaactaaataaaaatgtttcaccttt

SEQ ID NO: 422749 - DNA, 6683 bp, Homo sapiens
  misc_feature (37)..(37): n is a, c, g, or t
aaatcctcccttcactgggagagaacttctctcccanggcggtgcgacccggagctccagcgccctgggagaaatcctcccttcactgggagagaacttctctcccagggcggtgcgacccggagctccagcgcccgagtctccacttcgtttgctgaaacttgctttctaccagctaagaaccatgctgcgagtgattgtggaatctgccagcaatatccctaaaacgaaatttggcaagccggatcctattgtttctgtcatttttaaggatgagaaaaagaaaacaaagaaagttgataatgaattgaaccctgtctggaatgagattttggagtttgacttgaggggtataccactggacttttcatcttcccttgggattattgtgaaagattttgagacaattggacaaaataaattaattggcacggcgactgtagccctgaaggacctgactggtgaccagagcagatccctgccgtacaagctgatctccctgctaaatgaaaaagggcaagatactggggccaccattgacttggtgatcggctatgatccgccttctgctccacatccaaatgacctgagcgggcccagcgtgccaggcatgggaggagatggggaagaagatgaaggtgatgaagacaggttggacaatgcagtcaggggccctgggcccaaggggccagttgggacggtgtcggaagctcagcttgctcggaggctcaccaaagtaaagaacagccggcggatgctgtcaaataagccacaggacttccagatccgcgtccgagtgattgagggccgacagttaagtggtaacaacataaggcctgtggtcaaagttcacgtctgtggccagacacaccgaacaagaatcaagagaggaaacaaccctttttttgatgagttgtttttctacaatgtcaacatgaccccttctgaattgatggatgagatcatcagcatccgggtttataattctcactctctgcgggcagattgtctgatgggggaatttaagattgatgttggatttgtttatgatgaacctggccatgctgtcatgagaaagtggcttcttctcaatgacccggaagataccagttcaggttctaaaggttatatgaaagtcagcatgtttgtcctgggaaccggagatgagcctcctcctgagagacgagatcgtgataatgacagtgatgatgtggagagtaatttgttactccctgctggcattgccctccggtgggtgaccttcttgctgaaaatctaccgagctgaggacatcccccagatggatgatgccttctcacagacagtaaaggaaatatttggaggcaatgcagataagaaaaatctcgtggatccttttgtagaagtttcctttgctggaaaaaaggtttgtacaaacataattgagaaaaatgcaaacccagagtggaatcaggtcgtcaatcttcagatcaagtttccttcagtgtgtgaaaaaataaaactaacaatatatgactgggaccgtcttactaaaaatgatgtagttggaacaacatatctacacctctctaaaattgctgcctctggtggggaagtggaagtaaacacaggagaaacagaggtaggctttgttccaacgtttggaccttgttacctgaatctttatggaagccccagagagtacacgggattcccagacccctatgatgagctgaatactggaaagggggaaggagttgcctacagaggcaggatcttggttgaattagccacttttcttgagaagacaccaccagataaaaagcttgagcccatttcaaatgatgacctgctggttgttgagaaataccagcgaaggcggaagtacagcctgtctgccgtgtttcattcagccaccatgttgcaagatgttggtgaggccattcagtttgaagtcagcattgggaactatggcaacaagtttgacaccacctgtaagcctttggcatcaacaactcagtacagccgtgctgtatttgatggcaactactattattacttgccttgggcccacaccaagccagttgttaccctgacttcatactgggaggatattagtcatcgcctggatgcggtgaacactctcctagctatggcagaacggctgcaaacaaatatagaagctctaaaatcagggatacaaggtaaaattcctgcaaaccagctggctgaattgtggctgaagctgatagatgaagttatagaagacacgagatacacgttgcctctcacagaaggaaaagccaacgtcacagttctcgatactcagatccgaaagctgcggtccaggtctctctcccaaatacatgaggcggctgtgaggatgaggtcggaagccacagatgtgaagtccacactggcagaaattgaggactggcttgataaattaatgcagctgactgaagagccacagaacagcatgcctgacatcatcatctggatgatccggggagagaagagactggcctatgcacgaattcccgcacatcaggtcttgtactccaccagtggtgagaatgcatctggaaaatactgtgggaaaacccaaaccatctttctgaagtatccacaggagaaaaacaacgggccaaaggtgcctgtggagttgcgagtgaacatctggctaggcttaagtgctgtggagaagaagtttaacagcttcgcagaaggaactttcaccgtctttgctgaaatgtatgaaaatcaagctctcatgtttggaaaatggggtacttctggattagtaggacgtcataagttttctgatgtcacaggaaaaataaaactcaagagggaattttttctgcctccaaaaggctgggaatgggaaggagagtggatagttgatcctgaaagaagcttgctgactgaggcagatgcaggtcacacggagttcactgatgaagtctatcagaacgagagccgctaccccgggggcgactggaagccggccgaggacacctacacggatgcgaacggcgataaagcagcatcacccagcgagttgacttgtcctccaggttgggaatgggaagatgatgcatggtcttatgacataaatcgagcggtggatgagaaaggctgggaatatggaatcaccattcctcctgatcataagcccaaatcctgggttgcagcagagaaaatgtaccacactcatagacggcgaaggctggtccgaaaacgcaagaaagatttaacacagactgcttcaagcaccgcaagggccatggaggaattgcaagaccaagagggctgggaatatgcttctctaattggctggaaatttcactggaaacaacgtagttcagataccttccgccgcagacgctggaggagaaaaatggctccttcagaaacacatggtgcagctgccatctttaaacttgaaggtgcccttggggcagacactaccgaagatggggatgagaagagcctggagaaacagaagcacagtgccaccactgtgttcggagcaaacacccccattgtttcctgcaattttgacagagtctacatctaccatctgcgctgctatgtctatcaagccagaaacctcttggctttagataaggatagcttttcagatccatatgctcatatctgtttcctccatcggagcaaaaccactgagatcatccattcaaccctgaatcccacgtgggaccaaacaattatattcgatgaagttgaaatctatggggaaccccaaacagttctacagaatccacccaaagttatcatggaactttttgacaatgaccaagtgggcaaagatgaatttttaggacgaagcattttctctcctgtggtgaaactgaactcagaaatggacatcacacccaaacttctctggcacccagtaatgaatggagacaaagcctgcggggatgttcttgtaactgcagagctgattctgaggggcaaggatggctccaaccttcccattcttccccctcaaagggcgccaaatctatacatggtcccccaggggatcaggcctgtggtccagctcactgccattgagattctagcttggggcttaagaaatatgaaaaacttccagatggcttctatcacatcccccagtcttgttgtggagtgtggaggagaaagggtggaatcggtggtgatcaaaaaccttaagaagacacccaactttccaagttctgttctcttcatgaaagtgttcttgcccaaggaggaattgtacatgcccccactggtgatcaaggtcatcgaccacaggcagtttgggcggaagcctgtcgtcggccagtgcaccatcgagcgcctggaccgctttcgctgtgacccttatgcagggaaagaggacatcgtcccacagctcaaagcctcccttctgtctgccccaccatgccgggacatcgttatcgaaatggaagacaccaaaccattactggcttctaagctgacagaaaaggaggaagaaatcgtggactggtggagtaaattttatgcttcctcaggggaacatgaaaaatgcggacagtatattcagaaaggctattccaagctcaagatatataattgtgaactagaaaatgtagcagaatttgagggcctgacagacttctcagatacgttcaagttgtaccgaggcaagtcggatgaaaatgaagatccttctgtggttggagagtttaagggctcctttcggatctaccctctgccggatgaccccagcgtgccagcccctcccagacagtttcgggaattacctgacagcgtcccacaggaatgcacggttaggatttacattgttcgaggcttagagctccagccccaggacaacaatggcctgtgtgacccttacataaaaataacactgggcaaaaaagtcattgaagaccgagatcactacattcccaacactctcaacccagtctttggcaggatgtacgaactgagctgctacttacctcaagaaaaagacctgaaaatttctgtctatgattatgacacctttacccgggatgaaaaagtaggagaaacaattattgatctggaaaaccgattcctttcccgctttgggtcccactgcggcataccagaggagtactgtgtttctggagtcaatacctggcgagatcaactgagaccaacacagctgcttcaaaatgtcgccagattcaaaggcttcccacaacccatcctttccgaagatgggagtagaatcagatatggaggacgagactacagcttggatgaatttgaagccaacaaaatcctgcaccagcacctcggggcccctgaagagcggcttgctcttcacatcctcaggactcaggggctggtccctgagcacgtggaaacaaggactttgcacagcaccttccagcccaacatttcccagggaaaacttcagatgtgggtggatgttttccccaagagtttggggccaccaggccctcctttcaacatcacaccccggaaagccaagaaatactacctgcgtgtgatcatctggaacaccaaggacgttatcttggacgagaaaagcatcacaggagaggaaatgagtgacatctacgtcaaaggctggattcctggcaatgaagaaaacaaacagaaaacagatgtccattacagatctttggatggtgaagggaattttaactggcgatttgttttcccgtttgactaccttccagccgaacaactctgtatcgttgcgaaaaaagagcatttctggagtattgaccaaacggaatttcgaatcccacccaggctgatcattcagatatgggacaatgacaagttttctctggatgactacttgggtttcctagaacttgacttgcgtcacacgatcattcctgcaaaatcaccagagaaatgcagattggacatgattccggacctcaaagccatgaacccccttaaagccaagacagcctccctctttgagcagaagtccatgaaaggatggtggccatgctacgcagagaaagatggcgcccgcgtaatggctgggaaagtggagatgacattggaaatcctcaacgagaaggaggccgacgagaggccagccgggaaggggcgggacgaacccaacatgaaccccaagctggacttaccaaatcgaccagaaacctccttcctctggttcaccaacccatgcaagaccatgaagttcatcgtgtggcgccgctttaagtgggtcatcatcggcttgctgttcctgcttatcctgctgctcttcgtggccgtgctcctctactctttgccgaactatttgtcaatgaagattgtaaagccaaatgtgtaacaaaggcaaaggcttaatttccagagtcatccagcaatgagagaatcctgcctctgtagaccaacatccagtgtgattttgtgtctgagaccacaccccagtagcaggttacgccatgtcaccgagccccattgattcccagagggtcttagtcctggaaagtcaggccaacaagcaacgtttgcatcatgttatctcttaagtattaaaagttttattttctaaagtttaaatcatgtttttcaaaatatttttcaaggtggctggttccatttaaaaatcatctttttatatgtgtcttcggttctagacttcagcttttggaaattaagcctttgcaagggatcctcta

SEQ ID NO: 422750 - DNA, 6850 bp, Homo sapiens
  misc_feature (37)..(37): n is a, c, g, or t
aaatcctcccttcactgggagagaacttctctcccanggcggtgcgacccggagctccagcgccctgggagaaatcctcccttcactgggagagaacttctctcccagggcggtgcgacccggagctccagcgcccgagtctccacttcgtttgctgaaacttgctttctaccagctaagaaccatgctgcgagtgattgtggaatctgccagcaatatccctaaaacgaaatttggcaagccggatcctattgtttctgtcatttttaaggatgagaaaaagaaaacaaagaaagttgataatgaattgaaccctgtctggaatgagattttggagtttgacttgaggggtataccactggacttttcatcttcccttgggattattgtgaaagattttgagacaattggacaaaataaattaattggcacggcgactgtagccctgaaggacctgactggtgaccagagcagatccctgccgtacaagctgatctccctgctaaatgaaaaagggcaagatactggggccaccattgacttggtgatcggctatgatccgccttctgctccacatccaaatgacctgagcgggcccagcgtgccaggcatgggaggagatggggaagaagatgaaggtgatgaagacaggttggacaatgcagtcaggggccctgggcccaaggggccagttgggacggtgtcggaagctcagcttgctcggaggctcaccaaagtaaagaacagccggcggatgctgtcaaataagccacaggacttccagatccgcgtccgagtgattgagggccgacagttaagtggtaacaacataaggcctgtggtcaaagttcacgtctgtggccagacacaccgaacaagaatcaagagaggaaacaaccctttttttgatgagttgtttttctacaatgtcaacatgaccccttctgaattgatggatgagatcatcagcatccgggtttataattctcactctctgcgggcagattgtctgatgggggaatttaagattgatgttggatttgtttatgatgaacctggccatgctgtcatgagaaagtggcttcttctcaatgacccggaagataccagttcaggttctaaaggttatatgaaagtcagcatgtttgtcctgggaaccggagatgagcctcctcctgagagacgagatcgtgataatgacagtgatgatgtggagagtaatttgttactccctgctggcattgccctccggtgggtgaccttcttgctgaaaatctaccgagctgaggacatcccccagatggatgatgccttctcacagacagtaaaggaaatatttggaggcaatgcagataagaaaaatctcgtggatccttttgtagaagtttcctttgctggaaaaaaggtttgtacaaacataattgagaaaaatgcaaacccagagtggaatcaggtcgtcaatcttcagatcaagtttccttcagtgtgtgaaaaaataaaactaacaatatatgactgggaccgtcttactaaaaatgatgtagttggaacaacatatctacacctctctaaaattgctgcctctggtggggaagtggaagatttctcatcttcgggaactggggctgcatcatatacagtaaacacaggagaaacagaggtaggctttgttccaacgtttggaccttgttacctgaatctttatggaagccccagagagtacacgggattcccagacccctatgatgagctgaatactggaaagggggaaggagttgcctacagaggcaggatcttggttgaattagccacttttcttgagaagacaccaccagataaaaagcttgagcccatttcaaatgatgacctgctggttgttgagaaataccagcgaaggcggaagtacagcctgtctgccgtgtttcattcagccaccatgttgcaagatgttggtgaggccattcagtttgaagtcagcattgggaactatggcaacaagtttgacaccacctgtaagcctttggcatcaacaactcagtacagccgtgctgtatttgatggcaactactattattacttgccttgggcccacaccaagccagttgttaccctgacttcatactgggaggatattagtcatcgcctggatgcggtgaacactctcctagctatggcagaacggctgcaaacaaatatagaagctctaaaatcagggatacaaggtaaaattcctgcaaaccagctggctgaattgtggctgaagctgatagatgaagttatagaagacacgagatacacgttgcctctcacagaaggaaaagccaacgtcacagttctcgatactcagatccgaaagctgcggtccaggtctctctcccaaatacatgaggcggctgtgaggatgaggtcggaagccacagatgtgaagtccacactggcagaaattgaggactggcttgataaattaatgcagctgactgaagagccacagaacagcatgcctgacatcatcatctggatgatccggggagagaagagactggcctatgcacgaattcccgcacatcaggtcttgtactccaccagtggtgagaatgcatctggaaaatactgtgggaaaacccaaaccatctttctgaagtatccacaggagaaaaacaacgggccaaaggtgcctgtggagttgcgagtgaacatctggctaggcttaagtgctgtggagaagaagtttaacagcttcgcagaaggaactttcaccgtctttgctgaaatgtatgaaaatcaagctctcatgtttggaaaatggggtacttctggattagtaggacgtcataagttttctgatgtcacaggaaaaataaaactcaagagggaattttttctgcctccaaaaggctgggaatgggaaggagagtggatagttgatcctgaaagaagcttgctgactgaggcagatgcaggtcacacggagttcactgatgaagtctatcagaacgagagccgctaccccgggggcgactggaagccggccgaggacacctacacggatgcgaacggcgataaagcagcatcacccagcgagttgacttgtcctccaggttgggaatgggaagatgatgcatggtcttatgacataaatcgagcggtggatgagaaaggctgggaatatggaatcaccattcctcctgatcataagcccaaatcctgggttgcagcagagaaaatgtaccacactcatagacggcgaaggctggtccgaaaacgcaagaaagatttaacacagactgcttcaagcaccgcaagggccatggaggaattgcaagaccaagagggctgggaatatgcttctctaattggctggaaatttcactggaaacaacgtagttcagataccttccgccgcagacgctggaggagaaaaatggctccttcagaaacacatggtgcagctgccatctttaaacttgaaggtgcccttggggcagacactaccgaagatggggatgagaagagcctggagaaacagaagcacagtgccaccactgtgttcggagcaaacacccccattgtttcctgcaattttgacagagtctacatctaccatctgcgctgctatgtctatcaagccagaaacctcttggctttagataaggatagcttttcagatccatatgctcatatctgtttcctccatcggagcaaaaccactgagatcatccattcaaccctgaatcccacgtgggaccaaacaattatattcgatgaagttgaaatctatggggaaccccaaacagttctacagaatccacccaaagttatcatggaactttttgacaatgaccaagtgggcaaagatgaatttttaggacgaagcattttctctcctgtggtgaaactgaactcagaaatggacatcacacccaaacttctctggcacccagtaatgaatggagacaaagcctgcggggatgttcttgtaactgcagagctgattctgaggggcaaggatggctccaaccttcccattcttccccctcaaagggcgccaaatctatacatggtcccccaggggatcaggcctgtggtccagctcactgccattgagattctagcttggggcttaagaaatatgaaaaacttccagatggcttctatcacatcccccagtcttgttgtggagtgtggaggagaaagggtggaatcggtggtgatcaaaaaccttaagaagacacccaactttccaagttctgttctcttcatgaaagtgttcttgcccaaggaggaattgtacatgcccccactggtgatcaaggtcatcgaccacaggcagtttgggcggaagcctgtcgtcggccagtgcaccatcgagcgcctggaccgctttcgctgtgacccttatgcagggaaagaggacatcgtcccacagctcaaagcctcccttctgtctgccccaccatgccgggacatcgttatcgaaatggaagacaccaaaccattactggcttctaagctgacagaaaaggaggaagaaatcgtggactggtggagtaaattttatgcttcctcaggggaacatgaaaaatgcggacagtatattcagaaaggctattccaagctcaagatatataattgtgaactagaaaatgtagcagaatttgagggcctgacagacttctcagatacgttcaagttgtaccgaggcaagtcggatgcctctgccggatgaccccagcgtgccagcccctcccagacagtttcgggaattacctgacagcgtcccacaggaatgcacggttaggatttacattgttcgaggcttagagctccagccccaggacaacaatggcctgtgtgacccttacataaaaataacactgggcaaaaaagtcattgaagaccgagatcactacattcccaacactctcaacccagtctttggcaggatgtacgaactgagctgctacttacctcaagaaaaagacctgaaaatttctgtctatgattatgacacctttacccgggatgaaaaagtaggagaaacaattattgatctggaaaaccgattcctttcccgctttgggtcccactgcggcataccagaggagtactgtgtttctggagtcaatacctggcgagatcaactgagaccaacacagctgcttcaaaatgtcgccagattcaaaggcttcccacaacccatcctttccgaagatgggagtagaatcagatatggaggacgagactacagcttggatgaatttgaagccaacaaaatcctgcaccagcacctcggggcccctgaagagcggcttgctcttcacatcctcaggactcaggggctggtccctgagcacgtggaaacaaggactttgcacagcaccttccagcccaacatttcccagggaaaacttcagatgtgggtggatgttttccccaagagtttggggccaccaggccctcctttcaacatcacaccccggaaagccaagaaatactacctgcgtgtgatcatctggaacaccaaggacgttatcttggacgagaaaagcatcacaggagaggaaatgagtgacatctacgtcaaaggctggattcctggcaatgaagaaaacaaacagaaaacagatgtccattacagatctttggatggtgaagggaattttaactggcgatttgttttcccgtttgactaccttccagccgaacaactctgtatcgttgcgaaaaaagagcatttctggagtattgaccaaacggaatttcgaatcccacccaggctgatcattcagatatgggacaatgacaagttttctctggatgactacttgggtttcctagaacttgacttgcgtcacacgatcattcctgcaaaatcaccagagaaatgcagattggacatgattccggacctcaaagccatgaacccccttaaagccaagacagcctccctctttgagcagaagtccatgaaaggatggtggccatgctacgcagagaaagatggcgcccgcgtaatggctgggaaagtggagatgacattggaaatcctcaacgagaaggaggccgacgagaggccagccgggaaggggcgggacgaacccaacatgaaccccaagctggacttaccaaatcgaccagaaacctccttcctctggttcaccaacccatgcaagaccatgaagttcatcgtgtggcgccgctttaagtgggtcatcatcggcttgctgttcctgcttatcctgctgctcttcgtggccgtgctcctctactctttgccgaactatttgtcaatgaagattgtaaagccaaatgtgtaacaaaggcaaaggcttaatttccagagtcatccagcaatgagagaatcctgcctctgtagaccaacatccagtgtgattttgtgtctgagaccacaccccagtagcaggttacgccatgtcaccgagccccattgattcccagagggtcttagtcctggaaagtcaggccaacaagcaacgtttgcatcatgttatctcttaagtattaaaagttttattttctaaagtttaaatcatgtttttcaaaatatttttcaaggtggctggttccatttaaaaatcatctttttatatgtgtcttcggttctagacttcagcttttggaaattgctaaatagaattcaaaaatctctgcatcctgaggtgatatacttcatatttgtaatcaactgaaagagctgtgcattataaaatcagttagaatagttagaacaattcttatttatgcccacaaccattgctatattttgtatggatgtcataaaagtctatttaacctctgtaatgaaactaaataaaaatgtttcaccttt

SEQ ID NO: 422751 - DNA, 4863 bp, Homo sapiens
  misc_feature (37)..(37): n is a, c, g, or t
  misc_feature (4851)..(4851): n is a, c, g, or t
aaatcctcccttcactgggagagaacttctctcccanggcggtgcgacccggagctccagcgccctgggagaaatcctcccttcactgggagagaacttctctcccagggcggtgcgacccggagctccagcgcccgagtctccacttcgtttgctgaaacttgctttctaccagctaagaaccatgctgcgagtgattgtggaatctgccagcaatatccctaaaacgaaatttggcaagccggatcctattgtttctgtcatttttaaggatgagaaaaagaaaacaaagaaagttgataatgaattgaaccctgtctggaatgagattttggagtttgacttgaggggtataccactggacttttcatcttcccttgggattattgtgaaagattttgagacaattggacaaaataaattaattggcacggcgactgtagccctgaaggacctgactggtgaccagagcagatccctgccgtacaagctgatctccctgctaaatgaaaaagggcaagatactggggccaccattgacttggtgatcggctatgatccgccttctgctccacatccaaatgacctgagcgggcccagcgtgccaggcatgggaggagatggggaagaagatgaaggtgatgaagacaggttggacaatgcagtcaggggccctgggcccaaggggccagttgggacggtgtcggaagctcagcttgctcggaggctcaccaaagtaaagaacagccggcggatgctgtcaaataagccacaggacttccagatccgcgtccgagtgattgagggccgacagttaagtggtaacaacataaggcctgtggtcaaagttcacgtctgtggccagacacaccgaacaagaatcaagagaggaaacaaccctttttttgatgagttgtttttctacaatgtcaacatgaccccttctgaattgatggatgagatcatcagcatccgggtttataattctcactctctgcgggcagattgtctgatgggggaatttaagattgatgttggatttgtttatgatgaacctggccatgctgtcatgagaaagtggcttcttctcaatgacccggaagataccagttcaggttctaaaggttatatgaaagtcagcatgtttgtcctgggaaccggagatgagcctcctcctgagagacgagatcgtgataatgacagtgatgatgtggagagtaatttgttactccctgctggcattgccctccggtgggtgaccttcttgctgaaaatctaccgagctgaggacatcccccagatggatgatgccttctcacagacagtaaaggaaatatttggaggcaatgcagataagaaaaatctcgtggatccttttgtagaagtttcctttgctggaaaaaaggtttgtacaaacataattgagaaaaatgcaaacccagagtggaatcaggtcgtcaatcttcagatcaagtttccttcagtgtgtgaaaaaataaaactaacaatatatgactgggaccgtcttactaaaaatgatgtagttggaacaacatatctacacctctctaaaattgctgcctctggtggggaagtggaagatttctcatcttcgggaactggggctgcatcatatacagtaaacacaggagaaacagaggtaggctttgttccaacgtttggaccttgttacctgaatctttatggaagccccagagagtacacgggattcccagacccctatgatgagctgaatactggaaagggggaaggagttgcctacagaggcaggatcttggttgaattagccacttttcttgagaagacaccaccagataaaaagcttgagcccatttcaaatgatgacctgctggttgttgagaaataccagcgaaggcggaagtacagcctgtctgccgtgtttcattcagccaccatgttgcaagatgttggtgaggccattcagtttgaagtcagcattgggaactatggcaacaagtttgacaccacctgtaagcctttggcatcaacaactcagtacagccgtgctgtatttgatggcaactactattattacttgccttgggcccacaccaagccagttgttaccctgacttcatactgggaggatattagtcatcgcctggatgcggtgaacactctcctagctatggcagaacggctgcaaacaaatatagaagctctaaaatcagggatacaaggtaaaattcctgcaaaccagctggctgaattgtggctgaagctgatagatgaagttatagaagacacgagatacacgttgcctctcacagaaggaaaagccaacgtcacagttctcgatactcagatccgaaagctgcggtccaggtctctctcccaaatacatgaggcggctgtgaggatgaggtcggaagccacagatgtgaagtccacactggcagaaattgaggactggcttgataaattaatgcagctgactgaagagccacagaacagcatgcctgacatcatcatctggatgatccggggagagaagagactggcctatgcacgaattcccgcacatcaggtcttgtactccaccagtggtgagaatgcatctggaaaatactgtgggaaaacccaaaccatctttctgaagtatccacaggagaaaaacaacgggccaaaggtgcctgtggagttgcgagtgaacatctggctaggcttaagtgctgtggagaagaagtttaacagcttcgcagaaggaactttcaccgtctttgctgaaatgtatgaaaatcaagctctcatgtttggaaaatggggtacttctggattagtaggacgtcataagttttctgatgtcacaggaaaaataaaactcaagagggaattttttctgcctccaaaaggctgggaatgggaaggagagtggatagttgatcctgaaagaagcttgctgactgaggcagatgcaggtcacacggagttcactgatgaagtctatcagaacgagagccgctaccccgggggcgactggaagccggccgaggacacctacacggatgcgaacggcgataaagcagcatcacccagcgagttgacttgtcctccaggttgggaatgggaagatgatgcatggtcttatgacataaatcgagcggtggatgagaaaggctgggaatatggaatcaccattcctcctgatcataagcccaaatcctgggttgcagcagagaaaatgtaccacactcatagacggcgaaggctggtccgaaaacgcaagaaagatttaacacagactgcttcaagcaccgcaagggccatggaggaattgcaagaccaagagggctgggaatatgcttctctaattggctggaaatttcactggaaacaacgtagttcagataccttccgccgcagacgctggaggagaaaaatggctccttcagaaacacatggtgcagctgccatctttaaacttgaaggtgcccttggggcagacactaccgaagatggggatgagaagagcctggagaaacagaagcacagtgccaccactgtgttcggagcaaacacccccattgtttcctgcaattttgacagagtctacatctaccatctgcgctgctatgtctatcaagccagaaacctcttggctttagataaggatagcttttcagatccatatgctcatatctgtttcctccatcggagcaaaaccactgagatcatccattcaaccctgaatcccacgtgggaccaaacaattatattcgatgaagttgaaatctatggggaaccccaaacagttctacagaatccacccaaagttatcatggaactttttgacaatgaccaagtgggcaaagatgaatttttaggacgaagcattttctctcctgtggtgaaactgaactcagaaatggacatcacacccaaacttctctggcacccagtaatgaatggagacaaagcctgcggggatgttcttgtaactgcagagctgattctgaggggcaaggatggctccaaccttcccattcttccccctcaaagggcgccaaatctatacatggtcccccaggggatcaggcctgtggtccagctcactgccattgagattctagcttggggcttaagaaatatgaaaaacttccagatggcttctatcacatcccccagtcttgttgtggagtgtggaggagaaagggtggaatcggtggtgatcaaaaaccttaagaagacacccaactttccaagttctgttctcttcatgaaagtgttcttgcccaaggaggaattgtacatgcccccactggtgatcaaggtcatcgaccacaggcagtttgggcggaagcctgtcgtcggccagtgcaccatcgagcgcctggaccgctttcgctgtgacccttatgcagggaaagaggacatcgtcccacagctcaaagcctcccttctgtctgccccaccatgccgggacatcgttatcgaaatggaagacaccaaaccattactggcttctaagctgacagaaaaggaggaagaaatcgtggactggtggagtaaattttatgcttcctcaggggaacatgaaaaatgcggacagtatattcagaaaggctattccaagctcaagatatataattgtgaactagaaaatgtagcagaatttgagggcctgacagacttctcagatacgttcaagttgtaccgaggcaagtcggatgaaaatgaagatccttctgtggttggagagtttaagggctcctttcggatctaccctctgccggatgaccccagcgtgccagcccctcccagacagtttcgggaattacctgacagcgtcccgatatgcagggatcctcnagatcgcctcac

SEQ ID NO: 422752 - DNA, 5497 bp, Homo sapiens
  misc_feature (37)..(37): n is a, c, g, or t
aaatcctcccttcactgggagagaacttctctcccanggcggtgcgacccggagctccagcgccctgggagaaatcctcccttcactgggagagaacttctctcccagggcggtgcgacccggagctccagcgcccgagtctccacttcgtttgctgaaacttgctttctaccagctaagaaccatgctgcgagtgattgtggaatctgccagcaatatccctaaaacgaaatttggcaagccggatcctattgtttctgtcatttttaaggatgagaaaaagaaaacaaagaaagttgataatgaattgaaccctgtctggaatgagattttggagtttgacttgaggggtataccactggacttttcatcttcccttgggattattgtgaaagattttgagacaattggacaaaataaattaattggcacggcgactgtagccctgaaggacctgactggtgaccagagcagatccctgccgtacaagctgatctccctgctaaatgaaaaagggcaagatactggggccaccattgacttggtgatcggctatgatccgccttctgctccacatccaaatgacctgagcgggcccagcgtgccaggcatgggaggagatggggaagaagatgaaggtgatgaagacaggttggacaatgcagtcaggggccctgggcccaaggggccagttgggacggtgtcggaagctcagcttgctcggaggctcaccaaagtaaagaacagccggcggatgctgtcaaataagccacaggacttccagatccgcgtccgagtgattgagggccgacagttaagtggtaacaacataaggcctgtggtcaaagttcacgtctgtggccagacacaccgaacaagaatcaagagaggaaacaaccctttttttgatgagttgtttttctacaatgtcaacatgaccccttctgaattgatggatgagatcatcagcatccgggtttataattctcactctctgcgggcagattgtctgatgggggaatttaagattgatgttggatttgtttatgatgaacctggccatgctgtcatgagaaagtggcttcttctcaatgacccggaagataccagttcaggttctaaaggttatatgaaagtcagcatgtttgtcctgggaaccggagatgagcctcctcctgagagacgagatcgtgataatgacagtgatgatgtggagagtaatttgttactccctgctggcattgccctccggtgggtgaccttcttgctgaaaatctaccgagctgaggacatcccccagatggatgatgccttctcacagacagtaaaggaaatatttggaggcaatgcagataagaaaaatctcgtggatccttttgtagaagtttcctttgctggaaaaaaggtttgtacaaacataattgagaaaaatgcaaacccagagtggaatcaggtcgtcaatcttcagatcaagtttccttcagtgtgtgaaaaaataaaactaacaatatatgactgggaccgtcttactaaaaatgatgtagttggaacaacatatctacacctctctaaaattgctgcctctggtggggaagtggaagatttctcatcttcgggaactggggctgcatcatatacagtaaacacaggagaaacagaggtaggctttgttccaacgtttggaccttgttacctgaatctttatggaagccccagagagtacacgggattcccagacccctatgatgagctgaatactggaaagggggaaggagttgcctacagaggcaggatcttggttgaattagccacttttcttgagaagacaccaccagataaaaagcttgagcccatttcaaatgatgacctgctggttgttgagaaataccagcgaaggcggaagtacagcctgtctgccgtgtttcattcagccaccatgttgcaagatgttggtgaggccattcagtttgaagtcagcattgggaactatggcaacaagtttgacaccacctgtaagcctttggcatcaacaactcagtacagccgtgctgtatttgatggcaactactattattacttgccttgggcccacaccaagccagttgttaccctgacttcatactgggaggatattagtcatcgcctggatgcggtgaacactctcctagctatggcagaacggctgcaaacaaatatagaagctctaaaatcagggatacaaggtaaaattcctgcaaaccagctggctgaattgtggctgaagctgatagatgaagttatagaagacacgagatacacgttgcctctcacagaaggaaaagccaacgtcacagttctcgatactcagatccgaaagctgcggtccaggtctctctcccaaatacatgaggcggctgtgaggatgaggtcggaagccacagatgtgaagtccacactggcagaaattgaggactggcttgataaattaatgcagctgactgaagagccacagaacagcatgcctgacatcatcatctggatgatccggggagagaagagactggcctatgcacgaattcccgcacatcaggtcttgtactccaccagtggtgagaatgcatctggaaaatactgtgggaaaacccaaaccatctttctgaagtatccacaggagaaaaacaacgggccaaaggtgcctgtggagttgcgagtgaacatctggctaggcttaagtgctgtggagaagaagtttaacagcttcgcagaaggaactttcaccgtctttgctgaaatgtatgaaaatcaagctctcatgtttggaaaatggggtacttctggattagtaggacgtcataagttttctgatgtcacaggaaaaataaaactcaagagggaattttttctgcctccaaaaggctgggaatgggaaggagagtggatagttgatcctgaaagaagcttgctgactgaggcagatgcaggtcacacggagttcactgatgaagtctatcagaacgagagccgctaccccgggggcgactggaagccggccgaggacacctacacggatgcgaacggcgataaagcagcatcacccagcgagttgacttgtcctccaggttgggaatgggaagatgatgcatggtcttatgacataaatcgagcggtggatgagaaaggctgggaatatggaatcaccattcctcctgatcataagcccaaatcctgggttgcagcagagaaaatgtaccacactcatagacggcgaaggctggtccgaaaacgcaagaaagatttaacacagactgcttcaagcaccgcaagggccatggaggaattgcaagaccaagagggctgggaatatgcttctctaattggctggaaatttcactggaaacaacgtagttcagataccttccgccgcagacgctggaggagaaaaatggctccttcagaaacacatggtgcagctgccatctttaaacttgaaggtgcccttggggcagacactaccgaagatggggatgagaagagcctggagaaacagaagcacagtgccaccactgtgttcggagcaaacacccccattgtttcctgcaattttgacagagtctacatctaccatctgcgctgctatgtctatcaagccagaaacctcttggctttagataaggatagcttttcagatccatatgctcatatctgtttcctccatcggagcaaaaccactgagatcatccattcaaccctgaatcccacgtgggaccaaacaattatattcgatgaagttgaaatctatggggaaccccaaacagttctacagaatccacccaaagttatcatggaactttttgacaatgaccaagtgggcaaagatgaatttttaggacgaagcattttctctcctgtggtgaaactgaactcagaaatggacatcacacccaaacttctctggcacccagtaatgaatggagacaaagcctgcggggatgttcttgtaactgcagagctgattctgaggggcaaggatggctccaaccttcccattcttccccctcaaagggcgccaaatctatacatggtcccccaggggatcaggcctgtggtccagctcactgccattgagattctagcttggggcttaagaaatatgaaaaacttccagatggcttctatcacatcccccagtcttgttgtggagtgtggaggagaaagggtggaatcggtggtgatcaaaaaccttaagaagacacccaactttccaagttctgttctcttcatgaaagtgttcttgcccaaggaggaattgtacatgcccccactggtgatcaaggtcatcgaccacaggcagtttgggcggaagcctgtcgtcggccagtgcaccatcgagcgcctggaccgctttcgctgtgacccttatgcagggaaagaggacatcgtcccacagctcaaagcctcccttctgtctgccccaccatgccgggacatcgttatcgaaatggaagacaccaaaccattactggcttctaagctgacagaaaaggagctgatcagtggatgctgtcagttttatcttctatgcttagatgtctaagcatttggtgaattcagtcaaacaacagtttgttgcaattataatcatcagccaatccatttattgaggactgagtacagacaagagtctaaatcttgcactcatcaacagttatgatgacattgtgtagactagtagtcttcaaccctcactaataagtcacccagaatacttaaaataaaacccatgcccaggccccacctcccaagagggagagggacctagatatcagtatgtttttaaatctcctcaaatgattttaatatgctggcaggtctgagaaccacaggtgtggacagtctgagaaagatcatttgctagaaagcgaagtctgagaagcaaatttatagcattgcaacattcagatcagagataacatgcaacacgccagattcttccccctacataaagcagaattgtttgataaatttctaatgaccatatttatcagtgtatgggacacccaggtttttattttcactgtggttttgaagtgaagaaattggttgaaataatcactcaaggccctattttagaactagctattccagccacttctacacgaaggaaagggggcaaaaagcctcagcccagaaaaaaggaaacaccaaatatctccctgtttctcttggcagttatgatgaacattcacagcgtgttttaatgtgcaaactagcccaaaaatgcacatgattgcactttaatatgttatgtccataaacagtgccttaaaaaaaaaatctacttccatcccactgcattaaactcactaacaactggaccatataaaatatagtctccacagccagcactgtgcagcagtgtgtttgattctactctctgtgaatcctacacagtcacaaacgacaatatcaaatttccaatctcatgggccaaaactactgtgatcactttgtaaaccac

SEQ ID NO: 422753 - DNA, 1585 bp, Homo sapiens
  misc_feature (37)..(37): n is a, c, g, or t
aaatcctcccttcactgggagagaacttctctcccanggcggtgcgacccggagctccagcgccctgggagaaatcctcccttcactgggagagaacttctctcccagggcggtgcgacccggagctccagcgcccgagtctccacttcgtttgctgaaacttgctttctaccagctaagaaccatgctgcgagtgattgtggaatctgccagcaatatccctaaaacgaaatttggcaagccggatcctattgtttctgtcatttttaaggatgagaaaaagaaaacaaagaaagttgataatgaattgaaccctgtctggaatgagattttggagtttgacttgaggggtataccactggacttttcatcttcccttgggattattgtgaaagattttgagacaattggacaaaataaattaattggcacggcgactgtagccctgaaggacctgactggtgaccagagcagatccctgccgtacaagctgatctccctgctaaatgaaaaagggcaagatactggggccaccattgacttggtgatcggctatgatccgccttctgctccacatccaaatgacctgagcgggcccagcgtgccaggcatgggaggagatggggaagaagatgaaggtgatgaagacaggttggacaatgcagtcaggggccctgggcccaaggggccagttgggacggtgtcggaagctcagcttgctcggaggctcaccaaagtaaagaacagccggcggatgctgtcaaataagccacaggacttccagatccgcgtccgagtgattgagggccgacagttaagtggtaacaacataaggcctgtggtcaaagttcacgtctgtggccagacacaccgaacaagaatcaagagaggaaacaaccctttttttgatgagttgtttttctacaatgtcaacatgaccccttctgaattgatggatgagatcatcagcatccgggtttataattctcactctctgcgggcagattgtctgatgggggaatttaagattgatgttggatttgtttatgatgaacctggccatgctgtcatgagaaagtggcttcttctcaatgacccggaagataccagttcaggttctaaaggttatatgaaagtcagcatgtttgtcctgggaaccggagatgagcctcctcctgagagacgagatcgtgataatgacagtgatgatgtggagagtaatttgttactccctgctggcattgccctccggtgggtgaccttcttgctgaaaatctaccgagctgaggacatcccccagatggatgatgccttctcacagacagtaaaggaaatatttggaggcaatgcagataagaaaaatctcgtggatccttttgtagaagtttcctttgctggaaaaaaggtttgtacaaacataattgagaaaaatgcaaacccagagtggaatcaggtcgtcaatcttcagatcaagtttccttcagtgtgtgaaaaaataaaactaacaatatatgactggtgagttgaaaatacgtatgtgtctaattcaacataaaataaacattggatattgtgaaacattact

SEQ ID NO: 422754 - DNA, 949 bp, Homo sapiens
  misc_feature (37)..(37): n is a, c, g, or t
aaatcctcccttcactgggagagaacttctctcccanggcggtgcgacccggagctccagcgccctgggagaaatcctcccttcactgggagagaacttctctcccagggcggtgcgacccggagctccagcgcccgagtctccacttcgtttgctgaaacttgctttctaccagctaagaaccatgctgcgagtgattgtggaatctgccagcaatatccctaaaacgaaatttggcaagccggatcctattgtttctgtcatttttaaggatgagaaaaagaaaacaaagaaagttgataatgaattgaaccctgtctggaatgagattttggagtttgacttgaggggtataccactggacttttcatcttcccttgggattattgtgaaagattttgagacaattggacaaaataaattaattggcacggcgactgtagccctgaaggacctgactggtgaccagagcagatccctgccgtacaagctgatctccctgctaaatgaaaaagggcaagatactggggccaccattgacttggtgatcggctatgatccgccttctgctccacatccaaatgacctgagcgggcccagcgtgccaggcatgggaggtaagctgacccttctgaaggcccagccacccccagggggaggctgctaaagacacacaggagagtgtctggagaaaccctgccattgatcacaagcctgtagctccctgcccacccagacaggggccccgagaggcaggtggggctgcctgaattgggacattgcaattgtttatgaaatgcccttcaaggtagaggggaagggtgaaccaaccctttactgaacaacctcacggtgagcacaaaaagcacatgccggctccagcagaatgtcccagggctttgcttcaggtttgtggcttccaccccatacagtgtctccaggctgtttg

SEQ ID NO: 422755 - DNA, 918 bp, Homo sapiens
  misc_feature (37)..(37): n is a, c, g, or t
aaatcctcccttcactgggagagaacttctctcccanggcggtgcgacccggagctccagcgccctgggagaaatcctcccttcactgggagagaacttctctcccagggcggtgcgacccggagctccagcgcccgagtctccacttcgtttgctgaaacttgctttctaccagctaagaaccatgctgcgagtgattgtggaatctgccagcaatatccctaaaacgaaatttggcaagccggatcctattgtttctgtcatttttaagggttccatgagccagatccgaattgaggctggagtgagtgcctgtgagccaggggtggccattctgccctaagttccatgcggacagccaggctgtgaagctgaatctagctgagattagactacacagacctctgagaccaatttcaactctgagacttgatgattcttccaaacagtcctccaaacagaacagatgagaaaaagaaaacaaagaaagttgataatgaattgaaccctgtctggaatgagattttggagtttgacttgaggggtataccactggacttttcatcttcccttgggattattgtgaaagattttgagacaattggacaaaataaattaattggcacggcgactgtagccctgaaggacctgactggtgaccagagcagatccctgccgtacaagctgatctccctgctaaatgaaaaagggcaagatactggggccaccattgacttggtgatcggctatgatccgccttctgctccacatccaaatgacctgagcgggcccagcgtgccaggcatgggaggagatggggaagaagatgaaggtgatgtaaacacgggagaacgaaacaaacatgaggacgtcggcgcggacccggcccggccggacggcggtaccaacagcatgttt

SEQ ID NO: 422756 - DNA, 416 bp, Homo sapiens
tcatcgaaaccctcaggcagtgacttaagtggttaagtgaaaaaaaaaatgctgaaacaaatcacccctcttcataatgaaacatgttttttttaatcagggtttgatgactcatcaaaccctcacagctcccaagggcatcttgtttggcagtgccttgtaaatgcactgctcgtcaactggttagtgaaaaagtcaaatcctaatatgcgtggtgaatagggtttcgatgacctcatcgaaaccctaagccggatcctattgtgtctgtcatttttaaggatgagaaaaagaaaacaaagaaagttgataatgaattgaaccctgtctggaatgagatttaggagtttgacttgtctttctttactgtgataatgcatacattttgctttattgctttcatcttattcaatgga

SEQ ID NO: 422757 - DNA, 272 bp, Homo sapiens
ataatgggggcatggaagggttagccaggtagttcatggtggcagtgccaggatttgacccaggcagtctggctgacagctcacgctcttaagcacggagctccttgcctggcacatgagtaactgaactattgcgagtcctctgggctgtgtggcagagagaatctggactggtccatctggggaatttttctcaaagctgccctcgtctggtcttgagaaatgaaacctacctttgtgacccccagttcttgcccaaggaggaattgtac

SEQ ID NO: 422758 - DNA, 413 bp, Homo sapiens
tgttcacatgcctacaacttcttggtcaactgcacttcctacctctggcagtttatctgaactgtagtgatattggatacaacccaaatcacttcttctgattatttgtggcctatacatgtctcattcaagttttactttcagccccatttccatgttaatgtctccttcgccttttaatcccaacagacctaaacagaccttaatccttgccttactgcctctttcctttcacatggggaagggtcacggtggtgcccgtggtgacactgagggttgtcctctgagtaaaattgggagacttcccaaacaggttcccgtgggacagaatgatcttagtattaataaattcaccctagtcctggatctggactttggccttgtagacccagtcgtatgttaccaattcaaac

SEQ ID NO: 422759 - DNA, 596 bp, Homo sapiens
gaaatgagtgacatctacgtcaaagggtaaggttagcatgtgagagactttgccaagctcagggaaacagactctctccttcgtgagttttcattactgaatatgcccaagataggattcttggttttttgaggttattttatctcattaatgtgatctacttaggtagctcctggaaagcaaaggagagagagcaagacctgtacagactttgtttatgaggaaagctatataaggattataagaactgataaatatttctttgtttcctttttgacaaaatggattttcttcagtttcttaagcagatgtattatttctgggacgttttagccatgtagtttctttttattcctctttgataccctgaataactagccttagaaacacaagtaaagctcccaaaatttcattttctacatattttattaccagcagcccatgtctatggaaaagaggaaatgttcgcagatttcaaaggaagtaatttattctcccaacctgcactgagtgccagcatccaacatgtcaagtgtcattgttgttcaatattctcttacttgcctaattcaattaaatcgtctctgtggatggct

SEQ ID NO: 422760 - DNA, 404 bp, Homo sapiens
taacataacttgtttaacaagtggtctactgaaagacttgtgtactgttttcatttcttcccctccatttcaatcaatgctgccaggaacatcctagtgcttctatctttgctcacttgtatgagtgcaagaggaacagctgggtccaagaacattctcccctgtcatttaattcagcactaattattaggtgtagaattgcgtctcctagaaatccacatgtaaataagaacaaatggcctttcactgaaccttatgtctgctcatactttatagaaataccagcgaaggcggaagtacagcctgtctgccgtgtttcattcagccaccatgttgcaagatgttggtgaggccattcagtttgaagtcagcattgggaactatggcaacaagtttgacaccac

SEQ ID NO: 422761 - DNA, 536 bp, Homo sapiens
ggtttagaatttaatcatttctgcataacttcaaaagattgtcattggtgaaaataatgacccaacatgtagtactggtgcatcttagtgtaatctctgctccttctaacagcctttttttttctcttttttcaaaacctttctgtgaacagattttggagtttgacttgaggggtataccactggacttttcatcttcccttgggattattgtgaaagattttgagacaattggacaaaataagtaagttgttttcacctgtttttctcattttaggtattactatctcactgttgtttattttgttgaagagacacatctttaataacgtattataatacttccaatataaatgtgctttaattccatgccccgctcccttctaagccaatagcagatgtggctaatccatcacagcactttttcccaatgactgcttttattccaaaaaagctgcaaacaccgagccacctagactagtttatcaaacttggcacttagagtgaagcctgttcacatgcctacaacttcttgg

SEQ ID NO: 422762 - DNA, 419 bp, Homo sapiens
tcatcagtaaatgcctaggaatgcaatctctagatcatagaataggtggctacttaactccaaaagaaactaccagacattttccaaagtggttgtatctgtctacactcccgccagcgatttgggagttccggtcgccccatccacaacctcaggcccacttgatactgtcagcccttttgattttagaccttacctgcattttaatgagaaattaagactctgttggtggttttcagatatataattgtgaactagaaaatgtagcagaatttgagggcctgacagacttctcagatacgttcaagttgtaccgaggcaagtcggatgaaaatgaagatccttctgtggttggagagtttaaggtgagtaagatgtgtgttggtcccgtttaaaatccaccttcattttctatatag

SEQ ID NO: 422763 - DNA, 6903 bp, Homo sapiens
  misc_feature (37)..(37): n is a, c, g, or t
aaatcctcccttcactgggagagaacttctctcccanggcggtgcgacccggagctccagcgccctgggagaaatcctcccttcactgggagagaacttctctcccagggcggtgcgacccggagctccagcgcccgagtctccacttcgtttgctgaaacttgctttctaccagctaagaaccatgctgcgagtgattgtggaatctgccagcaatatccctaaaacgaaatttggcaagccggatcctattgtttctgtcatttttaaggatgagaaaaagaaaacaaagaaagttgataatgaattgaaccctgtctggaatgagattttggagtttgacttgaggggtataccactggacttttcatcttcccttgggattattgtgaaagattttgagacaattggacaaaataaattaattggcacggcgactgtagccctgaaggacctgactggtgaccagagcagatccctgccgtacaagctgatctccctgctaaatgaaaaagggcaagatactggggccaccattgacttggtgatcggctatgatccgccttctgctccacatccaaatgacctgagcgggcccagcgtgccaggcatgggaggagatggggaagaagatgaaggtgatgaagacaggttggacaatgcagtcaggggccctgggcccaaggggccagttgggacggtgtcggaagctcagcttgctcggaggctcaccaaagtaaagaacagccggcggatgctgtcaaataagccacaggacttccagatccgcgtccgagtgattgagggccgacagttaagtggtaacaacataaggcctgtggtcaaagttcacgtctgtggccagacacaccgaacaagaatcaagagaggaaacaaccctttttttgatgagttgtttttctacaatgtcaacatgaccccttctgaattgatggatgagatcatcagcatccgggtttataattctcactctctgcgggcagattgtctgatgggggaatttaagattgatgttggatttgtttatgatgaacctggccatgctgtcatgagaaagtggcttcttctcaatgacccggaagataccagttcaggttctaaaggttatatgaaagtcagcatgtttgtcctgggaaccggagatgagcctcctcctgagagacgagatcgtgataatgacagtgatgatgtggagagtaatttgttactccctgctggcattgccctccggtgggtgaccttcttgctgaaaatctaccgagctgaggacatcccccagatggatgatgccttctcacagacagtaaaggaaatatttggaggcaatgcagataagaaaaatctcgtggatccttttgtagaagtttcctttgctggaaaaaaggtttgtacaaacataattgagaaaaatgcaaacccagagtggaatcaggtcgtcaatcttcagatcaagtttccttcagtgtgtgaaaaaataaaactaacaatatatgactgggaccgtcttactaaaaatgatgtagttggaacaacatatctacacctctctaaaattgctgcctctggtggggaagtggaagatttctcatcttcgggaactggggctgcatcatatacagtaaacacaggagaaacagaggtaggctttgttccaacgtttggaccttgttacctgaatctttatggaagccccagagagtacacgggattcccagacccctatgatgagctgaatactggaaagggggaaggagttgcctacagaggcaggatcttggttgaattagccacttttcttgagaagacaccaccagataaaaagcttgagcccatttcaaatgatgacctgctggttgttgagaaataccagcgaaggcggaagtacagcctgtctgccgtgtttcattcagccaccatgttgcaagatgttggtgaggccattcagtttgaagtcagcattgggaactatggcaacaagtttgacaccacctgtaagcctttggcatcaacaactcagtacagccgtgctgtatttgatggcaactactattattacttgccttgggcccacaccaagccagttgttaccctgacttcatactgggaggatattagtcatcgcctggatgcggtgaacactctcctagctatggcagaacggctgcaaacaaatatagaagctctaaaatcagggatacaaggtaaaattcctgcaaaccagctggctgaattgtggctgaagctgatagatgaagttatagaagacacgagatacacgttgcctctcacagaaggaaaagccaacgtcacagttctcgatactcagatccgaaagctgcggtccaggtctctctcccaaatacatgaggcggctgtgaggatgaggtcggaagccacagatgtgaagtccacactggcagaaattgaggactggcttgataaattaatgcagctgactgaagagccacagaacagcatgcctgacatcatcatctggatgatccggggagagaagagactggcctatgcacgaattcccgcacatcaggtcttgtactccaccagtggtgagaatgcatctggaaaatactgtgggaaaacccaaaccatctttctgaagtatccacaggagaaaaacaacgggccaaaggtgcctgtggagttgcgagtgaacatctggctaggcttaagtgctgtggagaagaagtttaacagcttcgcagaaggaactttcaccgtctttgctgaaatgtatgaaaatcaagctctcatgtttggaaaatggggtacttctggattagtaggacgtcataagttttctgatgtcacaggaaaaataaaactcaagagggaattttttctgcctccaaaaggctgggaatgggaaggagagtggatagttgatcctgaaagaagcttgctgactgaggcagatgcaggtcacacggagttcactgatgaagtctatcagaacgagagccgctaccccgggggcgactggaagccggccgaggacacctacacggatgcgaacggcgataaagcagcatcacccagcgagttgacttgtcctccaggttgggaatgggaagatgatgcatggtcttatgacataaatcgagcggtggatgagaaaggctgggaatatggaatcaccattcctcctgatcataagcccaaatcctgggttgcagcagagaaaatgtaccacactcatagacggcgaaggctggtccgaaaacgcaagaaagatttaacacagactgcttcaagcaccgcaagggccatggaggaattgcaagaccaagagggctgggaatatgcttctctaattggctggaaatttcactggaaacaacgtagttcagataccttccgccgcagacgctggaggagaaaaatggctccttcagaaacacatggtgcagctgccatctttaaacttgaaggtgcccttggggcagacactaccgaagatggggatgagaagagcctggagaaacagaagcacagtgccaccactgtgttcggagcaaacacccccattgtttcctgcaattttgacagagtctacatctaccatctgcgctgctatgtctatcaagccagaaacctcttggctttagataaggatagcttttcagatccatatgctcatatctgtttcctccatcggagcaaaaccactgagatcatccattcaaccctgaatcccacgtgggaccaaacaattatattcgatgaagttgaaatctatggggaaccccaaacagttctacagaatccacccaaagttatcatggaactttttgacaatgaccaagtgggcaaagatgaatttttaggacgaagcattttctctcctgtggtgaaactgaactcagaaatggacatcacacccaaacttctctggcacccagtaatgaatggagacaaagcctgcggggatgttcttgtaactgcagagctgattctgaggggcaaggatggctccaaccttcccattcttccccctcaaagggcgccaaatctatacatggtcccccaggggatcaggcctgtggtccagctcactgccattgagattctagcttggggcttaagaaatatgaaaaacttccagatggcttctatcacatcccccagtcttgttgtggagtgtggaggagaaagggtggaatcggtggtgatcaaaaaccttaagaagacacccaactttccaagttctgttctcttcatgaaagtgttcttgcccaaggaggaattgtacatgcccccactggtgatcaaggtcatcgaccacaggcagtttgggcggaagcctgtcgtcggccagtgcaccatcgagcgcctggaccgctttcgctgtgacccttatgcagggaaagaggacatcgtcccacagctcaaagcctcccttctgtctgccccaccatgccgggacatcgttatcgaaatggaagacaccaaaccattactggcttctaagctgacagaaaaggaggaagaaatcgtggactggtggagtaaattttatgcttcctcaggggaacatgaaaaatgcggacagtatattcagaaaggctattccaagctcaagatatataattgtgaactagaaaatgtagcagaatttgagggcctgacagacttctcagatacgttcaagttgtaccgaggcaagtcggatgaaaatgaagatccttctgtggttggagagtttaagggctcctttcggatctaccctctgccggatgaccccagcgtgccagcccctcccagacagtttcgggaattacctgacagcgtcccacaggaatgcacggttaggatttacattgttcgaggcttagagctccagccccaggacaacaatggcctgtgtgacccttacataaaaataacactgggcaaaaaagtcattgaagaccgagatcactacattcccaacactctcaacccagtctttggcaggatgtacgaactgagctgctacttacctcaagaaaaagacctgaaaatttctgtctatgattatgacacctttacccgggatgaaaaagtaggagaaacaattattgatctggaaaaccgattcctttcccgctttgggtcccactgcggcataccagaggagtactgtgtttctggagtcaatacctggcgagatcaactgagaccaacacagctgcttcaaaatgtcgccagattcaaaggcttcccacaacccatcctttccgaagatgggagtagaatcagatatggaggacgagactacagcttggatgaatttgaagccaacaaaatcctgcaccagcacctcggggcccctgaagagcggcttgctcttcacatcctcaggactcaggggctggtccctgagcacgtggaaacaaggactttgcacagcaccttccagcccaacatttcccagggaaaacttcagatgtgggtggatgttttccccaagagtttggggccaccaggccctcctttcaacatcacaccccggaaagccaagaaatactacctgcgtgtgatcatctggaacaccaaggacgttatcttggacgagaaaagcatcacaggagaggaaatgagtgacatctacgtcaaaggctggattcctggcaatgaagaaaacaaacagaaaacagatgtccattacagatctttggatggtgaagggaattttaactggcgatttgttttcccgtttgactaccttccagccgaacaactctgtatcgttgcgaaaaaagagcatttctggagtattgaccaaacggaatttcgaatcccacccaggctgatcattcagatatgggacaatgacaagttttctctggatgactacttgggtttcctagaacttgacttgcgtcacacgatcattcctgcaaaatcaccagagaaatgcagattggacatgattccggacctcaaagccatgaacccccttaaagccaagacagcctccctctttgagcagaagtccatgaaaggatggtggccatgctacgcagagaaagatggcgcccgcgtaatggctgggaaagtggagatgacattggaaatcctcaacgagaaggaggccgacgagaggccagccgggaaggggcgggacgaacccaacatgaaccccaagctggacttaccaaatcgaccagaaacctccttcctctggttcaccaacccatgcaagaccatgaagttcatcgtgtggcgccgctttaagtgggtcatcatcggcttgctgttcctgcttatcctgctgctcttcgtggccgtgctcctctactctttgccgaactatttgtcaatgaagattgtaaagccaaatgtgtaacaaaggcaaaggcttaatttccagagtcatccagcaatgagagaatcctgcctctgtagaccaacatccagtgtgattttgtgtctgagaccacaccccagtagcaggttacgccatgtcaccgagccccattgattcccagagggtcttagtcctggaaagtcaggccaacaagcaacgtttgcatcatgttatctcttaagtattaaaagttttattttctaaagtttaaatcatgtttttcaaaatatttttcaaggtggctggttccatttaaaaatcatctttttatatgtgtcttcggttctagacttcagcttttggaaattgctaaatagaattcaaaaatctctgcatcctgaggtgatatacttcatatttgtaatcaactgaaagagctgtgcattataaaatcagttagaatagttagaacaattcttatttatgcccacaaccattgctatattttgtatggatgtcataaaagtctatttaacctctgtaatgaaactaaataaaaatgtttcaccttt

SEQ ID NO: 422764 - DNA, 6913 bp, Homo sapiens
tcatcgaaaccctcaggcagtgacttaagtggttaagtgaaaaaaaaaatgctgaaacaaatcacccctcttcataatgaaacatgttttttttaatcagggtttgatgactcatcaaaccctcacagctcccaagggcatcttgtttggcagtgccttgtaaatgcactgctcgtcaactggttagtgaaaaagtcaaatcctaatatgcgtggtgaatagggtttcgatgacctcatcgaaaccctaagccggatcctattgtgtctgtcatttttaaggatgagaaaaagaaaacaaagaaagttgataatgaattgaaccctgtctggaatgagattttggagtttgacttgaggggtataccactggacttttcatcttcccttgggattattgtgaaagattttgagacaattggacaaaataaattaattggcacggcgactgtagccctgaaggacctgactggtgaccagagcagatccctgccgtacaagctgatctccctgctaaatgaaaaagggcaagatactggggccaccattgacttggtgatcggctatgatccgccttctgctccacatccaaatgacctgagcgggcccagcgtgccaggcatgggaggagatggggaagaagatgaaggtgatgaagacaggttggacaatgcagtcaggggccctgggcccaaggggccagttgggacggtgtcggaagctcagcttgctcggaggctcaccaaagtaaagaacagccggcggatgctgtcaaataagccacaggacttccagatccgcgtccgagtgattgagggccgacagttaagtggtaacaacataaggcctgtggtcaaagttcacgtctgtggccagacacaccgaacaagaatcaagagaggaaacaaccctttttttgatgagttgtttttctacaatgtcaacatgaccccttctgaattgatggatgagatcatcagcatccgggtttataattctcactctctgcgggcagattgtctgatgggggaatttaagattgatgttggatttgtttatgatgaacctggccatgctgtcatgagaaagtggcttcttctcaatgacccggaagataccagttcaggttctaaaggttatatgaaagtcagcatgtttgtcctgggaaccggagatgagcctcctcctgagagacgagatcgtgataatgacagtgatgatgtggagagtaatttgttactccctgctggcattgccctccggtgggtgaccttcttgctgaaaatctaccgagctgaggacatcccccagatggatgatgccttctcacagacagtaaaggaaatatttggaggcaatgcagataagaaaaatctcgtggatccttttgtagaagtttcctttgctggaaaaaaggtttgtacaaacataattgagaaaaatgcaaacccagagtggaatcaggtcgtcaatcttcagatcaagtttccttcagtgtgtgaaaaaataaaactaacaatatatgactgggaccgtcttactaaaaatgatgtagttggaacaacatatctacacctctctaaaattgctgcctctggtggggaagtggaagatttctcatcttcgggaactggggctgcatcatatacagtaaacacaggagaaacagaggtaggctttgttccaacgtttggaccttgttacctgaatctttatggaagccccagagagtacacgggattcccagacccctatgatgagctgaatactggaaagggggaaggagttgcctacagaggcaggatcttggttgaattagccacttttcttgagaagacaccaccagataaaaagcttgagcccatttcaaatgatgacctgctggttgttgagaaataccagcgaaggcggaagtacagcctgtctgccgtgtttcattcagccaccatgttgcaagatgttggtgaggccattcagtttgaagtcagcattgggaactatggcaacaagtttgacaccacctgtaagcctttggcatcaacaactcagtacagccgtgctgtatttgatggcaactactattattacttgccttgggcccacaccaagccagttgttaccctgacttcatactgggaggatattagtcatcgcctggatgcggtgaacactctcctagctatggcagaacggctgcaaacaaatatagaagctctaaaatcagggatacaaggtaaaattcctgcaaaccagctggctgaattgtggctgaagctgatagatgaagttatagaagacacgagatacacgttgcctctcacagaaggaaaagccaacgtcacagttctcgatactcagatccgaaagctgcggtccaggtctctctcccaaatacatgaggcggctgtgaggatgaggtcggaagccacagatgtgaagtccacactggcagaaattgaggactggcttgataaattaatgcagctgactgaagagccacagaacagcatgcctgacatcatcatctggatgatccggggagagaagagactggcctatgcacgaattcccgcacatcaggtcttgtactccaccagtggtgagaatgcatctggaaaatactgtgggaaaacccaaaccatctttctgaagtatccacaggagaaaaacaacgggccaaaggtgcctgtggagttgcgagtgaacatctggctaggcttaagtgctgtggagaagaagtttaacagcttcgcagaaggaactttcaccgtctttgctgaaatgtatgaaaatcaagctctcatgtttggaaaatggggtacttctggattagtaggacgtcataagttttctgatgtcacaggaaaaataaaactcaagagggaattttttctgcctccaaaaggctgggaatgggaaggagagtggatagttgatcctgaaagaagcttgctgactgaggcagatgcaggtcacacggagttcactgatgaagtctatcagaacgagagccgctaccccgggggcgactggaagccggccgaggacacctacacggatgcgaacggcgataaagcagcatcacccagcgagttgacttgtcctccaggttgggaatgggaagatgatgcatggtcttatgacataaatcgagcggtggatgagaaaggctgggaatatggaatcaccattcctcctgatcataagcccaaatcctgggttgcagcagagaaaatgtaccacactcatagacggcgaaggctggtccgaaaacgcaagaaagatttaacacagactgcttcaagcaccgcaagggccatggaggaattgcaagaccaagagggctgggaatatgcttctctaattggctggaaatttcactggaaacaacgtagttcagataccttccgccgcagacgctggaggagaaaaatggctccttcagaaacacatggtgcagctgccatctttaaacttgaaggtgcccttggggcagacactaccgaagatggggatgagaagagcctggagaaacagaagcacagtgccaccactgtgttcggagcaaacacccccattgtttcctgcaattttgacagagtctacatctaccatctgcgctgctatgtctatcaagccagaaacctcttggctttagataaggatagcttttcagatccatatgctcatatctgtttcctccatcggagcaaaaccactgagatcatccattcaaccctgaatcccacgtgggaccaaacaattatattcgatgaagttgaaatctatggggaaccccaaacagttctacagaatccacccaaagttatcatggaactttttgacaatgaccaagtgggcaaagatgaatttttaggacgaagcattttctctcctgtggtgaaactgaactcagaaatggacatcacacccaaacttctctggcacccagtaatgaatggagacaaagcctgcggggatgttcttgtaactgcagagctgattctgaggggcaaggatggctccaaccttcccattcttccccctcaaagggcgccaaatctatacatggtcccccaggggatcaggcctgtggtccagctcactgccattgagattctagcttggggcttaagaaatatgaaaaacttccagatggcttctatcacatcccccagtcttgttgtggagtgtggaggagaaagggtggaatcggtggtgatcaaaaaccttaagaagacacccaactttccaagttctgttctcttcatgaaagtgttcttgcccaaggaggaattgtacatgcccccactggtgatcaaggtcatcgaccacaggcagtttgggcggaagcctgtcgtcggccagtgcaccatcgagcgcctggaccgctttcgctgtgacccttatgcagggaaagaggacatcgtcccacagctcaaagcctcccttctgtctgccccaccatgccgggacatcgttatcgaaatggaagacaccaaaccattactggcttctaagctgacagaaaaggaggaagaaatcgtggactggtggagtaaattttatgcttcctcaggggaacatgaaaaatgcggacagtatattcagaaaggctattccaagctcaagatatataattgtgaactagaaaatgtagcagaatttgagggcctgacagacttctcagatacgttcaagttgtaccgaggcaagtcggatgaaaatgaagatccttctgtggttggagagtttaagggctcctttcggatctaccctctgccggatgaccccagcgtgccagcccctcccagacagtttcgggaattacctgacagcgtcccacaggaatgcacggttaggatttacattgttcgaggcttagagctccagccccaggacaacaatggcctgtgtgacccttacataaaaataacactgggcaaaaaagtcattgaagaccgagatcactacattcccaacactctcaacccagtctttggcaggatgtacgaactgagctgctacttacctcaagaaaaagacctgaaaatttctgtctatgattatgacacctttacccgggatgaaaaagtaggagaaacaattattgatctggaaaaccgattcctttcccgctttgggtcccactgcggcataccagaggagtactgtgtttctggagtcaatacctggcgagatcaactgagaccaacacagctgcttcaaaatgtcgccagattcaaaggcttcccacaacccatcctttccgaagatgggagtagaatcagatatggaggacgagactacagcttggatgaatttgaagccaacaaaatcctgcaccagcacctcggggcccctgaagagcggcttgctcttcacatcctcaggactcaggggctggtccctgagcacgtggaaacaaggactttgcacagcaccttccagcccaacatttcccagggaaaacttcagatgtgggtggatgttttccccaagagtttggggccaccaggccctcctttcaacatcacaccccggaaagccaagaaatactacctgcgtgtgatcatctggaacaccaaggacgttatcttggacgagaaaagcatcacaggagaggaaatgagtgacatctacgtcaaaggctggattcctggcaatgaagaaaacaaacagaaaacagatgtccattacagatctttggatggtgaagggaattttaactggcgatttgttttcccgtttgactaccttccagccgaacaactctgtatcgttgcgaaaaaagagcatttctggagtattgaccaaacggaatttcgaatcccacccaggctgatcattcagatatgggacaatgacaagttttctctggatgactacttgggtttcctagaacttgacttgcgtcacacgatcattcctgcaaaatcaccagagaaatgcagattggacatgattccggacctcaaagccatgaacccccttaaagccaagacagcctccctctttgagcagaagtccatgaaaggatggtggccatgctacgcagagaaagatggcgcccgcgtaatggctgggaaagtggagatgacattggaaatcctcaacgagaaggaggccgacgagaggccagccgggaaggggcgggacgaacccaacatgaaccccaagctggacttaccaaatcgaccagaaacctccttcctctggttcaccaacccatgcaagaccatgaagttcatcgtgtggcgccgctttaagtgggtcatcatcggcttgctgttcctgcttatcctgctgctcttcgtggccgtgctcctctactctttgccgaactatttgtcaatgaagattgtaaagccaaatgtgtaacaaaggcaaaggcttaatttccagagtcatccagcaatgagagaatcctgcctctgtagaccaacatccagtgtgattttgtgtctgagaccacaccccagtagcaggttacgccatgtcaccgagccccattgattcccagagggtcttagtcctggaaagtcaggccaacaagcaacgtttgcatcatgttatctcttaagtattaaaagttttattttctaaagtttaaatcatgtttttcaaaatatttttcaaggtggctggttccatttaaaaatcatctttttatatgtgtcttcggttctagacttcagcttttggaaattgctaaatagaattcaaaaatctctgcatcctgaggtgatatacttcatatttgtaatcaactgaaagagctgtgcattataaaatcagttagaatagttagaacaattcttatttatgcccacaaccattgctatattttgtatggatgtcataaaagtctatttaacctctgtaatgaaactaaataaaaatgtttcaccttt

SEQ ID NO: 422765 - DNA, 6883 bp, Homo sapiens
  misc_feature (37)..(37): n is a, c, g, or t
  misc_feature (4580)..(4580): n is a, c, g, or t
  misc_feature (4583)..(4585): n is a, c, g, or t
aaatcctcccttcactgggagagaacttctctcccanggcggtgcgacccggagctccagcgccctgggagaaatcctcccttcactgggagagaacttctctcccagggcggtgcgacccggagctccagcgcccgagtctccacttcgtttgctgaaacttgctttctaccagctaagaaccatgctgcgagtgattgtggaatctgccagcaatatccctaaaacgaaatttggcaagccggatcctattgtttctgtcatttttaaggatgagaaaaagaaaacaaagaaagttgataatgaattgaaccctgtctggaatgagattttggagtttgacttgaggggtataccactggacttttcatcttcccttgggattattgtgaaagattttgagacaattggacaaaataaattaattggcacggcgactgtagccctgaaggacctgactggtgaccagagcagatccctgccgtacaagctgatctccctgctaaatgaaaaagggcaagatactggggccaccattgacttggtgatcggctatgatccgccttctgctccacatccaaatgacctgagcgggcccagcgtgccaggcatgggaggagatggggaagaagatgaaggtgatgaagacaggttggacaatgcagtcaggggccctgggcccaaggggccagttgggacggtgtcggaagctcagcttgctcggaggctcaccaaagtaaagaacagccggcggatgctgtcaaataagccacaggacttccagatccgcgtccgagtgattgagggccgacagttaagtggtaacaacataaggcctgtggtcaaagttcacgtctgtggccagacacaccgaacaagaatcaagagaggaaacaaccctttttttgatgagttgtttttctacaatgtcaacatgaccccttctgaattgatggatgagatcatcagcatccgggtttataattctcactctctgcgggcagattgtctgatgggggaatttaagattgatgttggatttgtttatgatgaacctggccatgctgtcatgagaaagtggcttcttctcaatgacccggaagataccagttcaggttctaaaggttatatgaaagtcagcatgtttgtcctgggaaccggagatgagcctcctcctgagagacgagatcgtgataatgacagtgatgatgtggagagtaatttgttactccctgctggcattgccctccggtgggtgaccttcttgctgaaaatctaccgagctgaggacatcccccagatggatgatgccttctcacagacagtaaaggaaatatttggaggcaatgcagataagaaaaatctcgtggatccttttgtagaagtttcctttgctggaaaaaaggtttgtacaaacataattgagaaaaatgcaaacccagagtggaatcaggtcgtcaatcttcagatcaagtttccttcagtgtgtgaaaaaataaaactaacaatatatgactgggaccgtcttactaaaaatgatgtagttggaacaacatatctacacctctctaaaattgctgcctctggtggggaagtggaagatttctcatcttcgggaactggggctgcatcatatacagtaaacacaggagaaacagaggtaggctttgttccaacgtttggaccttgttacctgaatctttatggaagccccagagagtacacgggattcccagacccctatgatgagctgaatactggaaagggggaaggagttgcctacagaggcaggatcttggttgaattagccacttttcttgagaagacaccaccagataaaaagcttgagcccatttcaaatgatgacctgctggttgttgagaaataccagcgaaggcggaagtacagcctgtctgccgtgtttcattcagccaccatgttgcaagatgttggtgaggccattcagtttgaagtcagcattgggaactatggcaacaagtttgacaccacctgtaagcctttggcatcaacaactcagtacagccgtgctgtatttgatggcaactactattattacttgccttgggcccacaccaagccagttgttaccctgacttcatactgggaggatattagtcatcgcctggatgcggtgaacactctcctagctatggcagaacggctgcaaacaaatatagaagctctaaaatcagggatacaaggtaaaattcctgcaaaccagctggctgaattgtggctgaagctgatagatgaagttatagaagacacgagatacacgttgcctctcacagaaggaaaagccaacgtcacagttctcgatactcagatccgaaagctgcggtccaggtctctctcccaaatacatgaggcggctgtgaggatgaggtcggaagccacagatgtgaagtccacactggcagaaattgaggactggcttgataaattaatgcagctgactgaagagccacagaacagcatgcctgacatcatcatctggatgatccggggagagaagagactggcctatgcacgaattcccgcacatcaggtcttgtactccaccagtggtgagaatgcatctggaaaatactgtgggaaaacccaaaccatctttctgaagtatccacaggagaaaaacaacgggccaaaggtgcctgtggagttgcgagtgaacatctggctaggcttaagtgctgtggagaagaagtttaacagcttcgcagaaggaactttcaccgtctttgctgaaatgtatgaaaatcaagctctcatgtttggaaaatggggtacttctggattagtaggacgtcataagttttctgatgtcacaggaaaaataaaactcaagagggaattttttctgcctccaaaaggctgggaatgggaaggagagtggatagttgatcctgaaagaagcttgctgactgaggcagatgcaggtcacacggagttcactgatgaagtctatcagaacgagagccgctaccccgggggcgactggaagccggccgaggacacctacacggatgcgaacggcgataaagcagcatcacccagcgagttgacttgtcctccaggttgggaatgggaagatgatgcatggtcttatgacataaatcgagcggtggatgagaaaggctgggaatatggaatcaccattcctcctgatcataagcccaaatcctgggttgcagcagagaaaatgtaccacactcatagacggcgaaggctggtccgaaaacgcaagaaagatttaacacagactgcttcaagcaccgcaagggccatggaggaattgcaagaccaagagggctgggaatatgcttctctaattggctggaaatttcactggaaacaacgtagttcagataccttccgccgcagacgctggaggagaaaaatggctccttcagaaacacatggtgcagctgccatctttaaacttgaaggtgcccttggggcagacactaccgaagatggggatgagaagagcctggagaaacagaagcacagtgccaccactgtgttcggagcaaacacccccattgtttcctgcaattttgacagagtctacatctaccatctgcgctgctatgtctatcaagccagaaacctcttggctttagataaggatagcttttcagatccatatgctcatatctgtttcctccatcggagcaaaaccactgagatcatccattcaaccctgaatcccacgtgggaccaaacaattatattcgatgaagttgaaatctatggggaaccccaaacagttctacagaatccacccaaagttatcatggaactttttgacaatgaccaagtgggcaaagatgaatttttaggacgaagcattttctctcctgtggtgaaactgaactcagaaatggacatcacacccaaacttctctggcacccagtaatgaatggagacaaagcctgcggggatgttcttgtaactgcagagctgattctgaggggcaaggatggctccaaccttcccattcttccccctcaaagggcgccaaatctatacatggtcccccaggggatcaggcctgtggtccagctcactgccattgagattctagcttggggcttaagaaatatgaaaaacttccagatggcttctatcacatcccccagtcttgttgtggagtgtggaggagaaagggtggaatcggtggtgatcaaaaaccttaagaagacacccaactttccaagttctgttctcttcatgaaagtgttcttgcccaaggaggaattgtacatgcccccactggtgatcaaggtcatcgaccacaggcagtttgggcggaagcctgtcgtcggccagtgcaccatcgagcgcctggaccgctttcgctgtgacccttatgcagggaaagaggacatcgtcccacagctcaaagcctcccttctgtctgccccaccatgccgggacatcgttatcgaaatggaagacaccaaaccattactggcttctaagctgacagaaaagtgcttaagcagtatgtcaacagcactcagcaaaatggcttctccagcgacagtgcatntgnnngaaaaggaggaagaaatcgtggactggtggagtaaattttatgcttcctcaggggaacatgaaaaatgcggacagtatattcagaaaggctattccaagctcaagatatataattgtgaactagaaaatgtagcagaatttgagggcctgacagacttctcagatacgttcaagttgtaccgaggcaagtcggatgaaaatgaagatccttctgtggttggagagtttaagggctcctttcggatctaccctctgccggatgaccccagcgtgccagcccctcccagacagtttcgggaattacctgacagcgtcccacaggaatgcacggttaggatttacattgttcgaggcttagagctccagccccaggacaacaatggcctgtgtgacccttacataaaaataacactgggcaaaaaagtcattgaagaccgagatcactacattcccaacactctcaacccagtctttggcaggatgtacgaactgagctgctacttacctcaagaaaaagacctgaaaatttctgtctatgattatgacacctttacccgggatgaaaaagtaggagaaacaattattgatctggaaaaccgattcctttcccgctttgggtcccactgcggcataccagaggagtactgtgtttctggagtcaatacctggcgagatcaactgagaccaacacagctgcttcaaaatgtcgccagattcaaaggcttcccacaacccatcctttccgaagatgggagtagaatcagatatggaggacgagactacagcttggatgaatttgaagccaacaaaatcctgcaccagcacctcggggcccctgaagagcggcttgctcttcacatcctcaggactcaggggctggtccctgagcacgtggaaacaaggactttgcacagcaccttccagcccaacatttcccagatactacctgcgtgtgatcatctggaacaccaaggacgttatcttggacgagaaaagcatcacaggagaggaaatgagtgacatctacgtcaaaggctggattcctggcaatgaagaaaacaaacagaaaacagatgtccattacagatctttggatggtgaagggaattttaactggcgatttgttttcccgtttgactaccttccagccgaacaactctgtatcgttgcgaaaaaagagcatttctggagtattgaccaaacggaatttcgaatcccacccaggctgatcattcagatatgggacaatgacaagttttctctggatgactacttgggtttcctagaacttgacttgcgtcacacgatcattcctgcaaaatcaccagagaaatgcagattggacatgattccggacctcaaagccatgaacccccttaaagccaagacagcctccctctttgagcagaagtccatgaaaggatggtggccatgctacgcagagaaagatggcgcccgcgtaatggctgggaaagtggagatgacattggaaatcctcaacgagaaggaggccgacgagaggccagccgggaaggggcgggacgaacccaacatgaaccccaagctggacttaccaaatcgaccagaaacctccttcctctggttcaccaacccatgcaagaccatgaagttcatcgtgtggcgccgctttaagtgggtcatcatcggcttgctgttcctgcttatcctgctgctcttcgtggccgtgctcctctactctttgccgaactatttgtcaatgaagattgtaaagccaaatgtgtaacaaaggcaaaggcttaatttccagagtcatccagcaatgagagaatcctgcctctgtagaccaacatccagtgtgattttgtgtctgagaccacaccccagtagcaggttacgccatgtcaccgagccccattgattcccagagggtcttagtcctggaaagtcaggccaacaagcaacgtttgcatcatgttatctcttaagtattaaaagttttattttctaaagtttaaatcatgtttttcaaaatatttttcaaggtggctggttccatttaaaaatcatctttttatatgtgtcttcggttctagacttcagcttttggaaattgctaaatagaattcaaaaatctctgcatcctgaggtgatatacttcatatttgtaatcaactgaaagagctgtgcattataaaatcagttagaatagttagaacaattcttatttatgcccacaaccattgctatattttgtatggatgtcataaaagtctatttaacctctgtaatgaaactaaataaaaatgtttcaccttt

SEQ ID NO: 422766 - DNA, 7069 bp, Homo sapiens
  misc_feature (37)..(37): n is a, c, g, or t
  misc_feature (6894)..(6894): n is a, c, g, or t
  misc_feature (6934)..(6934): n is a, c, g, or t
aaatcctcccttcactgggagagaacttctctcccanggcggtgcgacccggagctccagcgccctgggagaaatcctcccttcactgggagagaacttctctcccagggcggtgcgacccggagctccagcgcccgagtctccacttcgtttgctgaaacttgctttctaccagctaagaaccatgctgcgagtgattgtggaatctgccagcaatatccctaaaacgaaatttggcaagccggatcctattgtttctgtcatttttaaggatgagaaaaagaaaacaaagaaagttgataatgaattgaaccctgtctggaatgagattttggagtttgacttgaggggtataccactggacttttcatcttcccttgggattattgtgaaagattttgagacaattggacaaaataaattaattggcacggcgactgtagccctgaaggacctgactggtgaccagagcagatccctgccgtacaagctgatctccctgctaaatgaaaaagggcaagatactggggccaccattgacttggtgatcggctatgatccgccttctgctccacatccaaatgacctgagcgggcccagcgtgccaggcatgggaggagatggggaagaagatgaaggtgatgaagacaggttggacaatgcagtcaggggccctgggcccaaggggccagttgggacggtgtcggaagctcagcttgctcggaggctcaccaaagtaaagaacagccggcggatgctgtcaaataagccacaggacttccagatccgcgtccgagtgattgagggccgacagttaagtggtaacaacataaggcctgtggtcaaagttcacgtctgtggccagacacaccgaacaagaatcaagagaggaaacaaccctttttttgatgagttgtttttctacaatgtcaacatgaccccttctgaattgatggatgagatcatcagcatccgggtttataattctcactctctgcgggcagattgtctgatgggggaatttaagattgatgttggatttgtttatgatgaacctggccatgctgtcatgagaaagtggcttcttctcaatgacccggaagataccagttcaggttctaaaggttatatgaaagtcagcatgtttgtcctgggaaccggagatgagcctcctcctgagagacgagatcgtgataatgacagtgatgatgtggagagtaatttgttactccctgctggcattgccctccggtgggtgaccttcttgctgaaaatctaccgagctgaggacatcccccagatggatgatgccttctcacagacagtaaaggaaatatttggaggcaatgcagataagaaaaatctcgtggatccttttgtagaagtttcctttgctggaaaaaaggtttgtacaaacataattgagaaaaatgcaaacccagagtggaatcaggtcgtcaatcttcagatcaagtttccttcagtgtgtgaaaaaataaaactaacaatatatgactgggaccgtcttactaaaaatgatgtagttggaacaacatatctacacctctctaaaattgctgcctctggtggggaagtggaagtaaacacaggagaaacagaggtaggctttgttccaacgtttggaccttgttacctgaatctttatggaagccccagagagtacacgggattcccagacccctatgatgagctgaatactggaaagggggaaggagttgcctacagaggcaggatcttggttgaattagccacttttcttgagaagacaccaccagataaaaagcttgagcccatttcaaatgatgacctgctggttgttgagaaataccagcgaaggcggaagtacagcctgtctgccgtgtttcattcagccaccatgttgcaagatgttggtgaggccattcagtttgaagtcagcattgggaactatggcaacaagtttgacaccacctgtaagcctttggcatcaacaactcagtacagccgtgctgtatttgatggcaactactattattacttgccttgggcccacaccaagccagttgttaccctgacttcatactgggaggatattagtcatcgcctggatgcggtgaacactctcctagctatggcagaacggctgcaaacaaatatagaagctctaaaatcagggatacaaggtaaaattcctgcaaaccagctggctgaattgtggctgaagctgatagatgaagttatagaagacacgagatacacgttgcctctcacagaaggaaaagccaacgtcacagttctcgatactcagatccgaaagctgcggtccaggtctctctcccaaatacatgaggcggctgtgaggatgaggtcggaagccacagatgtgaagtccacactggcagaaattgaggactggcttgataaattaatgcagctgactgaagagccacagaacagcatgcctgacatcatcatctggatgatccggggagagaagagactggcctatgcacgaattcccgcacatcaggtcttgtactccaccagtggtgagaatgcatctggaaaatactgtgggaaaacccaaaccatctttctgaagtatccacaggagaaaaacaacgggccaaaggtgcctgtggagttgcgagtgaacatctggctaggcttaagtgctgtggagaagaagtttaacagcttcgcagaaggaactttcaccgtctttgctgaaatgtatgaaaatcaagctctcatgtttggaaaatggggtacttctggattagtaggacgtcataagttttctgatgtcacaggaaaaataaaactcaagagggaattttttctgcctccaaaaggctgggaatgggaaggagagtggatagttgatcctgaaagaagcttgctgactgaggcagatgcaggtcacacggagttcactgatgaagtctatcagaacgagagccgctaccccgggggcgactggaagccggccgaggacacctacacggatgcgaacggcgataaagcagcatcacccagcgagttgacttgtcctccaggttgggaatgggaagatgatgcatggtcttatgacataaatcgagcggtggatgagaaaggctgggaatatggaatcaccattcctcctgatcataagcccaaatcctgggttgcagcagagaaaatgtaccacactcatagacggcgaaggctggtccgaaaacgcaagaaagatttaacacagactgcttcaagcaccgcaagggccatggaggaattgcaagaccaagagggctgggaatatgcttctctaattggctggaaatttcactggaaacaacgtagttcagataccttccgccgcagacgctggaggagaaaaatggctccttcagaaacacatggtgcagctgccatctttaaacttgaaggtgcccttggggcagacactaccgaagatggggatgagaagagcctggagaaacagaagcacagtgccaccactgtgttcggagcaaacacccccattgtttcctgcaattttgacagagtctacatctaccatctgcgctgctatgtctatcaagccagaaacctcttggctttagataaggatagcttttcagatccatatgctcatatctgtttcctccatcggagcaaaaccactgagatcatccattcaaccctgaatcccacgtgggaccaaacaattatattcgatgaagttgaaatctatggggaaccccaaacagttctacagaatccacccaaagttatcatggaactttttgacaatgaccaagtgggcaaagatgaatttttaggacgaagcattttctctcctgtggtgaaactgaactcagaaatggacatcacacccaaacttctctggcacccagtaatgaatggagacaaagcctgcggggatgttcttgtaactgcagagctgattctgaggggcaaggatggctccaaccttcccattcttccccctcaaagggcgccaaatctatacatggtcccccaggggatcaggcctgtggtccagctcactgccattgagattctagcttggggcttaagaaatatgaaaaacttccagatggcttctatcacatcccccagtcttgttgtggagtgtggaggagaaagggtggaatcggtggtgatcaaaaaccttaagaagacacccaactttccaagttctgttctcttcatgaaagtgttcttgcccaaggaggaattgtacatgcccccactggtgatcaaggtcatcgaccacaggcagtttgggcggaagcctgtcgtcggccagtgcaccatcgagcgcctggaccgctttcgctgtgacccttatgcagggaaagaggacatcgtcccacagctcaaagcctcccttctgtctgccccaccatgccgggacatcgttatcgaaatggaagacaccaaaccattactggcttctaagctgacagaaaaggaggaagaaatcgtggactggtggagtaaattttatgcttcctcaggggaacatgaaaaatgcggacagtatattcagaaaggctattccaagctcaagatatataattgtgaactagaaaatgtagcagaatttgagggcctgacagacttctcagatacgttcaagttgtaccgaggcaagtcggatgaaaatgaagatccttctgtggttggagagtttaagggctcctttcggatctaccctctgccggatgaccccagcgtgccagcccctcccagacagtttcgggaattacctgacagcgtcccacaggaatgcacggttaggatttacattgttcgaggcttagagctccagccccaggacaacaatggcctgtgtgacccttacataaaaataacactgggcaaaaaagtcattgaagaccgagatcactacattcccaacactctcaacccagtctttggcaggatgtacgaactgagctgctacttacctcaagaaaaagacctgaaaatttctgtctatgattatgacacctttacccgggatgaaaaagtaggagaaacaattattgatctggaaaaccgattcctttcccgctttgggtcccactgcggcataccagaggagtactgtgtttctggagtcaatacctggcgagatcaactgagaccaacacagctgcttcaaaatgtcgccagattcaaaggcttcccacaacccatcctttccgaagatgggagtagaatcagatatggaggacgagactacagcttggatgaatttgaagccaacaaaatcctgcaccagcacctcggggcccctgaagagcggcttgctcttcacatcctcaggactcaggggctggtccctgagcacgtggaaacaaggactttgcacagcaccttccagcccaacatttcccagggaaaacttcagatgtgggtggatgttttccccaagagtttggggccaccaggccctcctttcaacatcacaccccggaaagccaagaaatactacctgcgtgtgatcatctggaacaccaaggacgttatcttggacgagaaaagcatcacaggagaggaaatgagtgacatctacgtcaaaggctggattcctggcaatgaagaaaacaaacagaaaacagatgtccattacagatctttggatggtgaagggaattttaactggcgatttgttttcccgtttgactaccttccagccgaacaactctgtatcgttgcgaaaaaagagcatttctggagtattgaccaaacggaatttcgaatcccacccaggctgatcattcagatatgggacaatgacaagttttctctggatgactacttgggtttcctagaacttgacttgcgtcacacgatcattcctgcaaaatcaccagagaaatgcagattggacatgattccggacctcaaagccatgaacccccttaaagccaagacagcctccctctttgagcagaagtccatgaaaggatggtggccatgctacgcagagaaagatggcgcccgcgtaatggctgggaaagtggagatgacattggaaatcctcaacgagaaggaggccgacgagaggccagccgggaaggggcgggacgaacccaacatgaaccccaagctggacttaccaaatcgaccagaaacctccttcctctggttcaccaacccatgcaagaccatgaagttcatcgtgtggcgccgctttaagtgggtcatcatcggcttgctgttcctgcttatcctgctgctcttcgtggccgtgctcctctactctttgccgaactatttgtcaatgaagattgtaaagccaaatgtgtaacaaaggcaaaggcttaatttccagagtcatccagcaatgagagaatcctgcctctgtagaccaacatccagtgtgattttgtgtctgagaccacaccccagtagcaggttacgccatgtcaccgagccccattgattcccagagggtcttagtcctggaaagtcaggccaacaagcaacgtttgcatcatgttatctcttaagtattaaaagttttattttctaaagtttaaatcatgtttttcaaaatatttttcaaggtggctggttccatttaaaaatcatctttttatatgtgtcttcggttctagacttcagcttttggaaattgctaaatagaattcaaaaatctctgcatcctgaggtgatatacttcatatttgtaatcaactgaaagagctgtgcattataaaatcagttagaatagttagaacaattcttatttatgcccacaaccattgctatattttgtatggatgtcataaaagtctatttaacctctgtaatgaaactaaataaaaatgtttcaccttttacattaaagcagttaaggacataatgttnaattgtgctaatacgtacaataatgatatatgaataacancctccgcccctttggccccagcgggggagcctttgcgtgcctttccttttagaggagggaaatataaggaccactgctccccaacatctcgggacagggtctggggcttgtggcgagggctatctccacattcag

SEQ ID NO: 422767 - DNA, 5302 bp, Homo sapiens
  misc_feature (37)..(37): n is a, c, g, or t
aaatcctcccttcactgggagagaacttctctcccanggcggtgcgacccggagctccagcgccctgggagaaatcctcccttcactgggagagaacttctctcccagggcggtgcgacccggagctccagcgcccgagtctccacttcgtttgctgaaacttgctttctaccagctaagaaccatgctgcgagtgattgtggaatctgccagcaatatccctaaaacgaaatttggcaagccggatcctattgtttctgtcatttttaaggatgagaaaaagaaaacaaagaaagttgataatgaattgaaccctgtctggaatgagattttggagtttgacttgaggggtataccactggacttttcatcttcccttgggattattgtgaaagattttgagacaattggacaaaataaattaattggcacggcgactgtagccctgaaggacctgactggtgaccagagcagatccctgccgtacaagctgatctccctgctaaatgaaaaagggcaagatactggggccaccattgacttggtgatcggctatgatccgccttctgctccacatccaaatgacctgagcgggcccagcgtgccaggcatgggaggagatggggaagaagatgaaggtgatgaagacaggttggacaatgcagtcaggggccctgggcccaaggggccagttgggacggtgtcggaagctcagcttgctcggaggctcaccaaagtaaagaacagccggcggatgctgtcaaataagccacaggacttccagatccgcgtccgagtgattgagggccgacagttaagtggtaacaacataaggcctgtggtcaaagttcacgtctgtggccagacacaccgaacaagaatcaagagaggaaacaaccctttttttgatgagttgtttttctacaatgtcaacatgaccccttctgaattgatggatgagatcatcagcatccgggtttataattctcactctctgcgggcagattgtctgatgggggaatttaagattgatgttggatttgtttatgatgaacctggccatgctgtcatgagaaagtggcttcttctcaatgacccggaagataccagttcaggttctaaaggttatatgaaagtcagcatgtttgtcctgggaaccggagatgagcctcctcctgagagacgagatcgtgataatgacagtgatgatgtggagagtaatttgttactccctgctggcattgccctccggtgggtgaccttcttgctgaaaatctaccgagctgaggacatcccccagatggatgatgccttctcacagacagtaaaggaaatatttggaggcaatgcagataagaaaaatctcgtggatccttttgtagaagtttcctttgctggaaaaaaggtttgtacaaacataattgagaaaaatgcaaacccagagtggaatcaggtcgtcaatcttcagatcaagtttccttcagtgtgtgaaaaaataaaactaacaatatatgactgggaccgtcttactaaaaatgatgtagttggaacaacatatctacacctctctaaaattgctgcctctggtggggaagtggaagatttctcatcttcgggaactggggctgcatcatatacagtaaacacaggagaaacagaggtaggctttgttccaacgtttggaccttgttacctgaatctttatggaagccccagagagtacacgggattcccagacccctatgatgagctgaatactggaaagggggaaggagttgcctacagaggcaggatcttggttgaattagccacttttcttgagaagacaccaccagataaaaagcttgagcccatttcaaatgatgacctgctggttgttgagaaataccagcgaaggcggaagtacagcctgtctgccgtgtttcattcagccaccatgttgcaagatgttggtgaggccattcagtttgaagtcagcattgggaactatggcaacaagtttgacaccacctgtaagcctttggcatcaacaactcagtacagccgtgctgtatttgatggcaactactattattacttgccttgggcccacaccaagccagttgttaccctgacttcatactgggaggatattagtcatcgcctggatgcggtgaacactctcctagctatggcagaacggctgcaaacaaatatagaagctctaaaatcagggatacaaggtaaaattcctgcaaaccagctggctgaattgtggctgaagctgatagatgaagttatagaagacacgagatacacgttgcctctcacagaaggaaaagccaacgtcacagttctcgatactcagatccgaaagctgcggtccaggtctctctcccaaatacatgaggcggctgtgaggatgaggtcggaagccacagatgtgaagtccacactggcagaaattgaggactggcttgataaattaatgcagctgactgaagagccacagaacagcatgcctgacatcatcatctggatgatccggggagagaagagactggcctatgcacgaattcccgcacatcaggtcttgtactccaccagtggtgagaatgcatctggaaaatactgtgggaaaacccaaaccatctttctgaagtatccacaggagaaaaacaacgggccaaaggtgcctgtggagttgcgagtgaacatctggctaggcttaagtgctgtggagaagaagtttaacagcttcgcagaaggaactttcaccgtctttgctgaaatgtatgaaaatcaagctctcatgtttggaaaatggggtacttctggattagtaggacgtcataagttttctgatgtcacaggaaaaataaaactcaagagggaattttttctgcctccaaaaggctgggaatgggaaggagagtggatagttgatcctgaaagaagcttgctgactgaggcagatgcaggtcacacggagttcactgatgaagtctatcagaacgagagccgctaccccgggggcgactggaagccggccgaggacacctacacggatgcgaacggcgataaagcagcatcacccagcgagttgacttgtcctccaggttgggaatgggaagatgatgcatggtcttatgacataaatcgagcggtggatgagaaaggctgggaatatggaatcaccattcctcctgatcataagcccaaatcctgggttgcagcagagaaaatgtaccacactcatagacggcgaaggctggtccgaaaacgcaagaaagatttaacacagactgcttcaagcaccgcaagggccatggaggaattgcaagaccaagagggctgggaatatgcttctctaattggctggaaatttcactggaaacaacgtagttcagataccttccgccgcagacgctggaggagaaaaatggctccttcagaaacacatggtgcagctgccatctttaaacttgaaggtgcccttggggcagacactaccgaagatggggatgagaagagcctggagaaacagaagcacagtgccaccactgtgttcggagcaaacacccccattgtttcctgcaattttgacagagtctacatctaccatctgcgctgctatgtctatcaagccagaaacctcttggctttagataaggatagcttttcagatccatatgctcatatctgtttcctccatcggagcaaaaccactgagatcatccattcaaccctgaatcccacgtgggaccaaacaattatattcgatgaagttgaaatctatggggaaccccaaacagttctacagaatccacccaaagttatcatggaactttttgacaatgaccaagtgggcaaagatgaatttttaggacgaagcattttctctcctgtggtgaaactgaactcagaaatggacatcacacccaaacttctctggcacccagtaatgaatggagacaaagcctgcggggatgttcttgtaactgcagagctgattctgaggggcaaggatggctccaaccttcccattcttccccctcaaagggcgccaaatctatacatggtcccccaggggatcaggcctgtggtccagctcactgccattgagattctagcttggggcttaagaaatatgaaaaacttccagatggcttctatcacatcccccagtcttgttgtggagtgtggaggagaaagggtggaatcggtggtgatcaaaaaccttaagaagacacccaactttccaagttctgttctcttcatgaaagtgttcttgcccaaggaggaattgtacatgcccccactggtgatcaaggtcatcgaccacaggcagtttgggcggaagcctgtcgtcggccagtgcaccatcgagcgcctggaccgctttcgctgtgacccttatgcagggaaagaggacatcgtcccacagctcaaagcctcccttctgtctgccccaccatgccgggacatcgttatcgaaatggaagacaccaaaccattactggcttctaagctgacagaaaaggaggaagaaatcgtggactggtggagtaaattttatgcttcctcaggggaacatgaaaaatgcggacagtatattcagaaaggctattccaagctcaaggtacctggatctatgctgctatgggtggagaatcaacatcctttgaaactggccacaggaagagctaagaggatgactaaaaggtcccttgggtgggtgctaatgagcagggcccaggaaaacctctgtcttcccggagagccctcttgcatgagtttcggctttgccaagattccagggacttgaggacagctattgagttatggttacgtgactgccacattggggcttggaggcatctggcagatggttgggaatgggctggcaccacactaattaggccacgatgatccagtttgactcagggaaacccagaagtcatagtgctctttgcagaatgacacaagatgtcaacatgctttgttgtgtactttgaacagggattggtttcacaagctgaaaagttgaatctgtcacatgtatgcagcataaaatcacagccgtgagaacatgtatacagcaggaagacaagcgactgagctaggcacggctgactagctctgagctttctgttcatgttttgaattttctaattcttcattcaattttcagcctgtagtgtcctcaagcagaagcagtgctaaagttttcagaacagtgtatatgagaaaaaaaaactttagaatgagaaatatctggtcattgaaataattttccccatcaaagcaaaaaaaaaaaaaa

SEQ ID NO: 422768 - DNA, 3841 bp, Homo sapiens
  misc_feature (37)..(37): n is a, c, g, or t
aaatcctcccttcactgggagagaacttctctcccanggcggtgcgacccggagctccagcgccctgggagaaatcctcccttcactgggagagaacttctctcccagggcggtgcgacccggagctccagcgcccgagtctccacttcgtttgctgaaacttgctttctaccagctaagaaccatgctgcgagtgattgtggaatctgccagcaatatccctaaaacgaaatttggcaagccggatcctattgtttctgtcatttttaaggatgagaaaaagaaaacaaagaaagttgataatgaattgaaccctgtctggaatgagattttggagtttgacttgaggggtataccactggacttttcatcttcccttgggattattgtgaaagattttgagacaattggacaaaataaattaattggcacggcgactgtagccctgaaggacctgactggtgaccagagcagatccctgccgtacaagctgatctccctgctaaatgaaaaagggcaagatactggggccaccattgacttggtgatcggctatgatccgccttctgctccacatccaaatgacctgagcgggcccagcgtgccaggcatgggaggagatggggaagaagatgaaggtgatgaagacaggttggacaatgcagtcaggggccctgggcccaaggggccagttgggacggtgtcggaagctcagcttgctcggaggctcaccaaagtaaagaacagccggcggatgctgtcaaataagccacaggacttccagatccgcgtccgagtgattgagggccgacagttaagtggtaacaacataaggcctgtggtcaaagttcacgtctgtggccagacacaccgaacaagaatcaagagaggaaacaaccctttttttgatgagttgtttttctacaatgtcaacatgaccccttctgaattgatggatgagatcatcagcatccgggtttataattctcactctctgcgggcagattgtctgatgggggaatttaagattgatgttggatttgtttatgatgaacctggccatgctgtcatgagaaagtggcttcttctcaatgacccggaagataccagttcaggttctaaaggttatatgaaagtcagcatgtttgtcctgggaaccggagatgagcctcctcctgagagacgagatcgtgataatgacagtgatgatgtggagagtaatttgttactccctgctggcattgccctccggtgggtgaccttcttgctgaaaatctaccgagctgaggacatcccccagatggatgatgccttctcacagacagtaaaggaaatatttggaggcaatgcagataagaaaaatctcgtggatccttttgtagaagtttcctttgctggaaaaaaggtttgtacaaacataattgagaaaaatgcaaacccagagtggaatcaggtcgtcaatcttcagatcaagtttccttcagtgtgtgaaaaaataaaactaacaatatatgactgggaccgtcttactaaaaatgatgtagttggaacaacatatctacacctctctaaaattgctgcctctggtggggaagtggaagatttctcatcttcgggaactggggctgcatcatatacagtaaacacaggagaaacagaggtaggctttgttccaacgtttggaccttgttacctgaatctttatggaagccccagagagtacacgggattcccagacccctatgatgagctgaatactggaaagggggaaggagttgcctacagaggcaggatcttggttgaattagccacttttcttgagaagacaccaccagataaaaagcttgagcccatttcaaatgatgacctgctggttgttgagaaataccagcgaaggcggaagtacagcctgtctgccgtgtttcattcagccaccatgttgcaagatgttggtgaggccattcagtttgaagtcagcattgggaactatggcaacaagtttgacaccacctgtaagcctttggcatcaacaactcagtacagccgtgctgtatttgatggcaactactattattacttgccttgggcccacaccaagccagttgttaccctgacttcatactgggaggatattagtcatcgcctggatgcggtgaacactctcctagctatggcagaacggctgcaaacaaatatagaagctctaaaatcagggatacaaggtaaaattcctgcaaaccagctggctgaattgtggctgaagctgatagatgaagttatagaagacacgagatacacgttgcctctcacagaaggaaaagccaacgtcacagttctcgatactcagatccgaaagctgcggtccaggtctctctcccaaatacatgaggcggctgtgaggatgaggtcggaagccacagatgtgaagtccacactggcagaaattgaggactggcttgataaattaatgcagctgactgaagagccacagaacagcatgcctgacatcatcatctggatgatccggggagagaagagactggcctatgcacgaattcccgcacatcaggtcttgtactccaccagtggtgagaatgcatctggaaaatactgtgggaaaacccaaaccatctttctgaagtatccacaggagaaaaacaacgggccaaaggtgcctgtggagttgcgagtgaacatctggctaggcttaagtgctgtggagaagaagtttaacagcttcgcagaaggaactttcaccgtctttgctgaaatgtatgaaaatcaagctctcatgtttggaaaatggggtacttctggattagtaggacgtcataagttttctgatgtcacaggaaaaataaaactcaagagggaattttttctgcctccaaaaggctgggaatgggaaggagagtggatagttgatcctgaaagaagcttgctgactgaggcagatgcaggtcacacggagttcactgatgaagtctatcagaacgagagccgctaccccgggggcgactggaagccggccgaggacacctacacggatgcgaacggcgataaagcagcatcacccagcgagttgacttgtcctccaggttgggaatgggaagatgatgcatggtcttatgacataaatcgagcggtggatgagaaaggctgggaatatggaatcaccattcctcctgatcataagcccaaatcctgggttgcagcagagaaaatgtaccacactcatagacggcgaaggctggtccgaaaacgcaagaaagatttaacacagactgcttcaagcaccgcaagggccatggaggaattgcaagaccaagagggctgggaatatgcttctctaattggctggaaatttcactggaaacaacgtagttcagataccttccgccgcagacgctggaggagaaaaatggctccttcagaaacacatggtgcagctgccatctttaaacttgaaggtgcccttggggcagacactaccgaagatggggatgagaagagcctggagaaacagaagcacagtgccaccactgtgttcggagcaaacacccccattgtttcctgcaattttgacagagtctacatctaccatctgcgctgctatgtctatcaagccagaaacctcttggctttagataaggatagcttttcagatccatatgctcatatctgtttcctccatcggagcaaaaccactgagatcatccattcaaccctgaatcccacgcgttccttgcagacatctgagtttcacttcactttcataggtgtgtgcctctccagttgccactgcattggcgacagatggtggggacccacaggacacggg

SEQ ID NO: 422769 - DNA, 2045 bp, Homo sapiens
  misc_feature (37)..(37): n is a, c, g, or t
aaatcctcccttcactgggagagaacttctctcccanggcggtgcgacccggagctccagcgccctgggagaaatcctcccttcactgggagagaacttctctcccagggcggtgcgacccggagctccagcgcccgagtctccacttcgtttgctgaaacttgctttctaccagctaagaaccatgctgcgagtgattgtggaatctgccagcaatatccctaaaacgaaatttggcaagccggatcctattgtttctgtcatttttaaggatgagaaaaagaaaacaaagaaagttgataatgaattgaaccctgtctggaatgagattttggagtttgacttgaggggtataccactggacttttcatcttcccttgggattattgtgaaagattttgagacaattggacaaaataaattaattggcacggcgactgtagccctgaaggacctgactggtgaccagagcagatccctgccgtacaagctgatctccctgctaaatgaaaaagggcaagatactggggccaccattgacttggtgatcggctatgatccgccttctgctccacatccaaatgacctgagcgggcccagcgtgccaggcatgggaggagatggggaagaagatgaaggtgatgaagacaggttggacaatgcagtcaggggccctgggcccaaggggccagttgggacggtgtcggaagctcagcttgctcggaggctcaccaaagtaaagaacagccggcggatgctgtcaaataagccacaggacttccagatccgcgtccgagtgattgagggccgacagttaagtggtaacaacataaggcctgtggtcaaagttcacgtctgtggccagacacaccgaacaagaatcaagagaggaaacaaccctttttttgatgagttgtttttctacaatgtcaacatgaccccttctgaattgatggatgagatcatcagcatccgggtttataattctcactctctgcgggcagattgtctgatgggggaatttaagattgatgttggatttgtttatgatgaacctggccatgctgtcatgagaaagtggcttcttctcaatgacccggaagataccagttcaggttctaaaggttatatgaaagtcagcatgtttgtcctgggaaccggagatgagcctcctcctgagagacgagatcgtgataatgacagtgatgatgtggagagtaatttgttactccctgctggcattgccctccggtgggtgaccttcttgctgaaaatctaccgagctgaggacatcccccagagtatgtactgatttaatcttgccccagaattgttgattatgtgtgtgatgaaatgtgttaaaaatcaaactttaatagtgattcgtgtccctatcgtatgtttttcttctgaaagggcttcatgggcttattttcattcattctggcccagttgaaagctacctgagcaggctcatggcacagctagttggttgctgatcatgttccttgttgagtacctgcctttggcccatttgactctctctcttgctattctatatcttctctttattctagaggatgctaaagagatatgagcagtcagcacttccaaccccttttatcccaaatgaaaatgtgaactgttattatcaaatcaaggtgtttgctatccactaatttttgtattttcaatagagaaggggtttcaccatgttgaccaggatggccttgctcttctgacctcatgatccaccagccttggcctctcaaagtcctgggattacaggcatgagccactgcgcctagcctgttgcaactattttgatgtataagagaacttttaaaattttgccaaatttctgggaattgaatttaatttctgctgtataactattaccttccagtggatgatgccttctcacagacagtaaaggaaatatttggaggcaatgcagataagaaaaatctcgtggatccttttgtagaagtttcctttgctggaaaaaaggtttgtacatgatctaaatgcagatgctgctagta

SEQ ID NO: 422770 - DNA, 724 bp, Homo sapiens
  misc_feature (37)..(37): n is a, c, g, or t
aaatcctcccttcactgggagagaacttctctcccanggcggtgcgacccggagctccagcgccctgggagaaatcctcccttcactgggagagaacttctctcccagggcggtgcgacccggagctccagcgcccgagtctccacttcgtttgctgaaacttgctttctaccagctaagaaccatgctgcgagtgattgtggaatctgccagcaatatccctaaaacgaaatttggcaagccggatcctattgtttctgtcatttttaaggatgagaaaaagaaaacaaagaaagttgataatgaattgaaccctgtctggaatgagattttggagtttgacttgaggggtataccactggacttttcatcttcccttgggattattgtgaaagattttgagacaattggacaaaataaattaattggcacggcgactgtagccctgaaggacctgactggtgaccagagcagatccctgccgtacaagctgatctccctgctaaatgaaaaagggcaagatactggggccaccattgacttggtgatcggctatgatccgccttctgctccacatccaaatgacctgagcgggcccagcgtgccaggcatgggaggagatggggaagaagatgaaggtgatgtaaacacgggagaacgaaacaaacatgaggacgtcggcgcggacccggcccggccggacggcggtaccaacagcatgttt

SEQ ID NO: 422771 - DNA, 755 bp, Homo sapiens
  misc_feature (7)..(7): n is a, c, g, or t
  misc_feature (63)..(63): n is a, c, g, or t
  misc_feature (69)..(69): n is a, c, g, or t
  misc_feature (71)..(71): n is a, c, g, or t
  misc_feature (74)..(74): n is a, c, g, or t
tccagtnacgtaaagtaagtcaccaggtagtcaagtaaagtccgtgtagaacgtggggtggtnaaagtntnagngtgtgtgtagtcagtagtgtaaagtcaggtgtcgtgtggtaggtcttacattttttgttgttgttctggaatctacctgtaaaggaaagtagacctggattcatgtgggctcttccatggcttaagtgttgcccaagagattttgtaggtaacgatttttttttttctggccacaatgccagatactaagctaattggtctatcatacacatgcttgcagtagtttcatgaagtttagtctctggcgtgaaattttaatcaccaatgaaggagagaggcacctgtaggtaaatttactttagtcatattttatataaaacaagggttagtattcatgtaacattgagaagtttgggaataacagcagatatgattaataaaagtcataaccatactcaagagcttcttagattttcatttatggcaagttataattacatgtaaaagtagtcttgaacaggtaaatattgagcctttttaataggatgtaacctttgtagagcccaaattctaaagaacaaaattggcaatccaattaaactacatgcaaaataagtgtgatacatgcatctacaaaaacagtgttctcattttttctgggtatgcaaatgattggattgtttctccttggatctctgtatgtacaggtaaagaatagtttacagatccctgctgaaatta

SEQ ID NO: 422772 - DNA, 668 bp, Homo sapiens
atgtgttctgagtttcttttattgacgtatttcttctctctatctctcagaaaaacaaccctttttgctgcacatgtaagtggagctgtgcttacctttggtatgggctcattatatatgtttgttcagaccatcctttcctaccaaatgcagcccaaaatccatggcaaacaagtcttctggatcagactgttgttggttatctggtgtggagtaagtgcacttagcatgctgacttgctcatcagttttgcacagtggcaattttgggactgatttagaacagaaactccattggaaccccgaggacaaagtaagaacttacagtctataaacttagttttatattaaagatggttattttgattgatcttgatatgtttttcatttcatcagtaacaatgaaagtcttctggtagaataatcagttctgtattaaaattattttcttgatatggtagggtttatgtagaaccttccatattctcctgtcacctgtgatctgtagatattgtcaaaatatgaagagcattgcgatggcagaagagttttctgagaaattgactcccctaaatgtgggtatagtatataatatagccaaccgagatcatttatgttttgaatacttgttttctgaattgaaaagacatcttctcccactttttgtta

SEQ ID NO: 422773 - DNA, 620 bp, Homo sapiens
gggcggggatgagtgcagctgggctcagctccccgtgccctacctttctgttctcttccttggtttcccctactctcctcctgccccaagcagtgcctgatgccgagttccgtctctcgcgtcttttcctggtcccaggcaaagcggagcggagatcctcaaacggcctagtgcttcgcgcttccggagaaaatcagcggtctaattaattcctctggtttgttgaagcagttaccaagaatcttcaaccctttcccacaaaagctaattgagtacacgttcctgttgagtacacgttcctgttgatttacaaaaggtgcaggtatgagcaggtctgaagactaacattttgtgaagttgtaaaacaggtaattcatttttcacattataagaggaacaagtacatactgatcatctctgaaaataagtatcttatttaatccttgaataaacctctatgaaatgggtattattttatactatttaacagataatactaaaagctaccatttattatgcaccagcaatctgttaggttctttgcttgtgctatcagtataagctgtacaaagactactcagcacagtccaatagaacttttccacaatcatggaaatttt

SEQ ID NO: 422774 - DNA, 1428 bp, Homo sapiens
ccggtgaccgcgctccgcagccttaccctgaccccaacaagtacacccctagaaatatcgcctccgactccagccgactgggtgactgatcggcggcagcacgttcacgacactttcgcgattgccgtaaaggggaacaaggtttgaacgagcagcgccgcaggcgcgctcctcggtgccgtgagcgcgccccggggccggccggtctgctcgggagcgcgccccgtggcccagccctgtctccttttagcataggggcttcggcgccagcggccagcgctagtcggtctggtaaggatttacaaaaggtgcaggtatgagcaggtctgaagactaacattttgtgaagttgtaaaacagaaaacctgttagaaatgtggtggtttcagcaaggcctcagtttccttccttcagcccttgtaatttggacatctgctgctttcatattttcatacattactgcagtaacactccaccatatagacccggctttaccttatatcagtgacactggtacagtagctccagaaaaatgcttatttggggcaatgctaaatattgcggcagttttatgcattgctaccatttatgttcgttataagcaagttcatgctctgagtcctgaagagaacgttatcatcaaattaaacaaggctggccttgtacttggaatactgagttgtttaggactttctattgtggcaaacttccagaaaacaaccctttttgctgcacatgtaagtggagctgtgcttacctttggtatgggctcattatatatgtttgttcagaccatcctttcctaccaaatgcagcccaaaatccatggcaaacaagtcttctggatcagactgttgttggttatctggtgtggagtaagtgcacttagcatgctgacttgctcatcagttttgcacagtggcaattttgggactgatttagaacagaaactccattggaaccccgaggacaaaggttatgtgcttcacatgatcactactgcagcagaatggtctatgtcattttccttctttggttttttcctgacttacattcgtgattttcagaaaatttctttacgggtggaagccaatttacatggattaaccctctatgacactgcaccttgccctattaacaatgaacgaacacggctactttccagagatatttgatgaaaggataaaatatttctgtaatgattatgattctcagggattggggaaaggttcacagaagttgcttattcttctctgaaattttcaaccacttaatcaaggctgacagtaacactgatgaatgctgataatcaggaaacatgaaagaagccatttgatagattattctaaaggatatcatcaagaagactattaaaaacacctatgcctatacttttttatctcagaaaataaagtcaaaagactatga

SEQ ID NO: 422775 - DNA, 1594 bp, Homo sapiens
ccggtgaccgcgctccgcagccttaccctgaccccaacaagtacacccctagaaatatcgcctccgactccagccgactgggtgactgatcggcggcagcacgttcacgacactttcgcgattgccgtaaaggggaacaaggtttgaacgagcagcgccgcaggcgcgctcctcggtgccgtgagcgcgccccggggccggccggtctgctcgggagcgcgccccgtggcccagccctgtctccttttagcataggggcttcggcgccagcggccagcgctagtcggtctggtaaggcaaagcggagcggagatcctcaaacggcctagtgcttcgcgcttccggagaaaatcagcggtctaattaattcctctggtttgttgaagcagttaccaagaatcttcaaccctttcccacaaaagctaattgagtacacgttcctgttgagtacacgttcctgttgatttacaaaaggtgcaggtatgagcaggtctgaagactaacattttgtgaagttgtaaaacagaaaacctgttagaaatgtggtggtttcagcaaggcctcagtttccttccttcagcccttgtaatttggacatctgctgctttcatattttcatacattactgcagtaacactccaccatatagacccggctttaccttatatcagtgacactggtacagtagctccagaaaaatgcttatttggggcaatgctaaatattgcggcagttttatgcattgctaccatttatgttcgttataagcaagttcatgctctgagtcctgaagagaacgttatcatcaaattaaacaaggctggccttgtacttggaatactgagttgtttaggactttctattgtggcaaacttccagaaaacaaccctttttgctgcacatgtaagtggagctgtgcttacctttggtatgggctcattatatatgtttgttcagaccatcctttcctaccaaatgcagcccaaaatccatggcaaacaagtcttctggatcagactgttgttggttatctggtgtggagtaagtgcacttagcatgctgacttgctcatcagttttgcacagtggcaattttgggactgatttagaacagaaactccattggaaccccgaggacaaaggttatgtgcttcacatgatcactactgcagcagaatggtctatgtcattttccttctttggttttttcctgacttacattcgtgattttcagaaaatttctttacgggtggaagccaatttacatggattaaccctctatgacactgcaccttgccctattaacaatgaacgaacacggctactttccagagatatttgatgaaaggataaaatatttctgtaatgattatgattctcagggattggggaaaggttcacagaagttgcttattcttctctgaaattttcaaccacttaatcaaggctgacagtaacactgatgaatgctgataatcaggaaacatgaaagaagccatttgatagattattctaaaggatatcatcaagaagactattaaaaacacctatgcctatacttttttatctcagaaaataaagtcaaaagactatga

SEQ ID NO: 422776 - DNA, 2290 bp, Homo sapiens
ccggtgaccgcgctccgcagccttaccctgaccccaacaagtacacccctagaaatatcgcctccgactccagccgactgggtgactgatcggcggcagcacgttcacgacactttcgcgattgccgtaaaggggaacaaggtttgaacgagcagcgccgcaggcgcgctcctcggtgccgtgagcgcgccccggggccggccggtctgctcgggagcgcgccccgtggcccagccctgtctccttttagcataggggcttcggcgccagcggccagcgctagtcggtctggtaaggatttacaaaaggtgcaggtatgagcaggtctgaagactaacattttgtgaagttgtaaaacagaaaacctgttagaaatgtggtggtttcagcaaggcctcagtttccttccttcagcccttgtaatttggacatctgctgctttcatattttcatacattactgcagtaacactccaccatatagacccggctttaccttatatcagtgacactggtacagtagctccagaaaaatgcttatttggggcaatgctaaatattgcggcagttttatgcattgctaccatttatgttcgttataagcaagttcatgctctgagtcctgaagagaacgttatcatcaaattaaacaaggctggccttgtacttggaatactgagttgtttaggactttctattgtggcaaacttccagaaaacaaccctttttgctgcacatgtaagtggagctgtgcttacctttggtatgggctcattatatatgtttgttcagaccatcctttcctaccaaatgcagcccaaaatccatggcaaacaagtcttctggatcagactgttgttggttatctggtgtggagtaagtgcacttagcatgctgacttgctcatcagttttgcacagtggcaattttgggactgatttagaacagaaactccattggaaccccgaggacaaaggttatgtgcttcacatgatcactactgcagcagaatggtctatgtcattttccttctttggttttttcctgacttacattcgtgattttcagaaaatttctttacgggtggaagccaatttacatggattaaccctctatgacactgcaccttgccctattaacaatgaacgaacacggctactttccagagatatttgatgaaaggataaaatatttctgtaatgattatgattctcagggattggggaaaggttcacagaagttgcttattcttctctgaaattttcaaccacttaatcaaggctgacagtaacactgatgaatgctgataatcaggaaacatgaaagaagccatttgatagattattctaaaggatatcatcaagaagactattaaaaacacctatgcctatacttttttatctcagaaaataaagtcaaaagactatgatatcatagttttttataccttatttaagagaaacaacctgacgtgcaccaatcagtctgcacatcccaacccttcacattttataaattattgtagatcatgttttgttaggagcacttttatgagagacattttccatgactaaataatcagcattagtcagtaaatcctttagaactgggttttgaaatgggagttttatcatattaaatcatttcttgtagtcttacattttttgttgttgttctggaatctacctgtaaaggaaagtagacctggattcatgtgggctcttccatggcttaagtgttgcccaagagattttgtaggtaacgatttttttttttctggccacaatgccagatactaagctaattggtctatcatacacatgcttgcagtagtttcatgaagtttagtctctggcgtgaaattttaatcaccaatgaaggagagaggcacctgtaggtaaatttactttagtcatattttatataaaacaagggttagtattcatgtaacattgagaagtttgggaataacagcagatatgattaataaaagtcataaccatactcaagagcttcttagattttcatttatggcaagttataattacatgtaaaagtagtcttgaacaggtaaatattgagcctttttaataggatgtaacctttgtagagcccaaattctaaagaacaaaattggcaatccaattaaactacatgcaaaataagtgtgatacatgcatctacaaaaacagtgttctcattttttctgggtatgcaaatgattggattgtttctccttggatctctgtatgtacaggtaaagaatagtttacagatccctgctgaaatta

SEQ ID NO: 422777 - DNA, 1639 bp, Homo sapiens
ccggtgaccgcgctccgcagccttaccctgaccccaacaagtacacccctagaaatatcgcctccgactccagccgactgggtgactgatcggcggcagcacgttcacgacactttcgcgattgccgtaaaggggaacaaggtttgaacgagcagcgccgcaggcgcgctcctcggtgccgtgagcgcgccccggggccggccggtctgctcgggagcgcgccccgtggcccagccctgtctccttttagcataggggcttcggcgccagcggccagcgctagtcggtctggtaagtgcctgatgccgagttccgtctctcgcgtcttttcctggtcccaggcaaagcggagcggagatcctcaaacggcctagtgcttcgcgcttccggagaaaatcagcggtctaattaattcctctggtttgttgaagcagttaccaagaatcttcaaccctttcccacaaaagctaattgagtacacgttcctgttgagtacacgttcctgttgatttacaaaaggtgcaggtatgagcaggtctgaagactaacattttgtgaagttgtaaaacagaaaacctgttagaaatgtggtggtttcagcaaggcctcagtttccttccttcagcccttgtaatttggacatctgctgctttcatattttcatacattactgcagtaacactccaccatatagacccggctttaccttatatcagtgacactggtacagtagctccagaaaaatgcttatttggggcaatgctaaatattgcggcagttttatgcattgctaccatttatgttcgttataagcaagttcatgctctgagtcctgaagagaacgttatcatcaaattaaacaaggctggccttgtacttggaatactgagttgtttaggactttctattgtggcaaacttccagaaaacaaccctttttgctgcacatgtaagtggagctgtgcttacctttggtatgggctcattatatatgtttgttcagaccatcctttcctaccaaatgcagcccaaaatccatggcaaacaagtcttctggatcagactgttgttggttatctggtgtggagtaagtgcacttagcatgctgacttgctcatcagttttgcacagtggcaattttgggactgatttagaacagaaactccattggaaccccgaggacaaaggttatgtgcttcacatgatcactactgcagcagaatggtctatgtcattttccttctttggttttttcctgacttacattcgtgattttcagaaaatttctttacgggtggaagccaatttacatggattaaccctctatgacactgcaccttgccctattaacaatgaacgaacacggctactttccagagatatttgatgaaaggataaaatatttctgtaatgattatgattctcagggattggggaaaggttcacagaagttgcttattcttctctgaaattttcaaccacttaatcaaggctgacagtaacactgatgaatgctgataatcaggaaacatgaaagaagccatttgatagattattctaaaggatatcatcaagaagactattaaaaacacctatgcctatacttttttatctcagaaaataaagtcaaaagactatga

SEQ ID NO: 422778 - DNA, 1436 bp, Homo sapiens
gggcggggatgagtgcagctgggctcagctccccgtgccctacctttctgttctcttccttggtttcccctactctcctcctgccccaagcagtgcctgatgccgagttccgtctctcgcgtcttttcctggtcccaggcaaagcggagcggagatcctcaaacggcctagtgcttcgcgcttccggagaaaatcagcggtctaattaattcctctggtttgttgaagcagttaccaagaatcttcaaccctttcccacaaaagctaattgagtacacgttcctgttgagtacacgttcctgttgatttacaaaaggtgcaggtatgagcaggtctgaagactaacattttgtgaagttgtaaaacagaaaacctgttagaaatgtggtggtttcagcaaggcctcagtttccttccttcagcccttgtaatttggacatctgctgctttcatattttcatacattactgcagtaacactccaccatatagacccggctttaccttatatcagtgacactggtacagtagctccagaaaaatgcttatttggggcaatgctaaatattgcggcagttttatgcattgctaccatttatgttcgttataagcaagttcatgctctgagtcctgaagagaacgttatcatcaaattaaacaaggctggccttgtacttggaatactgagttgtttaggactttctattgtggcaaacttccagaaaacaaccctttttgctgcacatgtaagtggagctgtgcttacctttggtatgggctcattatatatgtttgttcagaccatcctttcctaccaaatgcagcccaaaatccatggcaaacaagtcttctggatcagactgttgttggttatctggtgtggagtaagtgcacttagcatgctgacttgctcatcagttttgcacagtggcaattttgggactgatttagaacagaaactccattggaaccccgaggacaaaggttatgtgcttcacatgatcactactgcagcagaatggtctatgtcattttccttctttggttttttcctgacttacattcgtgattttcagaaaatttctttacgggtggaagccaatttacatggattaaccctctatgacactgcaccttgccctattaacaatgaacgaacacggctactttccagagatatttgatgaaaggataaaatatttctgtaatgattatgattctcagggattggggaaaggttcacagaagttgcttattcttctctgaaattttcaaccacttaatcaaggctgacagtaacactgatgaatgctgataatcaggaaacatgaaagaagccatttgatagattattctaaaggatatcatcaagaagactattaaaaacacctatgcctatacttttttatctcagaaaataaagtcaaaagactatga

SEQ ID NO: 422779 - DNA, 1552 bp, Homo sapiens
ccggtgaccgcgctccgcagccttaccctgaccccaacaagtacacccctagaaatatcgcctccgactccagccgactgggtgactgatcggcggcagcacgttcacgacactttcgcgattgccgtaaaggggaacaaggtttgaacgagcagcgccgcaggcgcgctcctcggtgccgtgagcgcgccccggggccggccggtctgctcgggagcgcgccccgtggcccagccctgtctccttttagcataggggcttcggcgccagcggccagcgctagtcggtctggtaagtgcctgatgccgagttccgtctctcgcgtcttttcctggtcccaggcaaagcggagcggagatcctcaaacggcctagtgcttcgcgcttccggagaaaatcagcggtctaattaattcctctggatttacaaaaggtgcaggtatgagcaggtctgaagactaacattttgtgaagttgtaaaacagaaaacctgttagaaatgtggtggtttcagcaaggcctcagtttccttccttcagcccttgtaatttggacatctgctgctttcatattttcatacattactgcagtaacactccaccatatagacccggctttaccttatatcagtgacactggtacagtagctccagaaaaatgcttatttggggcaatgctaaatattgcggcagttttatgcattgctaccatttatgttcgttataagcaagttcatgctctgagtcctgaagagaacgttatcatcaaattaaacaaggctggccttgtacttggaatactgagttgtttaggactttctattgtggcaaacttccagaaaacaaccctttttgctgcacatgtaagtggagctgtgcttacctttggtatgggctcattatatatgtttgttcagaccatcctttcctaccaaatgcagcccaaaatccatggcaaacaagtcttctggatcagactgttgttggttatctggtgtggagtaagtgcacttagcatgctgacttgctcatcagttttgcacagtggcaattttgggactgatttagaacagaaactccattggaaccccgaggacaaaggttatgtgcttcacatgatcactactgcagcagaatggtctatgtcattttccttctttggttttttcctgacttacattcgtgattttcagaaaatttctttacgggtggaagccaatttacatggattaaccctctatgacactgcaccttgccctattaacaatgaacgaacacggctactttccagagatatttgatgaaaggataaaatatttctgtaatgattatgattctcagggattggggaaaggttcacagaagttgcttattcttctctgaaattttcaaccacttaatcaaggctgacagtaacactgatgaatgctgataatcaggaaacatgaaagaagccatttgatagattattctaaaggatatcatcaagaagactattaaaaacacctatgcctatacttttttatctcagaaaataaagtcaaaagactatga

SEQ ID NO: 422780 - DNA, 2419 bp, Homo sapiens
ctgtccggtctgatagtccacttctagaactgaatacagttcctaattaaaccctattgaaatttaagtaaaatttaaaaatttggggatacaatgtctactttataatgctgtgtgtgtgtgagacagagtctcgctctactgcccaggctggagtgcagtggcacgacctcagctcactgcaacctctgtctcctgagtagctgggattacaggcgcccgccaccacgcccagctaatttttgtatttttagtagagacagggtgtcaccatgttggccaggatagtctcaatctcctgacctcgtgatccgcccgcctgggcctcccaaagtgctgggattacaggcgagagccaccgcccccggcctgcaagaacatttttataaacattcttactgccctgtgaaatttattcctgcatactctcaattattttgaaaggctttttgaattatgaatcattgaaattctaattttgttggtttggcaattactcagcaatgctttcaggtttcaaaggcaaaaacacattgacaattagtcttcctcacctagtccatgcatttaaattcctcagttgtcattcgcaaactggtaaaccatttcaagccctgcttctataaactgtcagtttaaacaactgggactctcaaagcctaaggagatacgaatccaagataattcgtacatagaaaaaaatcatacataaagttgtactccatacctgtggccttatgactacataattaataaatcagctatcattattatattgtatgcttattctactccactccaaggaacaactgtttgagtactgtaactcagaagctaagtaaattgcctgaaatcatagagttgggtagtagtaaaggtaggacttgtgtttagagatatctcatctcacagctgtgttctttacatcacatggacttgcaattgctttattttgcttaataatctattatttttttcctcatgtctctctataggagaagacgcaatgatatttcttttttcctctttaagatagtgaaggtgttggatgtgagaatgcatatgaaaatttatatcctggaattaaaacattatttaattccagatggtacaacatcattgtaaaaaactcaagtgtcaactcatcaaagaaaaataacctgttaacaatgctgtagcctagtattctgcccatgaacaatattggcgtgttgacttaaaactgtacatgtttaaaattgtgtggattgagagaaaaacttcttattttctttgtgtcggttttaggatttacaaaaggtgcaggtatgagcaggtctgaagactaacattttgtgaagttgtaaaacagaaaacctgttagaaatgtggtggtttcagcaaggcctcagtttccttccttcagcccttgtaatttggacatctgctgctttcatattttcatacattactgcagtaacactccaccatatagacccggctttaccttatatcagtgacactggtacagtagctccagaaaaatgcttatttggggcaatgctaaatattgcggcagttttatgcattgctaccatttatgttcgttataagcaagttcatgctctgagtcctgaagagaacgttatcatcaaattaaacaaggctggccttgtacttggaatactgagttgtttaggactttctattgtggcaaacttccagaaaacaaccctttttgctgcacatgtaagtggagctgtgcttacctttggtatgggctcattatatatgtttgttcagaccatcctttcctaccaaatgcagcccaaaatccatggcaaacaagtcttctggatcagactgttgttggttatctggtgtggagtaagtgcacttagcatgctgacttgctcatcagttttgcacagtggcaattttgggactgatttagaacagaaactccattggaaccccgaggacaaaggttatgtgcttcacatgatcactactgcagcagaatggtctatgtcattttccttctttggttttttcctgacttacattcgtgattttcagaaaatttctttacgggtggaagccaatttacatggattaaccctctatgacactgcaccttgccctattaacaatgaacgaacacggctactttccagagatatttgatgaaaggataaaatatttctgtaatgattatgattctcagggattggggaaaggttcacagaagttgcttattcttctctgaaattttcaaccacttaatcaaggctgacagtaacactgatgaatgctgataatcaggaaacatgaaagaagccatttgatagattattctaaaggatatcatcaagaagactattaaaaacacctatgcctatacttttttatctcagaaaataaagtcaaaagactatga

SEQ ID NO: 422781 - DNA, 1507 bp, Homo sapiens
ccggtgaccgcgctccgcagccttaccctgaccccaacaagtacacccctagaaatatcgcctccgactccagccgactgggtgactgatcggcggcagcacgttcacgacactttcgcgattgccgtaaaggggaacaaggtttgaacgagcagcgccgcaggcgcgctcctcggtgccgtgagcgcgccccggggccggccggtctgctcgggagcgcgccccgtggcccagccctgtctccttttagcataggggcttcggcgccagcggccagcgctagtcggtctggtaaggcaaagcggagcggagatcctcaaacggcctagtgcttcgcgcttccggagaaaatcagcggtctaattaattcctctggatttacaaaaggtgcaggtatgagcaggtctgaagactaacattttgtgaagttgtaaaacagaaaacctgttagaaatgtggtggtttcagcaaggcctcagtttccttccttcagcccttgtaatttggacatctgctgctttcatattttcatacattactgcagtaacactccaccatatagacccggctttaccttatatcagtgacactggtacagtagctccagaaaaatgcttatttggggcaatgctaaatattgcggcagttttatgcattgctaccatttatgttcgttataagcaagttcatgctctgagtcctgaagagaacgttatcatcaaattaaacaaggctggccttgtacttggaatactgagttgtttaggactttctattgtggcaaacttccagaaaacaaccctttttgctgcacatgtaagtggagctgtgcttacctttggtatgggctcattatatatgtttgttcagaccatcctttcctaccaaatgcagcccaaaatccatggcaaacaagtcttctggatcagactgttgttggttatctggtgtggagtaagtgcacttagcatgctgacttgctcatcagttttgcacagtggcaattttgggactgatttagaacagaaactccattggaaccccgaggacaaaggttatgtgcttcacatgatcactactgcagcagaatggtctatgtcattttccttctttggttttttcctgacttacattcgtgattttcagaaaatttctttacgggtggaagccaatttacatggattaaccctctatgacactgcaccttgccctattaacaatgaacgaacacggctactttccagagatatttgatgaaaggataaaatatttctgtaatgattatgattctcagggattggggaaaggttcacagaagttgcttattcttctctgaaattttcaaccacttaatcaaggctgacagtaacactgatgaatgctgataatcaggaaacatgaaagaagccatttgatagattattctaaaggatatcatcaagaagactattaaaaacacctatgcctatacttttttatctcagaaaataaagtcaaaagactatga

SEQ ID NO: 422782 - DNA, 2523 bp, Homo sapiens
ccggtgaccgcgctccgcagccttaccctgaccccaacaagtacacccctagaaatatcgcctccgactccagccgactgggtgactgatcggcggcagcacgttcacgacactttcgcgattgccgtaaaggggaacaaggtttgaacgagcagcgccgcaggcgcgctcctcggtgccgtgagcgcgccccggggccggccggtctgctcgggagcgcgccccgtggcccagccctgtctccttttagcataggggcttcggcgccagcggccagcgctagtcggtctggtaaggcaaagcggagcggagatcctcaaacggcctagtgcttcgcgcttccggagaaaatcagcggtctaattaattcctctggtttgttgaagcagttaccaagaatcttcaaccctttcccacaaaagctaattgagtacacgttcctgttgagtacacgttcctgttgatttacaaaaggtgcaggtatgagcaggtctgaagactaacattttgtgaagttgtaaaacagaaaacctgttagaaatgtggtggtttcagcaaggcctcagtttccttccttcagcccttgtaatttggacatctgctgctttcatattttcatacattactgcagtaacactccaccatatagacccggctttaccttatatcagtgacactggtacagtagctccagaaaaatgcttatttggggcaatgctaaatattgcggcagttttatgcattgctaccatttatgttcgttataagcaagttcatgctctgagtcctgaagagaacgttatcatcaaattaaacaaggctggccttgtacttggaatactgagttgtttaggactttctattgtggcaaacttccagaaaacaaccctttttgctgcacatgtaagtggagctgtgcttacctttggtatgggctcattatatatgtttgttcagaccatcctttcctaccaaatgcagcccaaaatccatggcaaacaagtcttctggatcagactgttgttggttatctggtgtggagtaagtgcacttagcatgctgacttgctcatcagttttgcacagtggcaattttgggactgatttagaacagaaactccattggaaccccgaggacaaaatattgtcaaaatatgaagagcattgcgatggcagaagagttttctgagaaattgactcccctaaatggttatgtgcttcacatgatcactactgcagcagaatggtctatgtcattttccttctttggttttttcctgacttacattcgtgattttcagaaaatttctttacgggtggaagccaatttacatggattaaccctctatgacactgcaccttgccctattaacaatgaacgaacacggctactttccagagatatttgatgaaaggataaaatatttctgtaatgattatgattctcagggattggggaaaggttcacagaagttgcttattcttctctgaaattttcaaccacttaatcaaggctgacagtaacactgatgaatgctgataatcaggaaacatgaaagaagccatttgatagattattctaaaggatatcatcaagaagactattaaaaacacctatgcctatacttttttatctcagaaaataaagtcaaaagactatgatatcatagttttttataccttatttaagagaaacaacctgacgtgcaccaatcagtctgcacatcccaacccttcacattttataaattattgtagatcatgttttgttaggagcacttttatgagagacattttccatgactaaataatcagcattagtcagtaaatcctttagaactgggttttgaaatgggagttttatcatattaaatcatttcttgtagtcttacattttttgttgttgttctggaatctacctgtaaaggaaagtagacctggattcatgtgggctcttccatggcttaagtgttgcccaagagattttgtaggtaacgatttttttttttctggccacaatgccagatactaagctaattggtctatcatacacatgcttgcagtagtttcatgaagtttagtctctggcgtgaaattttaatcaccaatgaaggagagaggcacctgtaggtaaatttactttagtcatattttatataaaacaagggttagtattcatgtaacattgagaagtttgggaataacagcagatatgattaataaaagtcataaccatactcaagagcttcttagattttcatttatggcaagttataattacatgtaaaagtagtcttgaacaggtaaatattgagcctttttaataggatgtaacctttgtagagcccaaattctaaagaacaaaattggcaatccaattaaactacatgcaaaataagtgtgatacatgcatctacaaaaacagtgttctcattttttctgggtatgcaaatgattggattgtttctccttggatctctgtatgtacaggtaaagaatagtttacagatccctgctgaaatta

SEQ ID NO: 422783 - DNA, 1499 bp, Homo sapiens
ccggtgaccgcgctccgcagccttaccctgaccccaacaagtacacccctagaaatatcgcctccgactccagccgactgggtgactgatcggcggcagcacgttcacgacactttcgcgattgccgtaaaggggaacaaggtttgaacgagcagcgccgcaggcgcgctcctcggtgccgtgagcgcgccccggggccggccggtctgctcgggagcgcgccccgtggcccagccctgtctccttttagcataggggcttcggcgccagcggccagcgctagtcggtctggtaagtgcctgatgccgagttccgtctctcgcgtcttttcctggtcccaggcaaagcggagcggagatcctcaaacggcctagtgcttcgcgcttccggagaaaatcagcggtctaattaattcctctggtttgttgaagcagttaccaagaatcttcaaccctttcccacaaaagctaattgagtacacgttcctgttgagtacacgttcctgttgatttacaaaaggtgcaggtatgagcaggtctgaagactaacattttgtgaagttgtaaaacagaaaacctgttagaaatgtggtggtttcagcaaggcctcagtttccttccttcagcccttgtaatttggacatctgctgctttcatattttcatacattactgcagtaacactccaccatatagacccggctttaccttatatcagtgacactggtacagtagctccagaaaaatgcttatttggggcaatgctaaatattgcggcagttttataaaacaaccctttttgctgcacatgtaagtggagctgtgcttacctttggtatgggctcattatatatgtttgttcagaccatcctttcctaccaaatgcagcccaaaatccatggcaaacaagtcttctggatcagactgttgttggttatctggtgtggagtaagtgcacttagcatgctgacttgctcatcagttttgcacagtggcaattttgggactgatttagaacagaaactccattggaaccccgaggacaaaggttatgtgcttcacatgatcactactgcagcagaatggtctatgtcattttccttctttggttttttcctgacttacattcgtgattttcagaaaatttctttacgggtggaagccaatttacatggattaaccctctatgacactgcaccttgccctattaacaatgaacgaacacggctactttccagagatatttgatgaaaggataaaatatttctgtaatgattatgattctcagggattggggaaaggttcacagaagttgcttattcttctctgaaattttcaaccacttaatcaaggctgacagtaacactgatgaatgctgataatcaggaaacatgaaagaagccatttgatagattattctaaaggatatcatcaagaagactattaaaaacacctatgcctatacttttttatctcagaaaataaagtcaaaagactatga

SEQ ID NO: 422784 - DNA, 1485 bp, Homo sapiens
ccggtgaccgcgctccgcagccttaccctgaccccaacaagtacacccctagaaatatcgcctccgactccagccgactgggtgactgatcggcggcagcacgttcacgacactttcgcgattgccgtaaaggggaacaaggtttgaacgagcagcgccgcaggcgcgctcctcggtgccgtgagcgcgccccggggccggccggtctgctcgggagcgcgccccgtggcccagccctgtctccttttagcataggggcttcggcgccagcggccagcgctagtcggtctggtaagtgcctgatgccgagttccgtctctcgcgtcttttcctggtcccaggcaaagcggagcggagatcctcaaacggcctagtgcttcgcgcttccggagaaaatcagcggtctaattaattcctctggtttgttgaagcagttaccaagaatcttcaaccctttcccacaaaagctaattgagtacacgttcctgttgagtacacgttcctgttgatttacaaaaggtgcaggtatgagcaggtctgaagactaacattttgtgaagttgtaaaacagaaaacctgttagaaatgtggtggtttcagcaaggcctcagtttccttccttcagcccttgtaatttggacatctgctgctttcatattttcatacattactgcagtaacactccaccatatagacccggctttaccttatatcagtgacactggtacagtagctccagaaaaatgcttatttggggcaatgctaaatattgcggcagttttatgcattgctaccatttatgttcgttataagcaagttcatgctctgagtcctgaagagaacgttatcatcaaattaaacaaggctggccttgtacttggaatactgagttgtttaggactttctattgtggcaaacttccagaaaacaaccctttttgctgcacattgctgacttgctcatcagttttgcacagtggcaattttgggactgatttagaacagaaactccattggaaccccgaggacaaaggttatgtgcttcacatgatcactactgcagcagaatggtctatgtcattttccttctttggttttttcctgacttacattcgtgattttcagaaaatttctttacgggtggaagccaatttacatggattaaccctctatgacactgcaccttgccctattaacaatgaacgaacacggctactttccagagatatttgatgaaaggataaaatatttctgtaatgattatgattctcagggattggggaaaggttcacagaagttgcttattcttctctgaaattttcaaccacttaatcaaggctgacagtaacactgatgaatgctgataatcaggaaacatgaaagaagccatttgatagattattctaaaggatatcatcaagaagactattaaaaacacctatgcctatacttttttatctcagaaaataaagtcaaaagactatga

SEQ ID NO: 422785 - DNA, 961 bp, Homo sapiens
tttgtaggagagattcttaggttcacaatcctaaactaaagaatttgaaatatggaattcagattgtacatagtgcctcagtaattgagctaggaacaaaaatgttgagcctgatcatactcacttcaaagaaatgagggatgagtaaatgccctttctgagaaccattatctagttaaagattatgatagaactgctaattttctgagcaaagaggtggggtttgactgtgagaaccattttgttgtgaccctctgagcagcacatttttagttttacagtaccactgctgtgtaacattaagtctttaagaaaatgggtttagaccttagcaataaatgtgtgagtaatccttttagactgtaaagtgatttttgttctctgagatcgtctctgagattcttccttgacttatgtttttatatgctgacttgctcatcagttttgcacagtggcaattttgggactgatttagaacagaaactccattggaaccccgaggacaaaggttatgtgcttcacatgatcactactgcagcagaatggtctatgtcattttccttctttggttttttcctgacttacattcgtgattttcagaaaatttctttacgggtggaagccaatttacatggattaaccctctatgacactgcaccttgccctattaacaatgaacgaacacggctactttccagagatatttgatgaaaggataaaatatttctgtaatgattatgattctcagggattggggaaaggttcacagaagttgcttattcttctctgaaattttcaaccacttaatcaaggctgacagtaacactgatgaatgctgataatcaggaaacatgaaagaagccatttgatagattattctaaaggatatcatcaagaagactattaaaaacacctatgcctatacttttttatctcagaaaataaagtcaaaagactatga

SEQ ID NO: 422786 - DNA, 1480 bp, Homo sapiens
ccggtgaccgcgctccgcagccttaccctgaccccaacaagtacacccctagaaatatcgcctccgactccagccgactgggtgactgatcggcggcagcacgttcacgacactttcgcgattgccgtaaaggggaacaaggtttgaacgagcagcgccgcaggcgcgctcctcggtgccgtgagcgcgccccggggccggccggtctgctcgggagcgcgccccgtggcccagccctgtctccttttagcataggggcttcggcgccagcggccagcgctagtcggtctggtaaggcaaagcggagcggagatcctcaaacggcctagtgcttcgcgcttccggagaaaatcagcggtctaattaattcctctggtttgttgaagcagttaccaagaatcttcaaccctttcccacaaaagctaattgagtacacgttcctgttgagtacacgttcctgttgatttacaaaaggtgcaggtatgagcaggtctgaagactaacattttgtgaagttgtaaaacagaaaacctgttagaaatgtggtggtttcagcaaggcctcagtttccttccttcagcccttgtaatttggacatctgctgctttcatattttcatacattactgcagtaacactccaccatatagacccggctttaccttatatcagtgacactggtacagtagctccagaaaaatgcttatttggggcaatgctaaatattgcggcagttttatgcattgctaccatttatgttcgttataagcaagttcatgctctgagtcctgaagagaacgttatcatcaaattaaacaaggctggccttgtacttggaatactgagttgtttaggactttctattgtggcaaacttccagaaaacaaccctttttgctgcacatgtaagtggagctgtgcttacctttggtatgggctcattatatatgtttgttcagaccatcctttcctaccaaatgcagcccaaaatccatggcaaacaagtcttctggatcagactgttgttggttatctggtgtggagtaagtgcacttagcatgctgacttgctcatcagttttgcacagtggcaattttgggactgatttagaacagaaactccattggaaccccgaggacaaaggttatgtgcttcacatgatcactactgcagcagaatggtctatgtcattttccttctttggttttttcctgacttacattcgtgattttcaggtaagaaggcacaatattagatttattcagtcagacttccttctcttagtccaggaaggtagactaagagaactttccataggcaactctcccgcctttttgaaaattaactgtttgtgatttggtatcataaacaagtgatgtaacttttcaggtgaattgtttctgtgtttaaagaagtagtgtattgctagcaagatttagccttgaaaatggggctataaaataaatttcagaaattcttaca

SEQ ID NO: 422787 - DNA, 1210 bp, Homo sapiens
ccggtgaccgcgctccgcagccttaccctgaccccaacaagtacacccctagaaatatcgcctccgactccagccgactgggtgactgatcggcggcagcacgttcacgacactttcgcgattgccgtaaaggggaacaaggtttgaacgagcagcgccgcaggcgcgctcctcggtgccgtgagcgcgccccggggccggccggtctgctcgggagcgcgccccgtggcccagccctgtctccttttagcataggggcttcggcgccagcggccagcgctagtcggtctggtaaggcaaagcggagcggagatcctcaaacggcctagtgcttcgcgcttccggagaaaatcagcggtctaattaattcctctggtttgttgaagcagttaccaagaatcttcaaccctttcccacaaaagctaattgagtacacgttcctgttgagtacacgttcctgttgatttacaaaaggtgcaggtatgagcaggtctgaagactaacattttgtgaagttgtaaaacagaaaacctgttagaaatgtggtggtttcagcaaggcctcagtttccttccttcagcccttgtaatttggacatctgctgctttcatattttcatacattactgcagtaacactccaccatatagacccggctttaccttatatcagtgacactggtacagtagctccagaaaaatgcttatttggggcaatgctaaatattgcggcagttttatgtcaaaaatagaaatcaggaagataattcaacttaaagaagttcatttcatgaccaaactcttcagaaacatgtctttacaagcatatctcttgtattgctttctacactgttgaattgtctggcaatatttctgcagtggaaaatttgatttagctagttcttgactgataaatatggtaaggtgggcttttccccctgtgtaattggctactatgtcttactgagccaagttgtaatttgaaataaaatgatatgagagtgacacaaaaaaaaacaaaacacaaaaagacaaaaaaagggcgcgggccagctacaaaaagtactccccacgaggggcgcccaaggaattaccggtatacccacgatttctggacacagggtgggccccctaaaggggaggctcggtatatataaggctagggcactgggccccgaccgttcaacaaacggtccggaaacagggcaaacg

SEQ ID NO: 422788 - DNA, 927 bp, Homo sapiens
ccggtgaccgcgctccgcagccttaccctgaccccaacaagtacacccctagaaatatcgcctccgactccagccgactgggtgactgatcggcggcagcacgttcacgacactttcgcgattgccgtaaaggggaacaaggtttgaacgagcagcgccgcaggcgcgctcctcggtgccgtgagcgcgccccggggccggccggtctgctcgggagcgcgccccgtggcccagccctgtctccttttagcataggggcttcggcgccagcggccagcgctagtcggtctggtaagtgcctgatgccgagttccgtctctcgcgtcttttcctggtcccaggcaaagcggagcggagatcctcaaacggcctagtgcttcgcgcttccggagaaaatcagcggtctaattaattcctctggtttgttgaagcagttaccaagaatcttcaaccctttcccacaaaagctaattgagtacacgttcctgttgagtacacgttcctgttgatttacaaaaggtgcaggtatgagcaggtctgaagactaacattttgtgaagttgtaaaacagaaaacctgttagaaatgtggtggtttcagcaaggcctcagtttccttccttcagcccttgtaatttggacatctgctgctttcatattttcatacattactgcagtaacactccaccatatagacccggctttaccttatatcagtgacactggtacagtagctccagaaaaatgcttatttggggcaatgctaaatattgcggcagttttatgtaagtaatgaaagtgattttaacatgataatagccaaattgctacagtattttcttctttcaacactggagtgttacttgttttactttctagttatacttgagagtatgttatcactaaataattgatcataattatgctc

SEQ ID NO: 422789 - DNA, 965 bp, Homo sapiens
gggcggggatgagtgcagctgggctcagctccccgtgccctacctttctgttctcttccttggtttcccctactctcctcctgccccaagcagtgcctgatgccgagttccgtctctcgcgtcttttcctggtcccaggcaaagcggagcggagatcctcaaacggcctagtgcttcgcgcttccggagaaaatcagcggtctaattaattcctctggatttacaaaaggtgcaggtatgagcaggtctgaagactaacattttgtgaagttgtaaaacagaaaacctgttagaaatgtggtggtttcagcaaggcctcagtttccttccttcagcccttgtaatttggacatctgctgctttcatattttcatacattactgcagtaacactccaccatatagacccggctttaccttatatcagtgacactggtacagtagctccagaaaaatgcttatttggggcaatgctaaatattgcggcagttttatgtcaaaaatagaaatcaggaagataattcaacttaaagaagttcatttcatgaccaaactcttcagaaacatgtctttacaagcatatctcttgtattgctttctacactgttgaattgtctggcaatatttctgcagtggaaaatttgatttagctagttcttgactgataaatatggtaaggtgggcttttccccctgtgtaattggctactatgtcttactgagccaagttgtaatttgaaataaaatgatatgagagtgacacaaaaaaaaacaaaacacaaaaagacaaaaaaagggcgcgggccagctacaaaaagtactccccacgaggggcgcccaaggaattaccggtatacccacgatttctggacacagggtgggccccctaaaggggaggctcggtatatataaggctagggcactgggccccgaccgttcaacaaacggtccggaaacagggcaaacg

SEQ ID NO: 422790 - DNA, 1168 bp, Homo sapiens
ccggtgaccgcgctccgcagccttaccctgaccccaacaagtacacccctagaaatatcgcctccgactccagccgactgggtgactgatcggcggcagcacgttcacgacactttcgcgattgccgtaaaggggaacaaggtttgaacgagcagcgccgcaggcgcgctcctcggtgccgtgagcgcgccccggggccggccggtctgctcgggagcgcgccccgtggcccagccctgtctccttttagcataggggcttcggcgccagcggccagcgctagtcggtctggtaagtgcctgatgccgagttccgtctctcgcgtcttttcctggtcccaggcaaagcggagcggagatcctcaaacggcctagtgcttcgcgcttccggagaaaatcagcggtctaattaattcctctggatttacaaaaggtgcaggtatgagcaggtctgaagactaacattttgtgaagttgtaaaacagaaaacctgttagaaatgtggtggtttcagcaaggcctcagtttccttccttcagcccttgtaatttggacatctgctgctttcatattttcatacattactgcagtaacactccaccatatagacccggctttaccttatatcagtgacactggtacagtagctccagaaaaatgcttatttggggcaatgctaaatattgcggcagttttatgtcaaaaatagaaatcaggaagataattcaacttaaagaagttcatttcatgaccaaactcttcagaaacatgtctttacaagcatatctcttgtattgctttctacactgttgaattgtctggcaatatttctgcagtggaaaatttgatttagctagttcttgactgataaatatggtaaggtgggcttttccccctgtgtaattggctactatgtcttactgagccaagttgtaatttgaaataaaatgatatgagagtgacacaaaaaaaaacaaaacacaaaaagacaaaaaaagggcgcgggccagctacaaaaagtactccccacgaggggcgcccaaggaattaccggtatacccacgatttctggacacagggtgggccccctaaaggggaggctcggtatatataaggctagggcactgggccccgaccgttcaacaaacggtccggaaacagggcaaacg

SEQ ID NO: 422791 - DNA, 1603 bp, Homo sapiens
ctgtccggtctgatagtccacttctagaactgaatacagttcctaattaaaccctattgaaatttaagtaaaatttaaaaatttggggatacaatgtctactttataatgctgtgtgtgtgtgagacagagtctcgctctactgcccaggctggagtgcagtggcacgacctcagctcactgcaacctctgtctcctgagtagctgggattacaggcgcccgccaccacgcccagctaatttttgtatttttagtagagacagggtgtcaccatgttggccaggatagtctcaatctcctgacctcgtgatccgcccgcctgggcctcccaaagtgctgggattacaggcgagagccaccgcccccggcctgcaagaacatttttataaacattcttactgccctgtgaaatttattcctgcatactctcaattattttgaaaggctttttgaattatgaatcattgaaattctaattttgttggtttggcaattactcagcaatgctttcaggtttcaaaggcaaaaacacattgacaattagtcttcctcacctagtccatgcatttaaattcctcagttgtcattcgcaaactggtaaaccatttcaagccctgcttctataaactgtcagtttaaacaactgggactctcaaagcctaaggagatacgaatccaagataattcgtacatagaaaaaaatcatacataaagttgtactccatacctgtggccttatgactacataattaataaatcagctatcattattatattgtatgcttattctactccactccaaggaacaactgtttgagtactgtaactcagaagctaagtaaattgcctgaaatcatagagttgggtagtagtaaaggtaggacttgtgtttagagatatctcatctcacagctgtgttctttacatcacatggacttgcaattgctttattttgcttaataatctattatttttttcctcatgtctctctataggagaagacgcaatgatatttcttttttcctctttaagatagtgaaggtgttggatgtgagaatgcatatgaaaatttatatcctggaattaaaacattatttaattccagatggtacaacatcattgtaaaaaactcaagtgtcaactcatcaaagaaaaataacctgttaacaatgctgtagcctagtattctgcccatgaacaatattggcgtgttgacttaaaactgtacatgtttaaaattgtgtggattgagagaaaaacttcttattttctttgtgtcggttttaggatttacaaaaggtgcaggtatgagcaggtctgaagactaacattttgtgaagttgtaaaacaggtaattcatttttcacattataagaggaacaagtacatactgatcatctctgaaaataagtatcttatttaatccttgaataaacctctatgaaatgggtattattttatactatttaacagataatactaaaagctaccatttattatgcaccagcaatctgttaggttctttgcttgtgctatcagtataagctgtacaaagactactcagcacagtccaatagaacttttccacaatcatggaaatttt

SEQ ID NO: 422792 - DNA, 277 bp, Homo sapiens
gttagaaatgtggtggtttcagcaaggcctcagtttccttccttcagcccttgtaatttggacatctgctgctttcatattttcatacattactgcagtaacactccaccatatagacccggctttaccttatatcaggtaagtgaaatgtattctttgtataggagactctttatgtctcattcttattttaacattgaagtcaacatttaatgtcaaccttttaaaaatcagattttacattggcattacaacaataaagggaatataaaaagga

SEQ ID NO: 422793 - DNA, 1454 bp, Homo sapiens
ccggtgaccgcgctccgcagccttaccctgaccccaacaagtacacccctagaaatatcgcctccgactccagccgactgggtgactgatcggcggcagcacgttcacgacactttcgcgattgccgtaaaggggaacaaggtttgaacgagcagcgccgcaggcgcgctcctcggtgccgtgagcgcgccccggggccggccggtctgctcgggagcgcgccccgtggcccagccctgtctccttttagcataggggcttcggcgccagcggccagcgctagtcggtctggtaaggcaaagcggagcggagatcctcaaacggcctagtgcttcgcgcttccggagaaaatcagcggtctaattaattcctctggtttgttgaagcagttaccaagaatcttcaaccctttcccacaaaagctaattgagtacacgttcctgttgagtacacgttcctgttgatttacaaaaggtgcaggtatgagcaggtctgaagactaacattttgtgaagttgtaaaacagaaaacctgttagaaatgtggtggtttcagcaaggcctcagtttccttccttcagcccttgtaatttggacatctgctgctttcatattttcatacattactgcagtaacactccaccatatagacccggctttaccttatatcagtgacactggtacagtagctccagaaaaatgcttatttggggcaatgctaaatattgcggcagttttataaaacaaccctttttgctgcacatgtaagtggagctgtgcttacctttggtatgggctcattatatatgtttgttcagaccatcctttcctaccaaatgcagcccaaaatccatggcaaacaagtcttctggatcagactgttgttggttatctggtgtggagtaagtgcacttagcatgctgacttgctcatcagttttgcacagtggcaattttgggactgatttagaacagaaactccattggaaccccgaggacaaaggttatgtgcttcacatgatcactactgcagcagaatggtctatgtcattttccttctttggttttttcctgacttacattcgtgattttcagaaaatttctttacgggtggaagccaatttacatggattaaccctctatgacactgcaccttgccctattaacaatgaacgaacacggctactttccagagatatttgatgaaaggataaaatatttctgtaatgattatgattctcagggattggggaaaggttcacagaagttgcttattcttctctgaaattttcaaccacttaatcaaggctgacagtaacactgatgaatgctgataatcaggaaacatgaaagaagccatttgatagattattctaaaggatatcatcaagaagactattaaaaacacctatgcctatacttttttatctcagaaaataaagtcaaaagactatga

SEQ ID NO: 422794 - DNA, 1352 bp, Homo sapiens
ccggtgaccgcgctccgcagccttaccctgaccccaacaagtacacccctagaaatatcgcctccgactccagccgactgggtgactgatcggcggcagcacgttcacgacactttcgcgattgccgtaaaggggaacaaggtttgaacgagcagcgccgcaggcgcgctcctcggtgccgtgagcgcgccccggggccggccggtctgctcgggagcgcgccccgtggcccagccctgtctccttttagcataggggcttcggcgccagcggccagcgctagtcggtctggtaaggcaaagcggagcggagatcctcaaacggcctagtgcttcgcgcttccggagaaaatcagcggtctaattaattcctctggtttgttgaagcagttaccaagaatcttcaaccctttcccacaaaagctaattgagtacacgttcctgttgagtacacgttcctgttgatttacaaaaggtgcaggtatgagcaggtctgaagactaacattttgtgaagttgtaaaacagaaaacctgttagaaatgtggtggtttcagcaaggcctcagtttccttccttcagcccttgtaatttggacatctgctgctttcatattttcatacattactgcagtaacactccaccatatagacccggctttaccttatatcagtgacactggtacagtagctccagaaaaatgcttatttggggcaatgctaaatattgcggcagttttatcccaaaatccatggcaaacaagtcttctggatcagactgttgttggttatctggtgtggagtaagtgcacttagcatgctgacttgctcatcagttttgcacagtggcaattttgggactgatttagaacagaaactccattggaaccccgaggacaaaggttatgtgcttcacatgatcactactgcagcagaatggtctatgtcattttccttctttggttttttcctgacttacattcgtgattttcagaaaatttctttacgggtggaagccaatttacatggattaaccctctatgacactgcaccttgccctattaacaatgaacgaacacggctactttccagagatatttgatgaaaggataaaatatttctgtaatgattatgattctcagggattggggaaaggttcacagaagttgcttattcttctctgaaattttcaaccacttaatcaaggctgacagtaacactgatgaatgctgataatcaggaaacatgaaagaagccatttgatagattattctaaaggatatcatcaagaagactattaaaaacacctatgcctatacttttttatctcagaaaataaagtcaaaagactatga

SEQ ID NO: 422795 - DNA, 2469 bp, Homo sapiens
ccggtgaccgcgctccgcagccttaccctgaccccaacaagtacacccctagaaatatcgcctccgactccagccgactgggtgactgatcggcggcagcacgttcacgacactttcgcgattgccgtaaaggggaacaaggtttgaacgagcagcgccgcaggcgcgctcctcggtgccgtgagcgcgccccggggccggccggtctgctcgggagcgcgccccgtggcccagccctgtctccttttagcataggggcttcggcgccagcggccagcgctagtcggtctggtaaggcaaagcggagcggagatcctcaaacggcctagtgcttcgcgcttccggagaaaatcagcggtctaattaattcctctggtttgttgaagcagttaccaagaatcttcaaccctttcccacaaaagctaattgagtacacgttcctgttgagtacacgttcctgttgatttacaaaaggtgcaggtatgagcaggtctgaagactaacattttgtgaagttgtaaaacagaaaacctgttagaaatgtggtggtttcagcaaggcctcagtttccttccttcagcccttgtaatttggacatctgctgctttcatattttcatacattactgcagtaacactccaccatatagacccggctttaccttatatcagtgacactggtacagtagctccagaaaaatgcttatttggggcaatgctaaatattgcggcagttttatgcattgctaccatttatgttcgttataagcaagttcatgctctgagtcctgaagagaacgttatcatcaaattaaacaaggctggccttgtacttggaatactgagttgtttaggactttctattgtggcaaacttccagaaaacaaccctttttgctgcacatgtaagtggagctgtgcttacctttggtatgggctcattatatatgtttgttcagaccatcctttcctaccaaatgcagcccaaaatccatggcaaacaagtcttctggatcagactgttgttggttatctggtgtggagtaagtgcacttagcatgctgacttgctcatcagttttgcacagtggcaattttgggactgatttagaacagaaactccattggaaccccgaggacaaaatattgtcaaaatatgaagagcattgcgatggcagaagagttttctgagaaattgactcccctaaatggttatgtgcttcacatgatcactactgcagcagaatggtctatgtcattttccttctttggttttttcctgacttacattcgtgattttcagaaaatttctttacgggtggaagccaatttacatggattaaccctctatgacactgcaccttgccctattaacaatgaacgaacacggctactttccagagatatttgatgaaaggaagttgcttattcttctctgaaattttcaaccacttaatcaaggctgacagtaacactgatgaatgctgataatcaggaaacatgaaagaagccatttgatagattattctaaaggatatcatcaagaagactattaaaaacacctatgcctatacttttttatctcagaaaataaagtcaaaagactatgatatcatagttttttataccttatttaagagaaacaacctgacgtgcaccaatcagtctgcacatcccaacccttcacattttataaattattgtagatcatgttttgttaggagcacttttatgagagacattttccatgactaaataatcagcattagtcagtaaatcctttagaactgggttttgaaatgggagttttatcatattaaatcatttcttgtagtcttacattttttgttgttgttctggaatctacctgtaaaggaaagtagacctggattcatgtgggctcttccatggcttaagtgttgcccaagagattttgtaggtaacgatttttttttttctggccacaatgccagatactaagctaattggtctatcatacacatgcttgcagtagtttcatgaagtttagtctctggcgtgaaattttaatcaccaatgaaggagagaggcacctgtaggtaaatttactttagtcatattttatataaaacaagggttagtattcatgtaacattgagaagtttgggaataacagcagatatgattaataaaagtcataaccatactcaagagcttcttagattttcatttatggcaagttataattacatgtaaaagtagtcttgaacaggtaaatattgagcctttttaataggatgtaacctttgtagagcccaaattctaaagaacaaaattggcaatccaattaaactacatgcaaaataagtgtgatacatgcatctacaaaaacagtgttctcattttttctgggtatgcaaatgattggattgtttctccttggatctctgtatgtacaggtaaagaatagtttacagatccctgctgaaatta

SEQ ID NO: 422796 - DNA, 1146 bp, Homo sapiens
ccggtgaccgcgctccgcagccttaccctgaccccaacaagtacacccctagaaatatcgcctccgactccagccgactgggtgactgatcggcggcagcacgttcacgacactttcgcgattgccgtaaaggggaacaaggtttgaacgagcagcgccgcaggcgcgctcctcggtgccgtgagcgcgccccggggccggccggtctgctcgggagcgcgccccgtggcccagccctgtctccttttagcataggggcttcggcgccagcggccagcgctagtcggtctggtaaggcaaagcggagcggagatcctcaaacggcctagtgcttcgcgcttccggagaaaatcagcggtctaattaattcctctggtttgttgaagcagttaccaagaatcttcaaccctttcccacaaaagctaattgagtacacgttcctgttgagtacacgttcctgttgatttacaaaaggtgcaggtatgagcaggtctgaagactaacattttgtgaagttgtaaaacagaaaacctgttagaaatgtggtggtttcagcaaggcctcagtttccttccttcagcccttgtaatttggacatctgctgctttcatattttcatacattactgcagtaacactccaccatatagacccggctttaccttatatcagtgacactggtacagtagctccagaaaaatgcttatttggggcaatgctaaatattgcggcagttttataaaacaaccctttttgctgcacatgtaagtggagctgtgcttacctttggtatgggctcattatatatgtttgttcagaccatcctttcctaccaaatgcagcccaaaatccatggcaaacaagtcttctggatcagactgttgttggttatctggtgtggagtaagtgcacttagcatgctgacttgctcatcagttttgcacagtggcaattttgggactgatttagaacagaaactccattggaaccccgaggacaaagttatgtgcttcacatgatcactactgcagcccgacatggctcatgctcatacgccttcctgtggctatctcactgacttaaccatccggagattgcacagacaactctcttacagcgtggacagccaattaacatggattgaaac

SEQ ID NO: 422797 - DNA, 787 bp, Homo sapiens
  misc_feature (648)..(648): n is a, c, g, or t
  misc_feature (724)..(724): n is a, c, g, or t
  misc_feature (787)..(787): n is a, c, g, or t
agccgctgtggatggggagtggaggcggaggggagcggagcccggagcgtcgtggaaagcattggacacatttccaccatgctaatggcattttaaatatatttggcaattttcccaattttttactgaagaaaactgtaagtttatacttgaggactgaagtgtgactctgccgattatcaggctttcaagatgaatctggaaaaactcagcaagcctgaactcctgacactatttagtattcttgaaggagagcttgaagcaagggaccttgttatagaagccttaaaggcccaacacagagatactttcattgaagaacgctatggaaaatataacatcagtgatcctttaatggctctacagagagattttgaaacactgaaggagaaaaatgatggcgaaaagcagccagtctgcacaaatccactctctattcttaaggttgtgatgaagcagtgcaagaacatgcaggagcgcatgctgtcccagctggctgctgctgagagcaggcaccgaaaggtgatcctagaccttgaggaagaaaggcagcggcatgcacaggatacggctgaaggagatgatgtcacctacatgctagagaaggaaagagagaggctgactcaacagttgaatttgaaaaatccnagtgaaaaagtttggaacagagaagctcctaagcagcttgagaagagcgttcggccaagcaggtttattctgctangcttggtgcagaaagcaccaccaggaaccgaggaagacagaagcagcttaccttgatttgggn

SEQ ID NO: 422798 - DNA, 4872 bp, Homo sapiens
cccctcattcaaaggcacctcccaccccgcacctcagccttggcggagaggactcacagcattggacacatttccaccatgctaatggcattttaaatatatttggcaattttcccaattttttactgaagaaaactgtaagtttatacttgaggactgaagtgtgactctgccgattatcaggctttcaagatgaatctggaaaaactcagcaagcctgaactcctgacactatttagtattcttgaaggagagcttgaagcaagggaccttgttatagaagccttaaaggcccaacacagagatactttcattgaagaacgctatggaaaatataacatcagtgatcctttaatggctctacagagagattttgaaacactgaaggagaaaaatgatggcgaaaagcagccagtctgcacaaatccactctctattcttaaggttgtgatgaagcagtgcaagaacatgcaggagcgcatgctgtcccagctggctgctgctgagagcaggcaccgaaaggtgatcctagaccttgaggaagaaaggcagcggcatgcacaggatacggctgaaggagatgatgtcacctacatgctagagaaggaaagagagaggctgactcaacagttggaatttgaaaaatcccaagtgaaaaagtttgaaaaagaacagaagaagctctctagtcagctggaagaggagcgctcccgccacaagcagctctcatccatgctagtgcttgagtgcaagaaagccaccaacaaggcagccgaggaaggacagaaggcaggagagctgagcctgaaattggagaaggagaagagccgggtgagtaaactggaagaagagttggcagctgagagaaagagaggcttgcagactgaggcccaggtagagaagcagttatcagagtttgacatcgaaagggaacaactgagagcaaaactgaaccgagaagagaaccggaccaaaaccctgaaagaagaaatggaaagtttaaagaagatagtgaaggacctagaggcttcccaccagcacagtagccctaatgagcaattgaagaaaccagtaaccgtgtccaaaggcacagcaactgagcctctcatgctaatgtctgtgttttgccaaacagagagttttccagcagaaagaacccatgggagcaacatagccaagatgacaaacactgggctgcctggtcctgccactcctgcttactcatatgcaaaaaccaatggccattgtgacccagagatacaaactaccagggagctgactgcaggcaacaatgtagaaaaccaagtgcctccacgggaaaaatctgtggcattggcccaagagaaaccagtggagaatggtgggtgtcctgtggggattgagactccagtcccaatgcccagtcccctctcttccagtgggagctcactgtctcccagcagcactgcctcctcctctctaacatcctctccttgctcttcgccggtactcactaagcgtttattggggtcatcagctagcagccctggctaccagtcatcgtaccaagtagggatcaaccaacggttccatgcagctcgccacaaatttcagtcccaagcagatcaggaccaacaagccagtggcctacagagccctccatccagggatttatcccccaccctcatagacaactctgccgccaagcagctggcccgaaacacagtcactcaggtgctctccagattcactagccaacaagggccaatcaagccagtctctcccaacagctctccctttggcacagactatcgaaatctagccaacactgccaatccaagaggtgacacaagccattcacctactccagggaaagtgtccagtcccctgagccccctgtctccaggaatcaagtccccaaccatccccagagctgagagaggaaaccctccacccatcccacccaagaaacctggcctcaccccttctccatctgctaccactccattgaccaaaactcattcccaggcagcctctttgaccactgcagaagaccttgccagcagctgctcttccaatactgttgtagcaaatggtaaggatgttgagttacttttgcctaccagcagctagtccctaggagggagtctccacgtttgacattccatcagatttcgtccaaaagctcagtcagacttctgagtcagattatgttatttattttgatagtagctgaaaccatctgtataatacatttagtatatttcaccattttgtatttttttaagtagaaactgagtagtttggatttttatggctcacatctttttactgaagccagaaaggcacctcaaagatgtctcaagctcagcagtcaccgtcatgttgtgatgaagaaagcgaatcaccaggtggtgatttgctatctatttgagaactagaatcactcaacactcattttgaattatgcagaagtggttcatgcagatttttattccagatgaacatgttttaaaagtgcctgaaatatgactgccatatgaatgtgattctgcagcaaaaaacacaaaatagatcatttaattacagaaaatgagatcctctgtgaattctgaatgttaaaaaccaacactgcttttaatcctcttttaatgttttaatacaagctttgtgttctgaaacaaggctgcataagtagaatgggaatccttctaaaggtgggtgtgaactcaccacaagctgagctttatagagcccttgagaaaccctcctgagcactaagcagttggggtgctgattttcttgtacttttgaaaaattaagtcactcccagtttcctgcataagttcttgaacagaatgaaatcacatctccattcaaaaaatgtctcaagcatctactgttgtgtaaggaacttctgattctgattgctgttacttgaataggaaatggttactcattctgtataaaagttttgcaagagaatgaattttttattctgtaatcaaaaagcaataacttgaaattcactctgtaatattataggtcagaattatacaagttttaccaaattgttacacttattctccaagctgccagaacctggtatctgtatctgtaaaaccaaattaacttttgcttaaatgggaagtatacatatatctgtatagatacattacccctttacatgtttaacatacacacacttaaacacataaatactagtgtgattatatctttggagtttgcaatatagcataaaggacaagtagaactgcacattaagattacctaccgaagcaactagatgtggctgggacacaatcaaaggaggaattttgtccacaggaaggtgaggaaattccaaatgaagcctagatcttcagtatcataaaaaggctgagatgggaggatctcttgagaccaggtgttcaagaccagcctcatcaacatagtgagaccccatctctattaaaaaaataaataggcagagctaaactaaccccagtgtcacaaaactcaactggtcatataaatgagtgaaacaggcctctcacacaagcgatgtaaaacagctgggagcagtgggagctgtggcaaactaaagtgcccaagccgcatttaaaaagggcatctgttcagctccatctgcttgctgcggtgcaagaatgctaaaccaggattaccagttcttcacattttttgaaatccaaattttcatgagaaacattctcatttttaaatatcaagaagtgattttaaaatgtttaaatggtgctggttaaacaaacacgtctgcagctggatttagcttgcaagctgccaagttgcaacctctttcattctagaaacttctgtcattttcatcatagcaagtctatgcggacaaaagcctccaaactttccaactgtgtaggccagtacagctggcaaggttcatagaatataatggctatccccctctgccaaataagactatccacaacccagctcagacacagtggttatatgattttgtgtccatacaggagaggccttggtgtcttcacatacattctctgagccaacatctatccagcagccctgacctcctgctataatttaagtctatttccttttaatctaataagagttgatagtaaaaaggcaggtgatggaaatcagtgtataatcacaatggagtatattggcaactccacagcttatagtttgataaaggcaaatacatgaaaaataaaaatgctactaatgccccaaggtgtctatcaaaatgatgtagggggtatcttaaactgtccaaggcaatcatgcattgaactttattcctatgcagagccaaaacgaatagtgttgataaaatagctaaactttctaaactggagaggaggctacagtgccagagagttattgtctcttttgctttaaatggtaatcttaaaagttgcattgtgctcttcctttgttttgggatagatatatatagagagagatactataaggaagtttatttcttaggaagtgcactgaataatgtatttcttttacagtgtaatatgggggtggggatatgcgaaagaaatgtgtatttttgctagttgcctaccttctgagataaataagcacaatcttgcaatggatccaataacccagttaggtattatagattagtatttaagtttgctgtagattgtgtgtgtgtgtgctaagtaaaagttccatgattcacaattttagtattaacccatgttgcaaaagctgttactggccaacagattgtaatgatgtgtaccatataacacaagcattaactaggcattaacgtttgtaaagccaaatataccatgcagaagtcttcatttttatagcagactgcattaaaacaagttaaatctt

SEQ ID NO: 422799 - DNA, 4925 bp, Homo sapiens
agccgctgtggatggggagtggaggcggaggggagcggagcccggagcgtcgtggaaagcattggacacatttccaccatgctaatggcattttaaatatatttggcaattttcccaattttttactgaagaaaactgtaagtttatacttgaggactgaagtgtgactctgccgattatcaggctttcaagatgaatctggaaaaactcagcaagcctgaactcctgacactatttagtattcttgaaggagagcttgaagcaagggaccttgttatagaagccttaaaggcccaacacagagatactttcattgaagaacgctatggaaaatataacatcagtgatcctttaatggctctacagagagattttgaaacactgaaggagaaaaatgatggcgaaaagcagccagtctgcacaaatccactctctattcttaaggttgtgatgaagcagtgcaagaacatgcaggagcgcatgctgtcccagctggctgctgctgagagcaggcaccgaaaggtgatcctagaccttgaggaagaaaggcagcggcatgcacaggatacggctgaaggagatgatgtcacctacatgctagagaaggaaagagagaggctgactcaacagttggaatttgaaaaatcccaagtgaaaaagtttgaaaaagaacagaagaagctctctagtcagctggaagaggagcgctcccgccacaagcagctctcatccatgctagtgcttgagtgcaagaaagccaccaacaaggcagccgaggaaggacagaaggcaggagagctgagcctgaaattggagaaggagaagagccgggtgagtaaactggaagaagagttggcagctgagagaaagagaggcttgcagactgaggcccaggtagagaagcagttatcagagtttgacatcgaaagggaacaactgagagcaaaactgaaccgagaagagaaccggaccaaaaccctgaaagaagaaatggaaagtttaaagaagatagtgaaggacctagaggcttcccaccagcacagtagccctaatgagcaattgaagaaaccagtaaccgtgtccaaaggcacagcaactgagcctctcatgctaatgtctgtgttttgccaaacagagagttttccagcagaaagaacccatgggagcaacatagccaagatgacaaacactgggctgcctggtcctgccactcctgcttactcatatgcaaaaaccaatggccattgtgacccagagatacaaactaccagggagctgactgcaggcaacaatgtagaaaaccaagtgcctccacgggaaaaatctgtggcattggcccaagagaaaccagtggagaatggtgggtgtcctgtggggattgagactccagtcccaatgcccagtcccctctcttccagtgggagctcactgtctcccagcagcactgcctcctcctctctaacatcctctccttgctcttcgccggtactcactaagcgtttattggggtcatcagctagcagccctggctaccagtcatcgtaccaagtagggatcaaccaacggttccatgcagctcgccacaaatttcagtcccaagcagatcaggaccaacaagccagtggcctacagagccctccatccagggatttatcccccaccctcatagacaactctgccgccaagcagctggcccgaaacacagtcactcaggtgctctccagattcactagccaacaagggccaatcaagccagtctctcccaacagctctccctttggcacagactatcgaaatctagccaacactgccaatccaagaggtgacacaagccattcacctactccagggaaagtgtccagtcccctgagccccctgtctccaggaatcaagtccccaaccatccccagagctgagagaggaaaccctccacccatcccacccaagaaacctggcctcaccccttctccatctgctaccactccattgaccaaaactcattcccaggcagcctctttgaccactgcagaagaccttgccagcagctgctcttccaatactgttgtagcaaatggtaaggatgttgagttacttttgcctaccagcagctagtccctaggagggagtctccacgtttgacattccatcagatttcgtccaaaagctcagtcagacttctgagtcagattatgttatttattttgatagtagctgaaaccatctgtataatacatttagtatatttcaccattttgtatttttttaagtagaaactgagtagtttggatttttatggctcacatctttttactgaagccagaaaggcacctcaaagatgtctcaagctcagcagtcaccgtcatgttgtgatgaagaaagcgaatcaccaggtggtgatttgctatctatttgagaactagaatcactcaacactcattttgaattatgcagaagtggttcatgcagatttttattccagatgaacatgttttaaaagtgcctgaaatatgactgccatatgaatgtgattctgcagcaaaaaacacaaaatagatcatttaattacagaaaatgagatcctctgtgaattctgaatgttaaaaaccaacactgcttttaatcctcttttaatgttttaatacaagctttgtgttctgaaacaaggctgcataagtagaatgggaatccttctaaaggtgggtgtgaactcaccacaagctgagctttatagagcccttgagaaaccctcctgagcactaagcagttggggtgctgattttcttgtacttttgaaaaattaagtcactcccagtttcctgcataagttcttgaacagaatgaaatcacatctccattcaaaaaatgtctcaagcatctactgttgtgtaaggaacttctgattctgattgctgttacttgaataggaaatggttactcattctgtataaaagttttgcaagagaatgaattttttattctgtaatcaaaaagcaataacttgaaattcactctgtaatattataggtcagaattatacaagttttaccaaattgttacacttattctccaagctgccagaacctggtatctgtatctgtaaaaccaaattaacttttgcttaaatgggaagtatacatatatctgtatagatacattacccctttacatgtttaacatacacacacttaaacacataaatactagtgtgattatatctttggagtttgcaatatagcataaaggacaagtagaactgcacattaagattacctaccgaagcaactagatgtggctgggacacaatcaaaggaggaattttgtccacaggaaggtgaggaaattccaaatgaagcctagatcttcagtatcataaaaaggcagagctggccaggcacagtggctcatgcctgtaatcttatcactttgggaggctgagatgggaggatctcttgagaccaggtgttcaagaccagcctcatcaacatagtgagaccccatctctattaaaaaaataaataggcagagctaaactaaccccagtgtcacaaaactcaactggtcatataaatgagtgaaacaggcctctcacacaagcgatgtaaaacagctgggagcagtgggagctgtggcaaactaaagtgcccaagccgcatttaaaaagggcatctgttcagctccatctgcttgctgcggtgcaagaatgctaaaccaggattaccagttcttcacattttttgaaatccaaattttcatgagaaacattctcatttttaaatatcaagaagtgattttaaaatgtttaaatggtgctggttaaacaaacacgtctgcagctggatttagcttgcaagctgccaagttgcaacctctttcattctagaaacttctgtcattttcatcatagcaagtctatgcggacaaaagcctccaaactttccaactgtgtaggccagtacagctggcaaggttcatagaatataatggctatccccctctgccaaataagactatccacaacccagctcagacacagtggttatatgattttgtgtccatacaggagaggccttggtgtcttcacatacattctctgagccaacatctatccagcagccctgacctcctgctataatttaagtctatttccttttaatctaataagagttgatagtaaaaaggcaggtgatggaaatcagtgtataatcacaatggagtatattggcaactccacagcttatagtttgataaaggcaaatacatgaaaaataaaaatgctactaatgccccaaggtgtctatcaaaatgatgtagggggtatcttaaactgtccaaggcaatcatgcattgaactttattcctatgcagagccaaaacgaatagtgttgataaaatagctaaactttctaaactggagaggaggctacagtgccagagagttattgtctcttttgctttaaatggtaatcttaaaagttgcattgtgctcttcctttgttttgggatagatatatatagagagagatactataaggaagtttatttcttaggaagtgcactgaataatgtatttcttttacagtgtaatatgggggtggggatatgcgaaagaaatgtgtatttttgctagttgcctaccttctgagataaataagcacaatcttgcaatggatccaataacccagttaggtattatagattagtatttaagtttgctgtagattgtgtgtgtgtgtgctaagtaaaagttccatgattcacaattttagtattaacccatgttgcaaaagctgttactggccaacagattgtaatgatgtgtaccatataacacaagcattaactaggcattaacgtttgtaaagccaaatataccatgcagaagtcttcatttttatagcagactgcattaaaacaagttaaatctt

SEQ ID NO: 422800 - DNA, 5066 bp, Homo sapiens
agccgctgtggatggggagtggaggcggaggggagcggagcccggagcgtcgtggaaagcattggacacatttccaccatgctaatggcattttaaatatatttggcaattttcccaattttttactgaagaaaactgtaagtttatacttgaggactgaagtgtgactctgccgattatcaggctttcaagatgaatctggaaaaactcagcaagcctgaactcctgacactatttagtattcttgaaggagagcttgaagcaagggaccttgttatagaagccttaaagtggcctacagagccctccatccagggatttatcccccaccctcatagacaactctgccgccaagcagctggcccgaaacacagtcactcaggtgctctccagattcactagccaacaagggccaatcaagccagtctctcccaacagctctccctttggcacagactatcgaaatctagccaacactgccaatccaagaggtgacacaagccattcacctactccagggaaagtgtccagtcccctgagccccctgtctccaggaatcaagtccccaaccatgccagagctgagagaggaaaccctccacccatcccacccaagaaacctggcctcaccccttctccatctgctgagagcaggcaccgaaaggtgatcctagaccttgaggaagaaaggcagcggcatgcacaggatacggctgaaggagatgatgtcacctacatgctagagaaggaaagagagaggctgactcaacagttggaatttgaaaaatcccaagtgaaaaagtttgaaaaagaacagaagaagctctctagtcagctggaagaggagcgctcccgccacaagcagctctcatccatgctagtgcttgagtgcaagaaagccaccaacaaggcagccgaggaaggacagaaggcaggagagctgagcctgaaattggagaaggagaagagccgggtgagtaaactggaagaagagttggcagctgagagaaagagaggcttgcagactgaggcccaggtagagaagcagttatcagagtttgacatcgaaagggaacaactgagagcaaaactgaaccgagaagagaaccggaccaaaaccctgaaagaagaaatggaaagtttaaagaagatagtgaaggacctagaggcttcccaccagcacagtagccctaatgagcaattgaagaaaccagtaaccgtgtccaaaggcacagcaactgagcctctcatgctaatgtctgtgttttgccaaacagagagttttccagcagaaagaacccatgggagcaacatagccaagatgacaaacactgggctgcctggtcctgccactcctgcttactcatatgcaaaaaccaatggccattgtgacccagagatacaaactaccagggagctgactgcaggcaacaatgtagaaaaccaagtgcctccacgggaaaaatctgtggcattggcccaagagaaaccagtggagaatggtgggtgtcctgtggggattgagactccagtcccaatgcccagtcccctctcttccagtgggagctcactgtctcccagcagcactgcctcctcctctctaacatcctctccttgctcttcgccggtactcactaagcgtttattggggtcatcagctagcagccctggctaccagtcatcgtaccaagtagggatcaaccaacggttccatgcagctcgccacaaatttcagtcccaagcagatcaggaccaacaagccagtggcctacagagccctccatccagggatttatcccccaccctcatagacaactctgccgccaagcagctggcccgaaacacagtcactcaggtgctctccagattcactagccaacaagggccaatcaagccagtctctcccaacagctctccctttggcacagactatcgaaatctagccaacactgccaatccaagaggtgacacaagccattcacctactccagggaaagtgtccagtcccctgagccccctgtctccaggaatcaagtccccaaccatccccagagctgagagaggaaaccctccacccatcccacccaagaaacctggcctcaccccttctccatctgctaccactccattgaccaaaactcattcccaggcagcctctttgaccactgcagaagaccttgccagcagctgctcttccaatactgttgtagcaaatggtaaggatgttgagttacttttgcctaccagcagctagtccctaggagggagtctccacgtttgacattccatcagatttcgtccaaaagctcagtcagacttctgagtcagattatgttatttattttgatagtagctgaaaccatctgtataatacatttagtatatttcaccattttgtatttttttaagtagaaactgagtagtttggatttttatggctcacatctttttactgaagccagaaaggcacctcaaagatgtctcaagctcagcagtcaccgtcatgttgtgatgaagaaagcgaatcaccaggtggtgatttgctatctatttgagaactagaatcactcaacactcattttgaattatgcagaagtggttcatgcagatttttattccagatgaacatgttttaaaagtgcctgaaatatgactgccatatgaatgtgattctgcagcaaaaaacacaaaatagatcatttaattacagaaaatgagatcctctgtgaattctgaatgttaaaaaccaacactgcttttaatcctcttttaatgttttaatacaagctttgtgttctgaaacaaggctgcataagtagaatgggaatccttctaaaggtgggtgtgaactcaccacaagctgagctttatagagcccttgagaaaccctcctgagcactaagcagttggggtgctgattttcttgtacttttgaaaaattaagtcactcccagtttcctgcataagttcttgaacagaatgaaatcacatctccattcaaaaaatgtctcaagcatctactgttgtgtaaggaacttctgattctgattgctgttacttgaataggaaatggttactcattctgtataaaagttttgcaagagaatgaattttttattctgtaatcaaaaagcaataacttgaaattcactctgtaatattataggtcagaattatacaagttttaccaaattgttacacttattctccaagctgccagaacctggtatctgtatctgtaaaaccaaattaacttttgcttaaatgggaagtatacatatatctgtatagatacattacccctttacatgtttaacatacacacacttaaacacataaatactagtgtgattatatctttggagtttgcaatatagcataaaggacaagtagaactgcacattaagattacctaccgaagcaactagatgtggctgggacacaatcaaaggaggaattttgtccacaggaaggtgaggaaattccaaatgaagcctagatcttcagtatcataaaaaggcagagctggccaggcacagtggctcatgcctgtaatcttatcactttgggaggctgagatgggaggatctcttgagaccaggtgttcaagaccagcctcatcaacatagtgagaccccatctctattaaaaaaataaataggcagagctaaactaaccccagtgtcacaaaactcaactggtcatataaatgagtgaaacaggcctctcacacaagcgatgtaaaacagctgggagcagtgggagctgtggcaaactaaagtgcccaagccgcatttaaaaagggcatctgttcagctccatctgcttgctgcggtgcaagaatgctaaaccaggattaccagttcttcacattttttgaaatccaaattttcatgagaaacattctcatttttaaatatcaagaagtgattttaaaatgtttaaatggtgctggttaaacaaacacgtctgcagctggatttagcttgcaagctgccaagttgcaacctctttcattctagaaacttctgtcattttcatcatagcaagtctatgcggacaaaagcctccaaactttccaactgtgtaggccagtacagctggcaaggttcatagaatataatggctatccccctctgccaaataagactatccacaacccagctcagacacagtggttatatgattttgtgtccatacaggagaggccttggtgtcttcacatacattctctgagccaacatctatccagcagccctgacctcctgctataatttaagtctatttccttttaatctaataagagttgatagtaaaaaggcaggtgatggaaatcagtgtataatcacaatggagtatattggcaactccacagcttatagtttgataaaggcaaatacatgaaaaataaaaatgctactaatgccccaaggtgtctatcaaaatgatgtagggggtatcttaaactgtccaaggcaatcatgcattgaactttattcctatgcagagccaaaacgaatagtgttgataaaatagctaaactttctaaactggagaggaggctacagtgccagagagttattgtctcttttgctttaaatggtaatcttaaaagttgcattgtgctcttcctttgttttgggatagatatatatagagagagatactataaggaagtttatttcttaggaagtgcactgaataatgtatttcttttacagtgtaatatgggggtggggatatgcgaaagaaatgtgtatttttgctagttgcctaccttctgagataaataagcacaatcttgcaatggatccaataacccagttaggtattatagattagtatttaagtttgctgtagattgtgtgtgtgtgtgctaagtaaaagttccatgattcacaattttagtattaacccatgttgcaaaagctgttactggccaacagattgtaatgatgtgtaccatataacacaagcattaactaggcattaacgtttgtaaagccaaatataccatgcagaagtcttcatttttatagcagactgcattaaaacaagttaaatctt

SEQ ID NO: 422801 - DNA, 5160 bp, Homo sapiens
cccctcattcaaaggcacctcccaccccgcacctcagccttggcggagaggactcacagcattggacacatttccaccatgctaatggcattttaaatatatttggcaattttcccaattttttactgaagaaaactgtaagtttatacttgaggactgaagtgtgactctgccgattatcaggctttcaagatgaatctggaaaaactcagcaagcctgaactcctgacactatttagtattcttgaaggagagcttgaagcaagggaccttgttatagaagccttaaaggcccaacacagagatactttcattgaagaacgctatggaaaatataacatcagtgatcctttaatggctctacagagagattttgaaacactgaaggagaaaaatgatggcgaaaagcagccagtctgcacaaatccactctctattcttaaggttgtgatgaagcagtgcaagaacatgcaggagcgcatgctgtcccagctggctgctgctgagagcaggcaccgaaaggtgatcctagaccttgaggaagaaaggcagcggcatgcacaggatacggctgaaggagatgatgtcacctacatgctagagaaggaaagagagaggctgactcaacagttggaatttgaaaaatcccaagtgaaaaagtttgaaaaagaacagaagaagctctctagtcagctggaagaggagcgctcccgccacaagcagctctcatccatgctagtgcttgagtgcaagaaagccaccaacaaggcagccgaggaaggacagaaggcaggagagctgagcctgaaattggagaaggagaagagccgggtgagtaaactggaagaagagttggcagctgagagaaagagaggcttgcagactgaggcccaggtagagaagcagttatcagagtttgacatcgaaagggaacaactgagagcaaaactgaaccgagaagagaaccggaccaaaaccctgaaagaagaaatggaaagtttaaagaagatagtgaaggacctagaggcttcccaccagcacagtagccctaatgagcaattgaagaaaccagtaaccgtgtccaaaggcacagcaactgagcctctcatgctaatgtctgtgttttgccaaacagagagttttccagcagaaagaacccatgggagcaacatagccaagatgacaaacactgggctgcctggtcctgccactcctgcttactcatatgcaaaaaccaatggccattgtgacccagagatacaaactaccagggagctgactgcaggcaacaatgtagaaaaccaagtgcctccacgggaaaaatctgtggcattggcccaagagaaaccagtggagaatggtgggtgtcctgtggggattgagactccagtcccaatgcccagtcccctctcttccagtgggagctcactgtctcccagcagcactgcctcctcctctctaacatcctctccttgctcttcgccggtactcactaagcgtttattggggtcatcagctagcagccctggctaccagtcatcgtaccaagtagggatcaaccaacggttccatgcagctcgccacaaatttcagtcccaagcagatcaggaccaacaagccagtggcctacagagccctccatccagggatttatcccccaccctcatagacaactctgccgccaagcagctggcccgaaacacagtcactcaggtgctctccagattcactagccaacaagggccaatcaagccagtctctcccaacagctctccctttggcacagactatcgaaatctagccaacactgccaatccaagaggtgacacaagccattcacctactccagggaaagtgtccagtcccctgagccccctgtctccaggaatcaagtccccaaccatccccagagctgagagaggaaaccctccacccatcccacccaagaaacctggcctcaccccttctccatctgctaccactccattgaccaaaactcattcccaggcagcctctttgaccactgcagaagaccttgccagcagctgctcttccaatactgttgtagcaaatggtaaggatgttgagttacttttgcctaccagcagctagtccctaggagggagtctccacgtttgacattccatcagatttcgtccaaaagctcagtcagacttctgagtcagattatgttatttattttgatagtagctgaaaccatctgtataatacatttagtatatttcaccattttgtatttttttaagtagaaactgagtagtttggatttttatggctcacatctttttactgaagccagaaaggcacctcaaagatgtctcaagctcagcagtcaccgtcatgttgtgatgaagaaagcgaatcaccaggtggtgatttgctatctatttgagaactagaatcactcaacactcattttgaattatgcagaagtggttcatgcagatttttattccagatgaacatgttttaaaagtgcctgaaatatgactgccatatgaatgtgattctgcagcaaaaaacacaaaatagatcatttaattacagaaaatgagatcctctgtgaattctgaatgttaaaaaccaacactgcttttaatcctcttttaatgttttaatacaagctttgtgttctgaaacaaggctgcataagtagaatgggaatccttctaaaggtgggtgtgaactcaccacaagctgagctttatagagcccttgagaaaccctcctgagcactaagcagttggggtgctgattttcttgtacttttgaaaaattaagtcactcccagtttcctgcataagttcttgaacagaatgaaatcacatctccattcaaaaaatgtctcaagcatctactgttgtgtaaggaacttctgattctgattgctgttacttgaataggaaatggttactcattctgtataaaagttttgcaagagaatgaattttttattctgtaatcaaaaagcaataacttgaaattcactctgtaatattataggtcagaattatacaagttttaccaaattgttacacttattctccaagctgccagaacctggtatctgtatctgtaaaaccaaattaacttttgcttaaatgggaagtatacatatatctgtatagatacattacccctttacatgtttaacatacacacacttaaacacataaatactagtgtgattatatctttggagtttgcaatatagcataaaggacaagtagaactgcacattaagattacctaccgaagcaactagatgtggctgggacacaatcaaaggaggaattttgtccacaggaaggtgaggaaattccaaatgaagcctagatcttcagtatcataaaaaggcagagctggccaggcacagtggctcatgcctgtaatcttatcactttgggaggctgagatgggaggatctcttgagaccaggtgttcaagaccagcctcatcaacatagtgagaccccatctctattaaaaaaataaataggcagagctaaactaaccccagtgtcacaaaactcaactggtcatataaatgagtgaaacaggcctctcacacaagcgatgtaaaacagctgggagcagtgggagctgtggcaaactaaagtgcccaagccgcatttaaaaagggcatctgttcagctccatctgcttgctgcggtgcaagaatgctaaaccaggattaccagttcttcacattttttgaaatccaaattttcatgagaaacattctcatttttaaatatcaagaagtgattttaaaatgtttaaatggtgctggttaaacaaacacgtctgcagctggatttagcttgcaagctgccaagttgcaacctctttcattctagaaacttctgtcattttcatcatagcaagtctatgcggacaaaagcctccaaactttccaactgtgtaggccagtacagctggcaaggttcatagaatataatggctatccccctctgccaaataagactatccacaacccagctcagacacagtggttatatgattttgtgtccatacaggagaggccttggtgtcttcacatacattctctgagccaacatctatccagcagccctgacctcctgctataatttaagtctatttccttttaatctaataagagttgatagtaaaaaggcaggtgatggaaatcagtgtataatcacaatggagtatattggcaactccacagcttatagtttgataaaggcaaatacatgaaaaataaaaatgctactaatgccccaaggtgtctatcaaaatgatgtagggggtatcttaaactgtccaaggcaatcatgcattgaactttattcctatgcagagccaaaacgaatagtgttgataaaatagctaaactttctaaactggagaggaggctacagtgccagagagttattgtctcttttgctttaaatggtaatcttaaaagttgcattgtgctcttcctttgttttgggatagatatatatagagagagatactataaggaagtttatttcttaggaagtgcactgaataatgtatttcttttacagtgtaatatgggggtggggatatgcgaaagaaatgtgtatttttgctagttgcctaccttctgagataaataagcacaatcttgcaatggatccaataacccagttaggtattatagattagtatttaagtttgctgtagattgtgtgtgtgtgtgctaagtaaaagttccatgattcacaattttagtattaacccatgttgcaaaagctgttactggccaacagattgtaatgatgtgtaccatataacacaagcattaactaggcattaacgtttgtaaagccaaatataccatgcagaagtcttcatttttatagcagactgcattaaaacaagttaaatcttgctgtttggggggaaatagtcttgtttgtacaaagtgaaaaatggcacaatttgggcatattttgttgggaagagggggtggtgtagagggagcacttgactgtggctttgacaaaacaaatgaagtcaatgacccatccaggttagactccataaggaactaagacattgattttctttagagtcttagagctggaaaaagcctttacaataatccagtctgtgattttttaaa

SEQ ID NO: 422802 - DNA, 4065 bp, Homo sapiens
cccctcattcaaaggcacctcccaccccgcacctcagccttggcggagaggactcacagcattggacacatttccaccatgctaatggcattttaaatatatttggcaattttcccaattttttactgaagaaaactgtaagtttatacttgaggactgaagtgtgactctgccgattatcaggctttcaagatgaatctggaaaaactcagcaagcctgaactcctgacactatttagtattcttgaaggagagcttgaagcaagggaccttgttatagaagccttaaaggcccaacacagagatactttcattgaagaacgctatggaaaatataacatcagtgatcctttaatggctctacagagagattttgaaacactgaaggagaaaaatgatggcgaaaagcagccagtctgcacaaatccactctctattcttaaggttgtgatgaagcagtgcaagaacatgcaggagcgcatgctgtcccagctggctgctgctgagagcaggcaccgaaaggtgatcctagaccttgaggaagaaaggcagcggcatgcacaggatacggctgaaggagatgatgtcacctacatgctagagaaggaaagagagaggctgactcaacagttggaatttgaaaaatcccaagtgaaaaagtttgaaaaagaacagaagaagctctctagtcagctggaagaggagcgctcccgccacaagcagctctcatccatgctagtgcttgagtgcaagaaagccaccaacaaggcagccgaggaaggacagaaggcaggagagctgagcctgaaattggagaaggagaagagccgggtgagtaaactggaagaagagttggcagctgagagaaagagaggcttgcagactgaggcccaggtagagaagcagttatcagagtttgacatcgaaagggaacaactgagagcaaaactgaaccgagaagagaaccggaccaaaaccctgaaagaagaaatggaaagtttaaagaagatagtgaaggacctagaggcttcccaccagcacagtagccctaatgagcaattgaagaaaccagtaaccgtgtccaaaggcacagcaactgagcctctcatgctaatgtctgtgttttgccaaacagagagttttccagcagaaagaacccatgggagcaacatagccaagatgacaaacactgggctgcctggtcctgccactcctgcttactcatatgcaaaaaccaatggccattgtgacccagagatacaaactaccagggagctgactgcaggcaacaatgtagaaaaccaagtgcctccacgggaaaaatctgtggcattggcccaagagaaaccagtggagaatggtgggtgtcctgtggggattgagactccagtcccaatgcccagtcccctctcttccagtgggagctcactgtctcccagcagcactgcctcctcctctctaacatcctctccttgctcttcgccggtactcactaagcgtttattggggtcatcagctagcagccctggctaccagtcatcgtaccaagtagggatcaaccaacggttccatgcagctcgccacaaatttcagtcccaagcagatcaggaccaacaagccagtggcctacagagccctccatccagggatttatcccccaccctcatagacaactctgccgccaagcagctggcccgaaacacagtcactcaggtgctctccagattcactagccaacaagggccaatcaagccagtctctcccaacagctctccctttggcacagactatcgaaatctagccaacactgccaatccaagaggtgacacaagccattcacctactccagggaaagtgtccagtcccctgagccccctgtctccaggaatcaagtccccaaccatccccagagctgagagaggaaaccctccacccatcccacccaagaaacctggcctcaccccttctccatctgctaccactccattgaccaaaactcattcccaggcagcctctttgaccactgcagaagaccttgccagcagctgctcttccaatactgttgtagcaaatggtaaggatgttgagttacttttgcctaccagcagctagtccctaggagggagtctccacgtttgacattccatcagatttcgtccaaaagctcagtcagacttctgagtcagattatgttatttattttgatagtagctgaaaccatctgtataatacatttagtatatttcaccattttgtatttttttaagtagaaactgagtagtttggatttttatggctcacatctttttactgaagccagaaaggcacctcaaagatgtctcaagctcagcagtcaccgtcatgttgtgatgaagaaagcgaatcaccaggtggtgatttgctatctatttgagaactagaatcactcaacactcattttgaattatgcagaagtggttcatgcagatttttattccagatgaacatgttttaaaagtgcctgaaatatgactgccatatgaatgtgattctgcagcaaaaaacacaaaatagatcatttaattacagaaaatgagatcctctgtgaattctgaatgttaaaaaccaacactgcttttaatcctcttttaatgttttaatacaagctttgtgttctgaaacaaggctgcataagtagaatgggaatccttctaaaggtgggtgtgaactcaccacaagctgagctttatagagcccttgagaaaccctcctgagcactaagcagttggggtgctgattttcttgtacttttgaaaaattaagtcactcccagtttcctgcataagttcttgaacagaatgaaatcacatctccattcaaaaaatgtctcaagcatctactgttgtgtaaggaacttctgattctgattgctgttacttgaataggaaatggttactcattctgtataaaagttttgcaagagaatgaattttttattctgtaatcaaaaagcaataacttgaaattcactctgtaatattataggtcagaattatacaagttttaccaaattgttacacttattctccaagctgccagaacctggtatctgtatctgtaaaaccaaattaacttttgcttaaatgggaagtatacatatatctgtatagatacattacccctttacatgtttaacatacacacacttaaacacataaatactagtgtgattatatctttggagtttgcaatatagcataaaggacaagtagaactgcacattaagattacctaccgaagcaactagatgtggctgggacacaatcaaaggaggaattttgtccacaggaaggtgaggaaattccaaatgaagcctagatcttcagtatcataaaaaggcagagctggccaggcacagtggctcatgcctgtaatcttatcactttgggaggctgagatgggaggatctcttgagaccaggtgttcaagaccagcctcatcaacatagtgagaccccatctctattaaaaaaataaataggcagagctaaactaaccccagtgtcacaaaactcaactggtcatataaatgagtgaaacaggcctctcacacaagcgatgtaaaacagctgggagcagtgggagctgtggcaaactaaagtgcccaagccgcatttaaaaagggcatctgttcagctccatctgcttgctgcggtgcaagaatgctaaaccaggattaccagttcttcacattttttgaaatccaaattttcatgagaaacattctcatttttaaatatcaagaagtgattttaaaatgtttaaatggtgctggttaaacaaacacgtctgcagctggatttagcttgcaagctgccaagttgcaacctctttcattctagaaacttctgtcattttcatcatagcaagtctatgcggacaaaagcctccaaactttccaactagattgtaatgatgtgtaccatataacacaagcattaactaggcattaacgtttgtaaagccaaatataccatgcagaagtcttcatttttatagcagactgcattaaaacaagttaaatctt

SEQ ID NO: 422803 - DNA, 852 bp, Homo sapiens
  misc_feature (19)..(19): n is a, c, g, or t
ggcaactccacagattatnggttgataaaggcaaatacaccattgtgattatacactgatttccatcacctgcctttttactatcaactcttattagataaaaaggcaggtgatggaaatcagtgtataatcacaatggagtatattggcaactccacagcttatagtttgataaaggcaaatacatgaaaaataaaaatgctactaatgccccaaggtgtctatcaaaatgatgtagggggtatcttaaactgtccaaggcaatcatgcattgaactttattcctatgcagagccaaaacgaatagtgttgataaaatagctaaactttctaaactggagaggaggctacagtgccagagagttattgtctcttttgctttaaatggtaatcttaaaagttgcattgtgctcttcctttgttttgggatagatatatatagagagagatactataaggaagtttatttcttaggaagtgcactgaataatgtatttcttttacagtgtaatatgggggtggggatatgcgaaagaaatgtgtatttttgctagttgcctaccttctgagataaataagcacaatcttgcaatggatccaataacccagttaggtattatagattagtatttaagtttgctgtagattgtgtgtgtgtgtgctaagtaaaagttccatgattcacaattttagtattaacccatgttgcaaaagctgttactggccaacagattgtaatgatgtgtaccatataacacaagcattaactaggcattaacgtttgtaaagccaaatataccatgcagaagtcttcatttttatagcagactgcattaaaacaagttaaatctt

SEQ ID NO: 422804 - DNA, 2961 bp, Homo sapiens
  misc_feature (2706)..(2706): n is a, c, g, or t
agccgctgtggatggggagtggaggcggaggggagcggagcccggagcgtcgtggaaagcattggacacatttccaccatgctaatggcattttaaatatatttggcaattttcccaattttttactgaagaaaactgtaagtttatacttgaggactgaagtgtgactctgccgattatcaggctttcaagatgaatctggaaaaactcagcaagcctgaactcctgacactatttagtattcttgaaggagagcttgaagcaagggaccttgttatagaagccttaaaggcccaacacagagatactttcattgaagaacgctatggaaaatataacatcagtgatcctttaatggctctacagagagattttgaaacactgaaggagaaaaatgatggcgaaaagcagccagtctgcacaaatccactctctattcttaaggttgtgatgaagcagtgcaagaacatgcaggagcgcatgctgtcccagctggctgctgctgagagcaggcaccgaaaggtgatcctagaccttgaggaagaaaggcagcggcatgcacaggatacggctgaaggagatgatgtcacctacatgctagagaaggaaagagagaggctgactcaacagttggaatttgaaaaatcccaagtgaaaaagtttgaaaaagaacagaagaagctctctagtcagctggaagaggagcgctcccgccacaagcagctctcatccatgctagtgcttgagtgcaagaaagccaccaacaaggcagccgaggaaggacagaaggcaggagagctgagcctgaaattggagaaggagaagagccgggtgagtaaactggaagaagagttggcagctgagagaaagagaggcttgcagactgaggcccaggtagagaagcagttatcagagtttgacatcgaaagggaacaactgagagcaaaactgaaccgagaagagaaccggaccaaaaccctgaaagaagaaatggaaagtttaaagaagatagtgaaggacctagaggcttcccaccagcacagtagccctaatgagcaattgaagaaaccagtaaccgtgtccaaaggcacagcaactgagcctctcatgctaatgtctgtgttttgccaaacagagagttttccagcagaaagaacccatgggagcaacatagccaagatgacaaacactgggctgcctggtcctgccactcctgcttactcatatgcaaaaaccaatggccattgtgacccagagatacaaactaccagggagctgactgcaggcaacaatgtagaaaaccaagtgcctccacgggaaaaatctgtggcattggcccaagagaaaccagtggagaatggtgggtgtcctgtggggattgagactccagtcccaatgcccagtcccctctcttccagtgggagctcactgtctcccagcagcactgcctcctcctctctaacatcctctccttgctcttcgccggtactcactaagcgtttattggggtcatcagctagcagccctggctaccagtcatcgtaccaagtagggatcaaccaacggttccatgcagctcgccacaaatttcagtcccaagcagatcaggaccaacaagccagtggcctacagagccctccatccagggatttatcccccaccctcatagacaactctgccgccaagcagctggcccgaaacacagtcactcaggtgctctccagattcactagccaacaagggccaatcaagccagtctctcccaacagctctccctttggcacagactatcgaaatctagccaacactgccaatccaagaggtgacacaagccattcacctactccagggaaagtgtccagtcccctgagccccctgtctccaggaatcaagtccccaaccatccccagagctgagagaggaaaccctccacccatcccacccaagaaacctggcctcaccccttctccatctgctaccactccattgaccaaaactcattcccaggcagcctctttgaccactgcagaagaccttgccagcagctgctcttccaatactgttgtagcaaatggataaggtcagagacggaggcacaagacgtccccaagaggtgagttctgtttcagggagactgacagacaccagtgggtgctttcttcaagggttggggctgacctaagaaggagctcccaggccacagcattctgcaatacactgtccaataatttgtagggaagatctaggaacatgcaaaaggcagtttgaaaaaggacctggttgccaaagtaccatattacccatcaatgtcctctcctacccatttccctttttcacaccctctaaatctctataagcaaatgcggaaaatgcaaactaagctttgaacagaatcaaatgagtccctctgggacacttgcaggggacttatttcttccgaaggatgtgacagcagcttctcccaatagtggcagcgtttgtttcactgttagactggaggagcacaaggagcatacaacatgtggctctgtccacaccactgtgaagttgttggttctgagaaattactggggggagtgttaaaacaagattggccttatctctggggagtcacctgtttaacctgacaagaatcctgctcattaactcaatgtgttagacactaggatgtgccacatgggttccctttcaggagtgaaatttaantccctaggtgcagggaatgctgacagtaagtggccctcaagatataaccccttataggaattaccttcactgaaagaaaatcagcttgaccaaagtcacagctccttccctggacagctcatatattaatacaaagactgggcatggtggctgacacctgtaatcccagcactttgggagactgaggcaggtggatcacttgaggtcaggagttcgagactagcctggtcaacatggtgaaaccacatctctact

SEQ ID NO: 422805 - DNA, 1847 bp, Homo sapiens
agccgctgtggatggggagtggaggcggaggggagcggagcccggagcgtcgtggaaagcattggacacatttccaccatgctaatggcattttaaatatatttggcaattttcccaattttttactgaagaaaactgtaagtttatacttgaggactgaagtgtgactctgccgattatcaggctttcaagatgaatctggaaaaactcagcaagcctgaactcctgacactatttagtattcttgaaggagagcttgaagcaagggaccttgttatagaagccttaaagtggcctacagagccctccatccagggatttatcccccaccctcatagacaactctgccgccaagcagctggcccgaaacacagtcactcaggtgctctccagattcactagccaacaagggccaatcaagccagtctctcccaacagctctccctttggcacagactatcgaaatctagccaacactgccaatccaagaggtgacacaagccattcacctactccagggaaagtgtccagtcccctgagccccctgtctccaggaatcaagtccccaaccatgccagagctgagagaggaaaccctccacccatcccacccaagaaacctggcctcaccccttctccatctgctgagagcaggcaccgaaaggtgatcctagaccttgaggaagaaaggcagcggcatgcacaggatacggctgaaggagatgatgtcacctacatgctagagaaggaaagagagaggctgactcaacagttggaatttgaaaaatcccaagtgaaaaagtttgaaaaagaacagaagaagctctctagtcagctggaagaggagcgctcccgccacaagcagctctcatccatgctagtgcttgagtgcaagaaagccaccaacaaggcagccgaggaaggacagaaggcaggagagctgagcctgaaattggagaaggagaagagccgggtgagtaaactggaagaagagttggcagctgagagaaagagaggcttgcagactgaggcccaggtagagaagcagttatcagagtttgacatcgaaagggaacaactgagagcaaaactgaaccgagaagagaaccggaccaaaaccctgaaagaagaaatggaaagtttaaagaagatagtgaaggacctagaggcttcccaccagcacagtagccctaatgagcaattgaagaaaccagtaaccgtgtccaaaggcacagcaactgagcctctcatgctaatgtctgtgttttgccaaacagagagttttccagcagaaagaacccatgggagcaacatagccaagatgacaaacactgggctgcctggtcctgccactcctgcttactcatatgcaaaaaccaatggccattgtgacccagagatacaaactaccagggagctgactgcaggcaacaatgtagaaaaccaagtgcctccacgggaaaaatctgtggcattggcccaagagaaaccagtggagaatggtgggtgtcctgtggggattgagactccagtcccaatgcccagtcccctctcttccagtgggagctcactgtctcccagcagcactgcctcctcctctctaacatcctctccttgctcttcgccggtactcactaagcgtttattggggtcatcagctagcagccctggctaccagtcatcgtaccaagtagggatcaaccaacggttccatgcagctcgccacaaatttcagtcctctgccctggacctgtgacattctggactatttctgtgtttatttgtggccgagtgtaacaaccatataataaatcacctcttccgctgttttagctgaagaattaaatc

SEQ ID NO: 422806 - DNA, 4925 bp, Homo sapiens
cccctcattcaaaggcacctcccaccccgcacctcagccttggcggagaggactcacagcattggacacatttccaccatgctaatggcattttaaatatatttggcaattttcccaattttttactgaagaaaactgtaagtttatacttgaggactgaagtgtgactctgccgattatcaggctttcaagatgaatctggaaaaactcagcaagcctgaactcctgacactatttagtattcttgaaggagagcttgaagcaagggaccttgttatagaagccttaaaggcccaacacagagatactttcattgaagaacgctatggaaaatataacatcagtgatcctttaatggctctacagagagattttgaaacactgaaggagaaaaatgatggcgaaaagcagccagtctgcacaaatccactctctattcttaaggttgtgatgaagcagtgcaagaacatgcaggagcgcatgctgtcccagctggctgctgctgagagcaggcaccgaaaggtgatcctagaccttgaggaagaaaggcagcggcatgcacaggatacggctgaaggagatgatgtcacctacatgctagagaaggaaagagagaggctgactcaacagttggaatttgaaaaatcccaagtgaaaaagtttgaaaaagaacagaagaagctctctagtcagctggaagaggagcgctcccgccacaagcagctctcatccatgctagtgcttgagtgcaagaaagccaccaacaaggcagccgaggaaggacagaaggcaggagagctgagcctgaaattggagaaggagaagagccgggtgagtaaactggaagaagagttggcagctgagagaaagagaggcttgcagactgaggcccaggtagagaagcagttatcagagtttgacatcgaaagggaacaactgagagcaaaactgaaccgagaagagaaccggaccaaaaccctgaaagaagaaatggaaagtttaaagaagatagtgaaggacctagaggcttcccaccagcacagtagccctaatgagcaattgaagaaaccagtaaccgtgtccaaaggcacagcaactgagcctctcatgctaatgtctgtgttttgccaaacagagagttttccagcagaaagaacccatgggagcaacatagccaagatgacaaacactgggctgcctggtcctgccactcctgcttactcatatgcaaaaaccaatggccattgtgacccagagatacaaactaccagggagctgactgcaggcaacaatgtagaaaaccaagtgcctccacgggaaaaatctgtggcattggcccaagagaaaccagtggagaatggtgggtgtcctgtggggattgagactccagtcccaatgcccagtcccctctcttccagtgggagctcactgtctcccagcagcactgcctcctcctctctaacatcctctccttgctcttcgccggtactcactaagcgtttattggggtcatcagctagcagccctggctaccagtcatcgtaccaagtagggatcaaccaacggttccatgcagctcgccacaaatttcagtcccaagcagatcaggaccaacaagccagtggcctacagagccctccatccagggatttatcccccaccctcatagacaactctgccgccaagcagctggcccgaaacacagtcactcaggtgctctccagattcactagccaacaagggccaatcaagccagtctctcccaacagctctccctttggcacagactatcgaaatctagccaacactgccaatccaagaggtgacacaagccattcacctactccagggaaagtgtccagtcccctgagccccctgtctccaggaatcaagtccccaaccatccccagagctgagagaggaaaccctccacccatcccacccaagaaacctggcctcaccccttctccatctgctaccactccattgaccaaaactcattcccaggcagcctctttgaccactgcagaagaccttgccagcagctgctcttccaatactgttgtagcaaatggtaaggatgttgagttacttttgcctaccagcagctagtccctaggagggagtctccacgtttgacattccatcagatttcgtccaaaagctcagtcagacttctgagtcagattatgttatttattttgatagtagctgaaaccatctgtataatacatttagtatatttcaccattttgtatttttttaagtagaaactgagtagtttggatttttatggctcacatctttttactgaagccagaaaggcacctcaaagatgtctcaagctcagcagtcaccgtcatgttgtgatgaagaaagcgaatcaccaggtggtgatttgctatctatttgagaactagaatcactcaacactcattttgaattatgcagaagtggttcatgcagatttttattccagatgaacatgttttaaaagtgcctgaaatatgactgccatatgaatgtgattctgcagcaaaaaacacaaaatagatcatttaattacagaaaatgagatcctctgtgaattctgaatgttaaaaaccaacactgcttttaatcctcttttaatgttttaatacaagctttgtgttctgaaacaaggctgcataagtagaatgggaatccttctaaaggtgggtgtgaactcaccacaagctgagctttatagagcccttgagaaaccctcctgagcactaagcagttggggtgctgattttcttgtacttttgaaaaattaagtcactcccagtttcctgcataagttcttgaacagaatgaaatcacatctccattcaaaaaatgtctcaagcatctactgttgtgtaaggaacttctgattctgattgctgttacttgaataggaaatggttactcattctgtataaaagttttgcaagagaatgaattttttattctgtaatcaaaaagcaataacttgaaattcactctgtaatattataggtcagaattatacaagttttaccaaattgttacacttattctccaagctgccagaacctggtatctgtatctgtaaaaccaaattaacttttgcttaaatgggaagtatacatatatctgtatagatacattacccctttacatgtttaacatacacacacttaaacacataaatactagtgtgattatatctttggagtttgcaatatagcataaaggacaagtagaactgcacattaagattacctaccgaagcaactagatgtggctgggacacaatcaaaggaggaattttgtccacaggaaggtgaggaaattccaaatgaagcctagatcttcagtatcataaaaaggcagagctggccaggcacagtggctcatgcctgtaatcttatcactttgggaggctgagatgggaggatctcttgagaccaggtgttcaagaccagcctcatcaacatagtgagaccccatctctattaaaaaaataaataggcagagctaaactaaccccagtgtcacaaaactcaactggtcatataaatgagtgaaacaggcctctcacacaagcgatgtaaaacagctgggagcagtgggagctgtggcaaactaaagtgcccaagccgcatttaaaaagggcatctgttcagctccatctgcttgctgcggtgcaagaatgctaaaccaggattaccagttcttcacattttttgaaatccaaattttcatgagaaacattctcatttttaaatatcaagaagtgattttaaaatgtttaaatggtgctggttaaacaaacacgtctgcagctggatttagcttgcaagctgccaagttgcaacctctttcattctagaaacttctgtcattttcatcatagcaagtctatgcggacaaaagcctccaaactttccaactgtgtaggccagtacagctggcaaggttcatagaatataatggctatccccctctgccaaataagactatccacaacccagctcagacacagtggttatatgattttgtgtccatacaggagaggccttggtgtcttcacatacattctctgagccaacatctatccagcagccctgacctcctgctataatttaagtctatttccttttaatctaataagagttgatagtaaaaaggcaggtgatggaaatcagtgtataatcacaatggagtatattggcaactccacagcttatagtttgataaaggcaaatacatgaaaaataaaaatgctactaatgccccaaggtgtctatcaaaatgatgtagggggtatcttaaactgtccaaggcaatcatgcattgaactttattcctatgcagagccaaaacgaatagtgttgataaaatagctaaactttctaaactggagaggaggctacagtgccagagagttattgtctcttttgctttaaatggtaatcttaaaagttgcattgtgctcttcctttgttttgggatagatatatatagagagagatactataaggaagtttatttcttaggaagtgcactgaataatgtatttcttttacagtgtaatatgggggtggggatatgcgaaagaaatgtgtatttttgctagttgcctaccttctgagataaataagcacaatcttgcaatggatccaataacccagttaggtattatagattagtatttaagtttgctgtagattgtgtgtgtgtgtgctaagtaaaagttccatgattcacaattttagtattaacccatgttgcaaaagctgttactggccaacagattgtaatgatgtgtaccatataacacaagcattaactaggcattaacgtttgtaaagccaaatataccatgcagaagtcttcatttttatagcagactgcattaaaacaagttaaatctt

SEQ ID NO: 422807 - DNA, 5835 bp, Homo sapiens
cccctcattcaaaggcacctcccaccccgcacctcagccttggcggagaggactcacagcattggacacatttccaccatgctaatggcattttaaatatatttggcaattttcccaattttttactgaagaaaactgtaagtttatacttgaggactgaagtgtgactctgccgattatcaggctttcaagatgaatctggaaaaactcagcaagcctgaactcctgacactatttagtattcttgaaggagagcttgaagcaagggaccttgttatagaagccttaaaggcccaacacagagatactttcattgaagaacgctatggaaaatataacatcagtgatcctttaatggctctacagagagattttgaaacactgaaggagaaaaatgatggcgaaaagcagccagtctgcacaaatccactctctattcttaaggttgtgatgaagcagtgcaagaacatgcaggagcgcatgctgtcccagctggctgctgctgagagcaggcaccgaaaggtgatcctagaccttgaggaagaaaggcagcggcatgcacaggatacggctgaaggagatgatgtcacctacatgctagagaaggaaagagagaggctgactcaacagttggaatttgaaaaatcccaagtgaaaaagtttgaaaaagaacagaagaagctctctagtcagctggaagaggagcgctcccgccacaagcagctctcatccatgctagtgcttgagtgcaagaaagccaccaacaaggcagccgaggaaggacagaaggcaggagagctgagcctgaaattggagaaggagaagagccgggtgagtaaactggaagaagagttggcagctgagagaaagagaggcttgcagactgaggcccaggtagagaagcagttatcagagtttgacatcgaaagggaacaactgagagcaaaactgaaccgagaagagaaccggaccaaaaccctgaaagaagaaatggaaagtttaaagaagatagtgaaggacctagaggcttcccaccagcacagtagccctaatgagcaattgaagaaaccagtaaccgtgtccaaaggcacagcaactgagcctctcatgctaatgtctgtgttttgccaaacagagagttttccagcagaaagaacccatgggagcaacatagccaagatgacaaacactgggctgcctggtcctgccactcctgcttactcatatgcaaaaaccaatggccattgtgacccagagatacaaactaccagggagctgactgcaggcaacaatgtagaaaaccaagtgcctccacgggaaaaatctgtggcattggcccaagagaaaccagtggagaatggtgggtgtcctgtggggattgagactccagtcccaatgcccagtcccctctcttccagtgggagctcactgtctcccagcagcactgcctcctcctctctaacatcctctccttgctcttcgccggtactcactaagcgtttattggggtcatcagctagcagccctggctaccagtcatcgtaccaagtagggatcaaccaacggttccatgcagctcgccacaaatttcagtcccaagcagatcaggaccaacaagccagtggcctacagagccctccatccagggatttatcccccaccctcatagacaactctgccgccaagcagctggcccgaaacacagtcactcaggtgctctccagattcactagccaacaagggccaatcaagccagtctctcccaacagctctccctttggcacagactatcgaaatctagccaacactgccaatccaagaggtgacacaagccattcacctactccagggaaagtgtccagtcccctgagccccctgtctccaggaatcaagtccccaaccatccccagagctgagagaggaaaccctccacccatcccacccaagaaacctggcctcaccccttctccatctgctaccactccattgaccaaaactcattcccaggcagcctctttgaccactgcagaagaccttgccagcagctgctcttccaatactgttgtagcaaatggtaaggatgttgagttacttttgcctaccagcagctagtccctaggagggagtctccacgtttgacattccatcagatttcgtccaaaagctcagtcagacttctgagtcagattatgttatttattttgatagtagctgaaaccatctgtataatacatttagtatatttcaccattttgtatttttttaagtagaaactgagtagtttggatttttatggctcacatctttttactgaagccagaaaggcacctcaaagatgtctcaagctcagcagtcaccgtcatgttgtgatgaagaaagcgaatcaccaggtggtgatttgctatctatttgagaactagaatcactcaacactcattttgaattatgcagaagtggttcatgcagatttttattccagatgaacatgttttaaaagtgcctgaaatatgactgccatatgaatgtgattctgcagcaaaaaacacaaaatagatcatttaattacagaaaatgagatcctctgtgaattctgaatgttaaaaaccaacactgcttttaatcctcttttaatgttttaatacaagctttgtgttctgaaacaaggctgcataagtagaatgggaatccttctaaaggtgggtgtgaactcaccacaagctgagctttatagagcccttgagaaaccctcctgagcactaagcagttggggtgctgattttcttgtacttttgaaaaattaagtcactcccagtttcctgcataagttcttgaacagaatgaaatcacatctccattcaaaaaatgtctcaagcatctactgttgtgtaaggaacttctgattctgattgctgttacttgaataggaaatggttactcattctgtataaaagttttgcaagagaatgaattttttattctgtaatcaaaaagcaataacttgaaattcactctgtaatattataggtcagaattatacaagttttaccaaattgttacacttattctccaagctgccagaacctggtatctgtatctgtaaaaccaaattaacttttgcttaaatgggaagtatacatatatctgtatagatacattacccctttacatgtttaacatacacacacttaaacacataaatactagtgtgattatatctttggagtttgcaatatagcataaaggacaagtagaactgcacattaagattacctaccgaagcaactagatgtggctgggacacaatcaaaggaggaattttgtccacaggaaggtgaggaaattccaaatgaagcctagatcttcagtatcataaaaaggcagagctggccaggcacagtggctcatgcctgtaatcttatcactttgggaggctgagatgggaggatctcttgagaccaggtgttcaagaccagcctcatcaacatagtgagaccccatctctattaaaaaaataaataggcagagctaaactaaccccagtgtcacaaaactcaactggtcatataaatgagtgaaacaggcctctcacacaagcgatgtaaaacagctgggagcagtgggagctgtggcaaactaaagtgcccaagccgcatttaaaaagggcatctgttcagctccatctgcttgctgcggtgcaagaatgctaaaccaggattaccagttcttcacattttttgaaatccaaattttcatgagaaacattctcatttttaaatatcaagaagtgattttaaaatgtttaaatggtgctggttaaacaaacacgtctgcagctggatttagcttgcaagctgccaagttgcaacctctttcattctagaaacttctgtcattttcatcatagcaagtctatgcggacaaaagcctccaaactttccaactgtgtaggccagtacagctggcaaggttcatagaatataatggctatccccctctgccaaataagactatccacaacccagctcagacacagtggttatatgattttgtgtccatacaggagaggccttggtgtcttcacatacattctctgagccaacatctatccagcagccctgacctcctgctataatttaagtctatttccttttaatctaataagagttgatagtaaaaaggcaggtgatggaaatcagtgtataatcacaatggagtatattggcaactccacagcttatagtttgataaaggcaaatacatgaaaaataaaaatgctactaatgccccaaggtgtctatcaaaatgatgtagggggtatcttaaactgtccaaggcaatcatgcattgaactttattcctatgcagagccaaaacgaatagtgttgataaaatagctaaactttctaaactggagaggaggctacagtgccagagagttattgtctcttttgctttaaatggtaatcttaaaagttgcattgtgctcttcctttgttttgggatagatatatatagagagagatactataaggaagtttatttcttaggaagtgcactgaataatgtatttcttttacagtgtaatatgggggtggggatatgcgaaagaaatgtgtatttttgctagttgcctaccttctgagataaataagcacaatcttgcaatggatccaataacccagttaggtattatagattagtatttaagtttgctgtagattgtgtgtgtgtgtgctaagtaaaagttccatgattcacaattttagtattaacccatgttgcaaaagctgttactggccaacagattgtaatgatgtgtaccatataacacaagcattaactaggcattaacgtttgtaaagccaaatataccatgcagaagtcttcatttttatagcagactgcattaaaacaagttaaatcttaaaaaaaaaaacaaaaaaaaaaaaaaaaaaaaaaaaaaacaaaaaaaaaaaaaacaagtgtgtggcgcgcgcgcgccgcgccgcggccccccgaaagaggaggactttcaaacaccccatcgcggtgggggggcgcgcgggggcgcccccaggagagggaaggaggacaggaggggggccccgcgcgtgctgtccccacggggagacccgcgcgcggggcaccgagaaaaaacgggtgcgggggggttctccccccccacaaaataaaaaaaacacgccgcgccgggggagaacacacgggaagaggggttttagaaaacacacaaccacagaagaggagaattgcctgagagcgaccgtacagcgggggactaacacaacaacaaggaggacccaaagggtgagagcggcaacgaaataaaaaactaacccccgccgcccggggggggccagaaaagagacctacagatgaaggccatgacaggaaaaagagaaatacacgaagcaacgaccaccaagagagaacacaccagggaacacaaataaacggccaaactaaacacccaaacagagagactaacacagccgggaccacagagccacgccacggaccacaccaccgtccagtctgcattgaagaccgcacagaacagcaattaacccaagcagaggaaccaagcagctatctcaagtcagtgctctacagcaccgacgaccaacacttggtatgggctcgcatagcaccaggcggggggtcgacactccacgacagacgacacggtgcagatacccgaaatacacacctaaactcaatcgaaagacaaacaacaagcacaccaatacctaacgcgcgcacagcaatgcgctacagaaaaccaacagcatgaaaaaatcatcgcgcgcgaacaag

SEQ ID NO: 422808 - DNA, 5026 bp, Homo sapiens
tgagatttcctaggatatttgtttgtaaacgtgtctggaggaaatatgatgaaaaattgatctttgtgagtggtagtgaaatcaataattaaagtgaattttactttctgttgttgcttagtttgtgattaacaccagaaaacatatttctatttaatttcaactatttcctttattaaggcatttgatactataattgctcttatctctcactttattttttctttaattgtatcaaattaactatgtctttggagattgtctgattgttacctttgtttcaggctttcaagatgaatctggaaaaactcagcaagcctgaactcctgacactatttagtattcttgaaggagagcttgaagcaagggaccttgttatagaagccttaaaggcccaacacagagatactttcattgaagaacgctatggaaaatataacatcagtgatcctttaatggctctacagagagattttgaaacactgaaggagaaaaatgatggcgaaaagcagccagtctgcacaaatccactctctattcttaaggttgtgatgaagcagtgcaagaacatgcaggagcgcatgctgtcccagctggctgctgctgagagcaggcaccgaaaggtgatcctagaccttgaggaagaaaggcagcggcatgcacaggatacggctgaaggagatgatgtcacctacatgctagagaaggaaagagagaggctgactcaacagttggaatttgaaaaatcccaagtgaaaaagtttgaaaaagaacagaagaagctctctagtcagctggaagaggagcgctcccgccacaagcagctctcatccatgctagtgcttgagtgcaagaaagccaccaacaaggcagccgaggaaggacagaaggcaggagagctgagcctgaaattggagaaggagaagagccgggtgagtaaactggaagaagagttggcagctgagagaaagagaggcttgcagactgaggcccaggtagagaagcagttatcagagtttgacatcgaaagggaacaactgagagcaaaactgaaccgagaagagaaccggaccaaaaccctgaaagaagaaatggaaagtttaaagaagatagtgaaggacctagaggcttcccaccagcacagtagccctaatgagcaattgaagaaaccagtaaccgtgtccaaaggcacagcaactgagcctctcatgctaatgtctgtgttttgccaaacagagagttttccagcagaaagaacccatgggagcaacatagccaagatgacaaacactgggctgcctggtcctgccactcctgcttactcatatgcaaaaaccaatggccattgtgacccagagatacaaactaccagggagctgactgcaggcaacaatgtagaaaaccaagtgcctccacgggaaaaatctgtggcattggcccaagagaaaccagtggagaatggtgggtgtcctgtggggattgagactccagtcccaatgcccagtcccctctcttccagtgggagctcactgtctcccagcagcactgcctcctcctctctaacatcctctccttgctcttcgccggtactcactaagcgtttattggggtcatcagctagcagccctggctaccagtcatcgtaccaagtagggatcaaccaacggttccatgcagctcgccacaaatttcagtcccaagcagatcaggaccaacaagccagtggcctacagagccctccatccagggatttatcccccaccctcatagacaactctgccgccaagcagctggcccgaaacacagtcactcaggtgctctccagattcactagccaacaagggccaatcaagccagtctctcccaacagctctccctttggcacagactatcgaaatctagccaacactgccaatccaagaggtgacacaagccattcacctactccagggaaagtgtccagtcccctgagccccctgtctccaggaatcaagtccccaaccatccccagagctgagagaggaaaccctccacccatcccacccaagaaacctggcctcaccccttctccatctgctaccactccattgaccaaaactcattcccaggcagcctctttgaccactgcagaagaccttgccagcagctgctcttccaatactgttgtagcaaatggtaaggatgttgagttacttttgcctaccagcagctagtccctaggagggagtctccacgtttgacattccatcagatttcgtccaaaagctcagtcagacttctgagtcagattatgttatttattttgatagtagctgaaaccatctgtataatacatttagtatatttcaccattttgtatttttttaagtagaaactgagtagtttggatttttatggctcacatctttttactgaagccagaaaggcacctcaaagatgtctcaagctcagcagtcaccgtcatgttgtgatgaagaaagcgaatcaccaggtggtgatttgctatctatttgagaactagaatcactcaacactcattttgaattatgcagaagtggttcatgcagatttttattccagatgaacatgttttaaaagtgcctgaaatatgactgccatatgaatgtgattctgcagcaaaaaacacaaaatagatcatttaattacagaaaatgagatcctctgtgaattctgaatgttaaaaaccaacactgcttttaatcctcttttaatgttttaatacaagctttgtgttctgaaacaaggctgcataagtagaatgggaatccttctaaaggtgggtgtgaactcaccacaagctgagctttatagagcccttgagaaaccctcctgagcactaagcagttggggtgctgattttcttgtacttttgaaaaattaagtcactcccagtttcctgcataagttcttgaacagaatgaaatcacatctccattcaaaaaatgtctcaagcatctactgttgtgtaaggaacttctgattctgattgctgttacttgaataggaaatggttactcattctgtataaaagttttgcaagagaatgaattttttattctgtaatcaaaaagcaataacttgaaattcactctgtaatattataggtcagaattatacaagttttaccaaattgttacacttattctccaagctgccagaacctggtatctgtatctgtaaaaccaaattaacttttgcttaaatgggaagtatacatatatctgtatagatacattacccctttacatgtttaacatacacacacttaaacacataaatactagtgtgattatatctttggagtttgcaatatagcataaaggacaagtagaactgcacattaagattacctaccgaagcaactagatgtggctgggacacaatcaaaggaggaattttgtccacaggaaggtgaggaaattccaaatgaagcctagatcttcagtatcataaaaaggcagagctggccaggcacagtggctcatgcctgtaatcttatcactttgggaggctgagatgggaggatctcttgagaccaggtgttcaagaccagcctcatcaacatagtgagaccccatctctattaaaaaaataaataggcagagctaaactaaccccagtgtcacaaaactcaactggtcatataaatgagtgaaacaggcctctcacacaagcgatgtaaaacagctgggagcagtgggagctgtggcaaactaaagtgcccaagccgcatttaaaaagggcatctgttcagctccatctgcttgctgcggtgcaagaatgctaaaccaggattaccagttcttcacattttttgaaatccaaattttcatgagaaacattctcatttttaaatatcaagaagtgattttaaaatgtttaaatggtgctggttaaacaaacacgtctgcagctggatttagcttgcaagctgccaagttgcaacctctttcattctagaaacttctgtcattttcatcatagcaagtctatgcggacaaaagcctccaaactttccaactgtgtaggccagtacagctggcaaggttcatagaatataatggctatccccctctgccaaataagactatccacaacccagctcagacacagtggttatatgattttgtgtccatacaggagaggccttggtgtcttcacatacattctctgagccaacatctatccagcagccctgacctcctgctataatttaagtctatttccttttaatctaataagagttgatagtaaaaaggcaggtgatggaaatcagtgtataatcacaatggagtatattggcaactccacagcttatagtttgataaaggcaaatacatgaaaaataaaaatgctactaatgccccaaggtgtctatcaaaatgatgtagggggtatcttaaactgtccaaggcaatcatgcattgaactttattcctatgcagagccaaaacgaatagtgttgataaaatagctaaactttctaaactggagaggaggctacagtgccagagagttattgtctcttttgctttaaatggtaatcttaaaagttgcattgtgctcttcctttgttttgggatagatatatatagagagagatactataaggaagtttatttcttaggaagtgcactgaataatgtatttcttttacagtgtaatatgggggtggggatatgcgaaagaaatgtgtatttttgctagttgcctaccttctgagataaataagcacaatcttgcaatggatccaataacccagttaggtattatagattagtatttaagtttgctgtagattgtgtgtgtgtgtgctaagtaaaagttccatgattcacaattttagtattaacccatgttgcaaaagctgttactggccaacagattgtaatgatgtgtaccatataacacaagcattaactaggcattaacgtttgtaaagccaaatataccatgcagaagtcttcatttttatagcagactgcattaaaacaagttaaatctt

SEQ ID NO: 422809 - DNA, 4300 bp, Homo sapiens
cccctcattcaaaggcacctcccaccccgcacctcagccttggcggagaggactcacagcattggacacatttccaccatgctaatggcattttaaatatatttggcaattttcccaattttttactgaagaaaactgtaagtttatacttgaggactgaagtgtgactctgccgattatcaggctttcaagatgaatctggaaaaactcagcaagcctgaactcctgacactatttagtattcttgaaggagagcttgaagcaagggaccttgttatagaagccttaaaggcccaacacagagatactttcattgaagaacgctatggaaaatataacatcagtgatcctttaatggctctacagagagattttgaaacactgaaggagaaaaatgatggcgaaaagcagccagtctgcacaaatccactctctattcttaaggttgtgatgaagcagtgcaagaacatgcaggagcgcatgctgtcccagctggctgctgctgagagcaggcaccgaaaggtgatcctagaccttgaggaagaaaggcagcggcatgcacaggatacggctgaaggagatgatgtcacctacatgctagagaaggaaagagagaggctgactcaacagttggaatttgaaaaatcccaagtgaaaaagtttgaaaaagaacagaagaagctctctagtcagctggaagaggagcgctcccgccacaagcagctctcatccatgctagtgcttgagtgcaagaaagccaccaacaaggcagccgaggaaggacagaaggcaggagagctgagcctgaaattggagaaggagaagagccgggtgagtaaactggaagaagagttggcagctgagagaaagagaggcttgcagactgaggcccaggtagagaagcagttatcagagtttgacatcgaaagggaacaactgagagcaaaactgaaccgagaagagaaccggaccaaaaccctgaaagaagaaatggaaagtttaaagaagatagtgaaggacctagaggcttcccaccagcacagtagccctaatgagcaattgaagaaaccagtaaccgtgtccaaaggcacagcaactgagcctctcatgctaatgtctgtgttttgccaaacagagagttttccagcagaaagaacccatgggagcaacatagccaagatgacaaacactgggctgcctggtcctgccactcctgcttactcatatgcaaaaaccaatggccattgtgacccagagatacaaactaccagggagctgactgcaggcaacaatgtagaaaaccaagtgcctccacgggaaaaatctgtggcattggcccaagagaaaccagtggagaatggtgggtgtcctgtggggattgagactccagtcccaatgcccagtcccctctcttccagtgggagctcactgtctcccagcagcactgcctcctcctctctaacatcctctccttgctcttcgccggtactcactaagcgtttattggggtcatcagctagcagccctggctaccagtcatcgtaccaagtagggatcaaccaacggttccatgcagctcgccacaaatttcagtcccaagcagatcaggaccaacaagccagtggcctacagagccctccatccagggatttatcccccaccctcatagacaactctgccgccaagcagctggcccgaaacacagtcactcaggtgctctccagattcactagccaacaagggccaatcaagccagtctctcccaacagctctccctttggcacagactatcgaaatctagccaacactgccaatccaagaggtgacacaagccattcacctactccagggaaagtgtccagtcccctgagccccctgtctccaggaatcaagtccccaaccatccccagagctgagagaggaaaccctccacccatcccacccaagaaacctggcctcaccccttctccatctgctaccactccattgaccaaaactcattcccaggcagcctctttgaccactgcagaagaccttgccagcagctgctcttccaatactgttgtagcaaatggtaaggatgttgagttacttttgcctaccagcagctagtccctaggagggagtctccacgtttgacattccatcagatttcgtccaaaagctcagtcagacttctgagtcagattatgttatttattttgatagtagctgaaaccatctgtataatacatttagtatatttcaccattttgtatttttttaagtagaaactgagtagtttggatttttatggctcacatctttttactgaagccagaaaggcacctcaaagatgtctcaagctcagcagtcaccgtcatgttgtgatgaagaaagcgaatcaccaggtggtgatttgctatctatttgagaactagaatcactcaacactcattttgaattatgcagaagtggttcatgcagatttttattccagatgaacatgttttaaaagtgcctgaaatatgactgccatatgaatgtgattctgcagcaaaaaacacaaaatagatcatttaattacagaaaatgagatcctctgtgaattctgaatgttaaaaaccaacactgcttttaatcctcttttaatgttttaatacaagctttgtgttctgaaacaaggctgcataagtagaatgggaatccttctaaaggtgggtgtgaactcaccacaagctgagctttatagagcccttgagaaaccctcctgagcactaagcagttggggtgctgattttcttgtacttttgaaaaattaagtcactcccagtttcctgcataagttcttgaacagaatgaaatcacatctccattcaaaaaatgtctcaagcatctactgttgtgtaaggaacttctgattctgattgctgttacttgaataggaaatggttactcattctgtataaaagttttgcaagagaatgaattttttattctgtaatcaaaaagcaataacttgaaattcactctgtaatattataggtcagaattatacaagttttaccaaattgttacacttattctccaagctgccagaacctggtatctgtatctgtaaaaccaaattaacttttgcttaaatgggaagtatacatatatctgtatagatacattacccctttacatgtttaacatacacacacttaaacacataaatactagtgtgattatatctttggagtttgcaatatagcataaaggacaagtagaactgcacattaagattacctaccgaagcaactagatgtggctgggacacaatcaaaggaggaattttgtccacaggaaggtgaggaaattccaaatgaagcctagatcttcagtatcataaaaaggcagagctggccaggcacagtggctcatgcctgtaatcttatcactttgggaggctgagatgggaggatctcttgagaccaggtgttcaagaccagcctcatcaacatagtgagaccccatctctattaaaaaaataaataggcagagctaaactaaccccagtgtcacaaaactcaactggtcatataaatgagtgaaacaggcctctcacacaagcgatgtaaaacagctgggagcagtgggagctgtggcaaactaaagtgcccaagccgcatttaaaaagggcatctgttcagctccatctgcttgctgcggtgcaagaatgctaaaccaggattaccagttcttcacattttttgaaatccaaattttcatgagaaacattctcatttttaaatatcaagaagtgattttaaaatgtttaaatggtgctggttaaacaaacacgtctgcagctggatttagcttgcaagctgccaagttgcaacctctttcattctagaaacttctgtcattttcatcatagcaagtctatgcggacaaaagcctccaaactttccaactagattgtaatgatgtgtaccatataacacaagcattaactaggcattaacgtttgtaaagccaaatataccatgcagaagtcttcatttttatagcagactgcattaaaacaagttaaatcttgctgtttggggggaaatagtcttgtttgtacaaagtgaaaaatggcacaatttgggcatattttgttgggaagagggggtggtgtagagggagcacttgactgtggctttgacaaaacaaatgaagtcaatgacccatccaggttagactccataaggaactaagacattgattttctttagagtcttagagctggaaaaagcctttacaataatccagtctgtgattttttaaa

SEQ ID NO: 422810 - DNA, 2751 bp, Homo sapiens
  misc_feature (2496)..(2496): n is a, c, g, or t
agccgctgtggatggggagtggaggcggaggggagcggagcccggagcgtcgtggaaagcattggacacatttccaccatgctaatggcattttaaatatatttggcaattttcccaattttttactgaagaaaactgtaagtttatacttgaggactgaagtgtgactctgccgattatcaggctttcaagatgaatctggaaaaactcagcaagcctgaactcctgacactatttagtattcttgaaggagagcttgaagcaagggaccttgttatagaagccttaaaggcccaacacagagatactttcattgaagaacgctatggaaaatataacatcagtgatcctttaatggctctacagagagattttgaaacactgaaggagaaaaatgatggcgaaaagcagccagtctgcacaaatccactctctattcttaaggttgtgatgaagcagtgcaagaacatgcaggagcgcatgctgtcccagctggctgctgctgagagcaggcaccgaaaggtgatcctagaccttgaggaagaaaggcagcggcatgcacaggatacggctgaaggagatgatgtcacctacatgctagagaaggaaagagagaggctgactcaacagttggaatttgaaaaatcccaagtgaaaaagtttgaaaaagaacagaagaagctctctagtcagctggaagaggagcgctcccgccacaagcagctctcatccatgctagtgcttgagtgcaagaaagccaccaacaaggcagccgaggaaggacagaaggcaggagagctgagcctgaaattggagaaggagaagagccgggtgagtaaactggaagaagagttggcagctgagagaaagagaggcttgcagactgaggcccaggtagagaagcagttatcagagtttgacatcgaaagggaacaactgagagcaaaactgaaccgagaagagaaccggaccaaaaccctgaaagaagaaatggaaagtttaaagaagatagtgaaggacctagaggcttcccaccagcacagtagccctaatgagcaattgaagaaaccagtaaccgtgtccaaaggcacagcaactgagcctctcatgctaatgtctgtgttttgccaaacagagagttttccagcagaaagaacccatgggagcaacatagccaagatgacaaacactgggctgcctggtcctgccactcctgcttactcatatgcaaaaaccaatggccattgtgacccagagatacaaactaccagggagctgactgcaggcaacaatgtagaaaaccaagtgcctccacgggaaaaatctgtggcattggcccaagagaaaccagtggagaatggtgggtgtcctgtggggattgagactccagtcccaatgcccagtcccctctcttccagtgggagctcactgtctcccagcagcactgcctcctcctctctaacatcctctccttgctcttcgccggtactcactaagcgtttattggggtcatcagctagcagccctggctaccagtcatcgtaccaagtagggatcaaccaacggttccatgcagctcgccacaaatttcagtcccaagcagatcaggaccaacaagccagtggcctacagagccctccatccagggatttatcccccaccctcatagacaactctgccgccaagcagctggcccgaaacacagtcactcaggtgctctccagattcactagccaacaagggccaatcaagccagtctctcccaacagctctccctttggcacagactatcgaaatgcagcctctttgaccactgcagaagaccttgccagcagctgctcttccaatactgttgtagcaaatggataaggtcagagacggaggcacaagacgtccccaagaggtgagttctgtttcagggagactgacagacaccagtgggtgctttcttcaagggttggggctgacctaagaaggagctcccaggccacagcattctgcaatacactgtccaataatttgtagggaagatctaggaacatgcaaaaggcagtttgaaaaaggacctggttgccaaagtaccatattacccatcaatgtcctctcctacccatttccctttttcacaccctctaaatctctataagcaaatgcggaaaatgcaaactaagctttgaacagaatcaaatgagtccctctgggacacttgcaggggacttatttcttccgaaggatgtgacagcagcttctcccaatagtggcagcgtttgtttcactgttagactggaggagcacaaggagcatacaacatgtggctctgtccacaccactgtgaagttgttggttctgagaaattactggggggagtgttaaaacaagattggccttatctctggggagtcacctgtttaacctgacaagaatcctgctcattaactcaatgtgttagacactaggatgtgccacatgggttccctttcaggagtgaaatttaantccctaggtgcagggaatgctgacagtaagtggccctcaagatataaccccttataggaattaccttcactgaaagaaaatcagcttgaccaaagtcacagctccttccctggacagctcatatattaatacaaagactgggcatggtggctgacacctgtaatcccagcactttgggagactgaggcaggtggatcacttgaggtcaggagttcgagactagcctggtcaacatggtgaaaccacatctctact

SEQ ID NO: 422811 - DNA, 762 bp, Homo sapiens
aggggtggcctgaagatagacagagggtggataaataatcatgtaggattcctgagaagatagaagaagttggatccagagcacagcagggggaattagctggccttggagaggagagatgatctctatcctctattctagaaggaagccaaaggtgatgtgtgcagatgcagaggtgtgtttgatgtggtgaagccaagtcaaaggagtttttgttcgatgccttatatctgctccagaaagcagttgagtcaccaactgagacagggagagagaaaggggctggcatactaggaaggaaaggggatcatttcagatatttgaggaggacagagtaagttggaatatgaaagggaataaatgagtgaaatttagtaggactgctagtcactgcttgaaggctcagctgaggctgatgatcatgaattcatggtactactgttagaattattataaaatatatgagcctttttggaggtgctcagcagtttaccagacacagaaaaacaggttcatctaggcttaggattttgtcagagaggtatgatgaaaagattgcaaaggagtttaggatattggcatgggcaagggagcttctggagtgataaaccaggaatctaagcctgctagggagggacatatagacaggagaaggagagtatagagatctttctgaaggttagaggaaatttgtaatcaaagtggttgattaaacaagacagaagtatagcagtcagtgatcagcccaggatgctgcacccc

SEQ ID NO: 422812 - DNA, 1100 bp, Homo sapiens
  misc_feature (947)..(947): n is a, c, g, or t
  misc_feature (950)..(950): n is a, c, g, or t
  misc_feature (952)..(952): n is a, c, g, or t
  misc_feature (957)..(957): n is a, c, g, or t
  misc_feature (966)..(966): n is a, c, g, or t
  misc_feature (969)..(969): n is a, c, g, or t
  misc_feature (972)..(972): n is a, c, g, or t
  misc_feature (979)..(979): n is a, c, g, or t
  misc_feature (989)..(989): n is a, c, g, or t
  misc_feature (996)..(996): n is a, c, g, or t
gagcacacaggaggacttctgggagaaagtgatagccaagcttaaacctggagaaaaagggaacgccaaacacaatatagagagcagtgtaccagacagtggggacactgtgctcaaagacctagaggccagagggtgaggcactgcagattgttgagtaggccgagatagagcatacaaaagcataacaaaagatggggctaggcagaccaggtaataaacctgcactttaaacctgcacttgatcctgagcacagtagagagccactgaaagattttaagcaagagagtgccatacagtgttggaatgattcactcggacagcaatgtggaagatagaccagaaagggcaagtccagaggccaacaataatcttagcctcagagttctttttttaatacccaagaatactatttcattttacttatatttttaaacttttctctataacgctctctctgctcccccacattgttgtctggatggtaaacctaggactggtctctgagtcctggtcacagcctggcaacagaatgtttgagcaaactgggaaggctgccccatggatccctggtttcttatcaccatcctcttaattctacgtttgccaaccagtctctaggaagccagcgtgctcttgcgcccctcccaccaggtttccagttgctaagcgtgtcatgtttgcatttgggtatcatctgcatgagtgaccattttaatctctctttccttgactacttgttctacactagagtctagggtgggggtgagtacagtggtaaagacagggatagcgggaaatttagtcttctgtttaggaagctggatggtagtgtggattttctaactccttgtggtaattaaattctggagcacagtttttagaccttttctgaaatctgttactgttgaagtcagcttcatatatttcactttttttttttttnttntnaagcnactggaaantgntgngaggggngcaagagcangctggcntcctagagactggttggcaaacccagaattaagaggatggtgataagaaaccagggatccatgggtcagcgttcccagtttgctcaaccattcaacccttgatt

SEQ ID NO: 422813 - DNA, 414 bp, Homo sapiens
tttgcatttgggtatcatctgcatgagtgaccattttaatctctctttccttgactacttgttctacactagagtctagggtgggggtgagtacagtggtaaagacagggatagcgggaaatttagtcttctgtttaggaagctggatggtagtgtggattttctaactccttgtggtaattaaattctggagcacagtttttagaccttttctgaaatctgttactgttgaagtcagcttcatatatttcactttttttttttttgagacagagtctcacactgttactcaggctggagtgcactggtacaatcttgactcactgcaacctccacagctcccaggttcaagcgattctcgtgcctcagcctcccaagtagctggtactacaggcgcgtgccaccatgcttggc

SEQ ID NO: 422814 - DNA, 4277 bp, Homo sapiens
agcgccgcggtcggagccatttcgccgattcctccatgcgagttgctgtgcgtttctctgttgtctcggtagaaggccagagtcacacacggtcctaagagctgggcaccaggaagcgaaggctgatctgaagaagacacttgaatcatgggtgacgttaaaaattttctgtatgcctggtgtggcaaaaggaagatgaccccatcctatgaaattagagcagtggggaacaaaaacaggcagaaattcatgtgtgaggttcaggtggaaggttataattacactggcatgggaaattccaccaataaaaaagatgcacaaagcaatgctgccagagactttgttaactatttggttcgaataaatgaaataaagagtgaagaagttccagcttttggggtagcatctccgcccccacttactgatactcctgacactacagcaaatgctgaaggagatttaccaacaaccatgggaggacctcttcctccacatctggctctcaaagcagaaaataattctgaggtaggggcctctggctatggtgttcctgggcccacctgggaccgaggagccaacttgaaggattactactcaagaaaggaagaacaagaagtgcaagcgactctagaatcagaagaagtggatttaaatgctgggcttcatggaaactggaccttggaaaatgctaaagctcgtctaaaccaatattttcagaaagaaaagatccaaggagaatataagtacacccaagtgggtcctgatcacaacaggagctttattgcagaaatgaccatttatatcaagcagctgggcagaaggatttttgcacgagaacatggatcaaataagaaattggcagcacagtcctgtgccctgtcacttgtcagacaactgtaccatcttggagtggttgaagcttactccggacttacaaagaagaaggaaggagagacagtggagccttacaaagtaaacctctctcaagatttagagcatcagctgcaaaacatcattcaagagctaaatcttgagattttgcccccgcctgaagatccttctgtgccagttgcactcaacattggcaaattggctcagttcgaaccatctcagcgacaaaaccaagtgggtgtggttccttggtcacctccacaatccaactggaatccttggactagtagcaacattgatgaggggcctctggcttttgctactccagagcaaataagcatggacctcaagaatgaattgatgtaccagttggaacaggatcatgatttgcaagcaatcttgcaggagagagagttactgcctgtgaagaaatttgaaagtgagattctggaagcaatcagccaaaattcagttgtcattattagaggggctactggatgtgggaaaaccacacaggttccccagttcattctagatgactttatccagaatgaccgagcagcagagtgtaacatcgtagtaactcagcccagaagaatcagtgcggtttctgtggcagagcgagttgcatttgaaagaggagaagagcctggaaaaagctgtggctacagcgttcgatttgagtctatacttcctcgtcctcatgccagtataatgttttgtactgtaggtgtgctcctgagaaaattagaagcaggcattcgaggaatcagtcatgtaattgtagatgaaatacatgaaagagatattaatactgacttccttttggtagtactgcgtgatgttgttcaggcttatcctgaagttcgcattgttcttatgtctgctactattgataccagcatgttttgtgaatatttcttcaattgccccatcattgaagtttatgggaggacttacccagttcaagaatattttctggaagactgcattcagatgacccactttgttcctccaccaaaagacaaaaagaagaaggataaggatgatgatggtggtgaggatgatgatgcaaattgcaacttgatctgtggtgatgaatatggtccagaaacaaggttgagcatgtctcaattgaacgaaaaggaaactccttttgaactcatcgaggctctacttaagtacattgaaacccttaatgttcctggagctgtgttggtttttttgcctggctggaatctgatttatactatgcagaagcatttggaaatgaatccacattttggaagccatcggtatcagattctacccctgcattctcagattcctcgagaggaacagcgcaaagtgtttgatccagtaccagttggagtaaccaaggttattttgtccacaaatattgctgaaacaagcattaccataaacgatgttgtttatgtcattgactcctgcaagcagaaagtgaaactcttcactgctcacaacaatatgaccaactatgctaccgtatgggcatcaaaaacaaaccttgagcaacggaaagggcgagctggccgagtacggcctggattctgctttcacctgtgcagccgagctcgttttgagagacttgaaacccacatgacaccagagatgttccgaacaccattgcatgaaattgctcttagcataaaacttctgcgtctaggaggaattggccaatttctggccaaagcaattgaacctccccctttggatgctgtgattgaagcagaacacactcttagagagcttgatgcattagatgccaatgatgagttgactcctttgggacgaatcctggctaaactccccattgagcctcgttttggcaaaatgatgataatggggtgtattttctacgtgggagatgctatctgtaccattgctgctgctacctgctttccagagcctttcatcaatgaaggaaagcggctgggctatatccatcgaaattttgctggaaacagattttctgatcacgtagcccttttatcagtattccaagcctgggatgatgctagaatgggtggagaagaagcagagatacgtttttgtgagcacaaaagacttaatatggctacactaagaatgacctgggaagccaaagttcagctcaaagagattttgattaattctgggtttccagaagattgtttgttgacacaagtgtttactaacactggaccagataataatttggatgttgttatctccctcctggcctttggtgtgtaccccaatgtatgctatcataaggaaaagaggaagattctcaccactgaagggcgtaatgcacttatccacaaatcatctgttaattgtccttttagtagccaagacatgaagtacccatctcccttctttgtatttggtgaaaagattcgaactcgagccatctctgctaaaggcatgactttagtcacccccctgcagttgcttctctttgcctccaagaaagtccaatctgatgggcagattgtgcttgtagatgactggattaaactgcaaatatctcatgaagctgctgcctgtatcactggtctccgggcagccatggaggctttggttgttgaagtaaccaaacaacctgctatcatcagccagttggaccccgtaaatgaacgtatgctgaacatgatccgtcagatctctagaccctcagctgctggtatcaaccttatgattggcagtacacggtatggagatggtccacgtcctcccaagatggcccgatacgacaatggaagcggatatagaaggggaggttctagttacagtggtggaggctatggcggtggctatagcagtggaggctatggtagcggaggctatggtggcagcgccaactcctttcgggcaggatatggtgcaggtgttggtggaggctatagaggagtttcccgaggtggctttagaggcaactctggaggagactacagagggcctagtggaggctacagaggatctgggggattccagcgaggaggtggtaggggggcctatggaactggctacttggacattgaagaggaggtggcggctataaaacttggttatgtcagttctgtgtgtagacagtaaggaaaaaaaggcatgctatgtgttacgtgttttttccagtatgtttatttgccaccaaaaagtaaatgcattttcacccattctgtggttcattgtagtttaaggaaaccaagcatatagatgcattagtgattttgtttattttatgtaaaatataacgatcttcttttaaaaataccacagtttgtatttttctttaaggagtaaagatttgcctttaaataacttggtattttcctggctttcgtttaatacaatagaaaataaagtattacacggaattc

SEQ ID NO: 422815 - DNA, 1059 bp, Homo sapiens
  misc_feature (836)..(836): n is a, c, g, or t
  misc_feature (839)..(839): n is a, c, g, or t
  misc_feature (842)..(842): n is a, c, g, or t
  misc_feature (844)..(844): n is a, c, g, or t
  misc_feature (860)..(860): n is a, c, g, or t
  misc_feature (866)..(866): n is a, c, g, or t
  misc_feature (872)..(872): n is a, c, g, or t
  misc_feature (877)..(878): n is a, c, g, or t
  misc_feature (884)..(884): n is a, c, g, or t
  misc_feature (891)..(891): n is a, c, g, or t
agcgccgcggtcggagccatttcgccgattcctccatgcgagttgctgtgcgtttctctgttgtctcggtagaaggccagagtcacacacggtcctaagagctgggcaccaggaagcgaaggctgatctgaagaagacacttgaatcatgggtgacgttaaaaattttctgtatgcctggtgtggcaaaaggaagatgaccccatcctatgaaattagagcagtggggaacaaaaacaggcagaaattcatgtgtgaggttcaggtggaaggttataattacactggcatgggaaattccaccaataaaaaagatgcacaaagcaatgctgccagagactttgttaactatttggttcgaataaatgaaataaagagtgaagaagttccagcttttggggtagcatctccgcccccacttactgatactcctgacactacagcaaatgctgaaggagatttaccaacaaccatgggaggacctcttcctccacatctggctctcaaagcagaaaataattctgaggtaggggcctctggctatggtgttcctgggcccacctgggaccgaggagccaacttgaaggattactactcaagaaaggaagaacaagaagtgcaagcgactctagaatcagaagaagtggatttaaatgctgggcttcatggaaactggaccttggaaaatgctaaagctcgtctaaaccaatattttcagaaagaaaagatccaaggagaatataagtacacccaagtgggtcctgatcacaacaggagctttattgcagaaatgaccatttatatcaagcagctgggcagaaggattttggcgagacntgntcncntagaattggggccagnctgtgncgtctngtgannactgtncactggngtggtgaactatccggatcaaaaaacagaggaacaaggagctctaagaacttcagatttagtagacgaaatcaagatatatgcccgagatgtgcctgcactaggaggataaactacaagagtgtggccacacgtggaaagagggcaagcaaacgcgagagaagagaca

SEQ ID NO: 422816 - DNA, 642 bp, Homo sapiens
aacattcgcgattttggataattttttcatttttcttctcagcctaaaaggctatcaagctgtgaggataagtcagaaaccactatgcaaccagattaaattttgtcaacagtgtgtatagtgaacgataaaaggtccgatggtaattgtaaaataaaaggatgaggaaaaggcagctctgtatccctgattaccttgctgcaaaaagtttattaacatctgtgtatacacaaggaggatggttattttatgcttattttctcttagacttgaaacccacatgacaccagagatgttccgaacaccattgcatgaaattgctcttagcataaaacttctgcgtctaggaggaattggccaatttctggccaaagcaattgaacctccccctttggatgctgtgattgaagcagaacacactcttagaggtacttacaaatacaaacctacttgacgcagatattaatcataccatctgtcttgttctggcagataacacttacaaatgaatcaagatgatgaagatgtagtcaacagggctgtgataataatagtaaggcctccagtcttaccttagatagttagtatagtcactgttctaatgagcaatgagaaggaagaaagggacaatgtgagtcttta

SEQ ID NO: 422817 - DNA, 1112 bp, Homo sapiens
gtacaagcggtatctcctgcctcagctgggatcacaggcagcccagcagcgatgacctggcagattaaggtattaagtagtagagatggggtacatcatgctggccaggctggtctgaaactcctgattcgaactcgagccatctctgctaaaggcatgactttagtcacccccctgcagttgcttctctttgcctccaagaaagtccaatctgatgggcagattgtgcttgtagatgactggattaaactgcaaatatctcatgaagctgctgcctgtatcactggtctccgggcagccatggaggctttggttgttgaagtaaccaaacaacctgctatcatcagccagttggaccccgtaaatgaacgtatgctgaacatgatccgtcagatctctagaccctcagctgctggtatcaaccttatgattggcagtacacggtatggagatggtccacgtcctcccaagatggcccgatacgacaatggaagcggatatagaaggggaggttctagttacagtggtggaggctatggcggtggctatagcagtggaggctatggtagcggaggctatggtggcagcgccaactcctttcgggcaggatatggtgcaggtgttggtggaggctatagaggagtttcccgaggtggctttagaggcaactctggaggagactacagagggcctagtggaggctacagaggatctgggggattccagcgaggaggtggtaggggggcctatggaactggctacttggacattgaagaggaggtggcggctataaaacttggttatgtcagttctgtgtgtagacagtaaggaaaaaaaggcatgctatgtgttacgtgttttttccagtatgtttatttgccaccaaaaagtaaatgcattttcacccattctgtggttcattgtagtttaaggaaaccaagcatatagatgcattagtgattttgtttattttatgtaaaatataacgatcttcttttaaaaataccacagtttgtatttttctttaaggagtaaagatttgcctttaaataacttggtattttcctggctttcgtttaatacaatagaaaataaagtattacacggaattc

SEQ ID NO: 422818 - DNA, 680 bp, Homo sapiens
  misc_feature (473)..(473): n is a, c, g, or t
  misc_feature (680)..(680): n is a, c, g, or t
ctaatgtgaacactgatttatttaaaaaatactacagaggacagatttggattcaaaaaaaaccacagagaatcatatacagaaacaaaatgcactggaccccgagaagcagagggggagccaccacaggcccccgagggggcagggcaggacgctatgcacacgccacttagaaaagagcgtctataaaagatgcataccaagagatacgtgtaaaatatagtggcacatcacgttaacaaaaggaagggaccagtacctcatggagacaggcagtcgggggacctgggtgggcgctttgctctgtcttcaaggccgctgtcggtgactagtgcctccctccggctgcgtcacagccgtcgggggcaaagaggtgatgtgctgtaagaaccgcataaaacgatccagaggaaaccatttctatcagacgtgccgaattcggcacgagatgcagaagcatttggaaatgaatncacattttggaagccatcggtatcagattctacccctgcattctcagattcctcgagaggaacagcgcaaagtgtttgatccagtaccagttggagtaaccaaggttattttgtccacaaatattgctgaaacaagcattaccataaacgatgttgtttatgtcattgactcctgcaagtacctgctttcagaggctttaataatgn

SEQ ID NO: 422819 - DNA, 325 bp, Homo sapiens
caaaaatgctaataaacaagtatatctaactttgtagttgttaagtcacttttctttttttctgtctcagcccagaagaatcagtgcggtttctgtggcagagcgagttgcatttgaaagaggagaagagcctggaaaaagctgtggctacagcgttcgatttgagtctatacttcctcgtcctcatgccagtataatgttttgtactgtaggtgtgctcctgagaaaattagaagcaggcattcgaggaatcagtcatgtaattgtagatgaaatacatgaaagagatattaatgtaagtaacttgagaggtacagtaaggtac

SEQ ID NO: 422820 - DNA, 3681 bp, Homo sapiens
agcgccgcggtcggagccatttcgccgattcctccatgcgagttgctgtgcgtttctctgttgtctcggtagaaggccagagtcacacacggtcctaagagctgggcaccaggaagcgaaggctgatctgaagaagacacttgaatcatgggtgacgttaaaaattttctgtatgcctggtgtggcaaaaggaagatgaccccatcctatgaaattagagcagtggggaacaaaaacaggcagaaattcatgtgtgaggttcaggtggaaggttataattacactggcatgggaaattccaccaataaaaaagatgcacaaagcaatgctgccagagactttgttaactatttggttcgaataaatgaaataaagagtgaagaagttccagcttttggggtagcatctccgcccccacttactgatactcctgacactacagcaaatgctgaaggagatttaccaacaaccatgggaggacctcttcctccacatctggctctcaaagcagaaaataattctgaggtaggggcctctggctatggtgttcctgggcccacctgggaccgaggagccaacttgaaggattactactcaagaaaggaagaacaagaagtgcaagcgactctagaatcagaagaagtggatttaaatgctgggcttcatggaaactggaccttggaaaatgctaaagctcgtctaaaccaatattttcagaaagaaaagatccaaggagaatataagtacacccaagtgggtcctgatcacaacaggagctttattgcagaaatgaccatttatatcaagcagctgggcagaaggatttttgcacgagaacatggatcaaataagaaattggcagcacagtcctgtgccctgtcacttgtcagacaactgtaccatcttggagtggttgaagcttactccggacttacaaagaagaaggaaggagagacagtggagccttacaaagtaaacctctctcaagatttagagcatcagctgcaaaacatcattcaagagctaaatcttgagattttgcccccgcctgaagatccttctgtgccagttgcactcaacattggcaaattggctcagttcgaaccatctcagcgacaaaaccaagtgggtgtggttccttggtcacctccacaatccaactggaatccttggactagtagcaacattgatgaggggcctctggcttttgctactccagagcaaataagcatggacctcaagaatgaattgatgtaccagttggaacaggatcatgatttgcaagcaatcttgcaggagagagagttactgcctgtgaagaaatttgaaagtgagattctggaagcaatcagccaaaattcagttgtcattattagaggggctactggatgtgggaaaaccacacaggttccccagttcattctagatgactttatccagaatgaccgagcagcagagtgtaacatcgtagtaactcagcccagaagaatcagtgcggtttctgtggcagagcgagttgcatttgaaagaggagaagagcctggaaaaagctgtggctacagcgttcgatttgagtctatacttcctcgtcctcatgccagtataatgttttgtactgtaggtgtgctcctgagaaaattagaagcaggcattcgaggaatcagtcatgtaattgtagatgaaatacatgaaagagatattaatactgacttccttttggtagtactgcgtgatgttgttcaggcttatcctgaagttcgcattgttcttatgtctgctactattgataccagcatgttttgtgaatatttcttcaattgccccatcattgaagtttatgggaggacttacccagttcaagaatattttctggaagactgcattcagatgacccactttgttcctccaccaaaagacaaaaagaagaaggataaggatgatgatggtggtgaggatgatgatgcaaattgcaacttgatctgtggtgatgaatatggtccagaaacaaggttgagcatgtctcaattgaacgaaaaggaaactccttttgaactcatcgaggctctacttaagtacattgaaacccttaatgttcctggagctgtgttggtttttttgcctggctggaatctgatttatactatgcagaagcatttggaaatgaatccacattttggaagccatcggtatcagattctacccctgcattctcagattcctcgagaggaacagcgcaaagtgtttgatccagtaccagttggagtaaccaaggttattttgtccacaaatattgctgaaacaagcattaccataaacgatgttgtttatgtcattgactcctgcaagcagaaagtgaaactcttcactgctcacaacaatatgaccaactatgctaccgtatgggcatcaaaaacaaaccttgagcaacggaaagggcgagctggccgagtacggcctggattctgctttcacctgtgcagccgagctcgttttgagagacttgaaacccacatgacaccagagatgttccgaacaccattgcatgaaattgctcttagcataaaacttctgcgtctaggaggaattggccaatttctggccaaagcaattgaacctccccctttggatgctgtgattgaagcagaacacactcttagagagcttgatgcattagatgccaatgatgagttgactcctttgggacgaatcctggctaaactccccattgagcctcgttttggcaaaatgatgataatggggtgtattttctacgtgggagatgctatctgtaccattgctgctgctacctgctttccagagcctttcatcaatgaaggaaagcggctgggctatatccatcgaaattttgctggaaacagattttctgatcacgtagcccttttatcagtattccaagcctgggatgatgctagaatgggtggagaagaagcagagatacgtttttgtgagcacaaaagacttaatatggctacactaagaatgacctgggaagccaaagttcagctcaaagagattttgattaattctgggtttccagaagattgtttgttgacacaagtgtttactaacactggaccagataataatttggatgttgttatctccctcctggcctttggtgtgtaccccaatgtatgctatcataaggaaaagaggaagattctcaccactgaagggcgtaatgcacttatccacaaatcatctgttaattgtccttttagtagccaagacatgaagtacccatctcccttctttgtatttggtgaaaagattcgaactcgagccatctctgctaaaggcatgactttagtcacccccctgcagttgcttctctttgcctccaagaaagtccaatctgatgggcagattgtgcttgtagatgactggattaaactgcaaatatctcatgaagctgctgcctgtatcactggtctccgggcagccatggaggctttggttgttgaagtaaccaaacaacctgctatcatcagccagttggaccccgtaaatgaacgtatgctgaacatgatccgtcagatctctagaccctcagctgctggtatcaaccttatgattggcagtacacggtatggagatggtccacgtcctccccttctatatccgcttccattgtcgtatcgggccatcttggggtcgacg

SEQ ID NO: 422821 - DNA, 3170 bp, Homo sapiens
agcgccgcggtcggagccatttcgccgattcctccatgcgagttgctgtgcgtttctctgttgtctcggtagaaggccagagtcacacacggtcctaagagctgggcaccaggaagcgaaggctgatctgaagaagacacttgaatcatgggtgacgttaaaaattttctgtatgcctggtgtggcaaaaggaagatgaccccatcctatgaaattagagcagtggggaacaaaaacaggcagaaattcatgtgtgaggttcaggtggaaggttataattacactggcatgggaaattccaccaataaaaaagatgcacaaagcaatgctgccagagactttgttaactatttggttcgaataaatgaaataaagagtgaagaagttccagcttttggggtagcatctccgcccccacttactgatactcctgacactacagcaaatgctgaaggagatttaccaacaaccatgggaggacctcttcctccacatctggctctcaaagcagaaaataattctgaggtaggggcctctggctatggtgttcctgggcccacctgggaccgaggagccaacttgaaggattactactcaagaaaggaagaacaagaagtgcaagcgactctagaatcagaagaagtggatttaaatgctgggcttcatggaaactggaccttggaaaatgctaaagctcgtctaaaccaatattttcagaaagaaaagatccaaggagaatataagtacacccaagtgggtcctgatcacaacaggagctttattgcagaaatgaccatttatatcaagcagctgggcagaaggatttttgcacgagaacatggatcaaataagaaattggcagcacagtcctgtgccctgtcacttgtcagacaactgtaccatcttggagtggttgaagcttactccggacttacaaagaagaaggaaggagagacagtggagccttacaaagtaaacctctctcaagatttagagcatcagctgcaaaacatcattcaagagctaaatcttgagattttgcccccgcctgaagatccttctgtgccagttgcactcaacattggcaaattggctcagttcgaaccatctcagcgacaaaaccaagtgggtgtggttccttggtcacctccacaatccaactggaatccttggactagtagcaacattgatgaggggcctctggcttttgctactccagagcaaataagcatggacctcaagaatgaattgatgtaccagttggaacaggatcatgatttgcaagcaatcttgcaggagagagagttactgcctgtgaagaaatttgaaagtgagattctggaagcaatcagccaaaattcagttgtcattattagaggggctactggatgtgggaaaaccacacaggttccccagttcattctagatgactttatccagaatgaccgagcagcagagtgtaacatcgtagtaactcagcccagaagaatcagtgcggtttctgtggcagagcgagttgcatttgaaagaggagaagagcctggaaaaagctgtggctacagcgttcgatttgagtctatacttcctcgtcctcatgccagtataatgttttgtactgtaggtgtgctcctgagaaaattagaagcaggcattcgaggaatcagtcatgtaattgtagatgaaatacatgaaagagatattaatactgacttccttttggtagtactgcgtgatgttgttcaggcttatcctgaagttcgcattgttcttatgtctgctactattgataccagcatgttttgtgaatatttcttcaattgccccatcattgaagtttatgggaggacttacccagttcaagaatattttctggaagactgcattcagatgacccactttgttcctccaccaaaagacaaaaagaagaaggataaggatgatgatggtggtgaggatgatgatgcaaattgcaacttgatctgtggtgatgaatatggtccagaaacaaggttgagcatgtctcaattgaacgaaaaggaaactccttttgaactcatcgaggctctacttaagtacattgaaacccttaatgttcctggagctgtgttggtttttttgcctggctggaatctgatttatactatgcagaagcatttggaaatgaatccacattttggaagccatcggtatcagattctacccctgcattctcagattcctcgagaggaacagcgcaaagtgtttgatccagtaccagttggagtaaccaaggttattttgtccacaaatattgctgaaacaagcattaccataaacgatgttgtttatgtcattgactcctgcaagcagaaagtgaaactcttcactgctcacaacaatatgaccaactatgctaccgtatgggcatcaaaaacaaaccttgagcaacggaaagggcgagctggccgagtacggcctggattctgctttcacctgtgcagccgagctcgttttgagagacttgaaacccacatgacaccagagatgttccgaacaccattgcatgaaattgctcttagcataaaacttctgcgtctaggaggaattggccaatttctggccaaagcaattgaacctccccctttggatgctgtgattgaagcagaacacactcttagagagcttgatgcattagatgccaatgatgagttgactcctttgggacgaatcctggctaaactccccattgagcctcgttttggcaaaatgatgataatggggtgtattttctacgtgggagatgctatctgtaccattgctgctgctacctgctttccagagcctttcatcaatgaaggaaagcggctgggctatatccatcgaaattttgctggaaacagattttctgatcacgtagcccttttatcagtattccaagcctgggatgatgctagaatgggtggagaagaagcagagatacgtttttgtgagcacaaaagacttaatatggctacactaagaatgacctgggaagccaaagttcagctcaaagagattttgattaattctgggtttccagaagatgttgttgccccggtgtttctacctggccgatatattgggtgtgtttttcctcggcttgggttgccaggtgcttctaggaggggggttccctgggggttgcttccatc

SEQ ID NO: 422822 - DNA, 4523 bp, Homo sapiens
ggctgggggtgggggaagggacgagccgcccgcgggtccccggattgcgggttgcgtgcgcgcctcgccgcgatgcgcttgcgccgtccgggcagcctgtggccccctcccctctcctccgcccagcgtttcccgctgctgcctctagcaggcaaagcgcgcttcctcctctggcctgcgtacgccggggcaccgcggcggctgagggaagggggtgcttcgcctgtggtggttgccgccggggcgccactggcctagggctcttcattcattcaagccacgaataactggcgccgtcgtgcaggccttgtgggtagaggaaaaaaaattgaagaatgtaaagggagagcgcctttggctagtatagcgagatctgaagaagacacttgaatcatgggtgacgttaaaaattttctgtatgcctggtgtggcaaaaggaagatgaccccatcctatgaaattagagcagtggggaacaaaaacaggcagaaattcatgtgtgaggttcaggtggaaggttataattacactggcatgggaaattccaccaataaaaaagatgcacaaagcaatgctgccagagactttgttaactatttggttcgaataaatgaaataaagagtgaagaagttccagcttttggggtagcatctccgcccccacttactgatactcctgacactacagcaaatgctgaaggagatttaccaacaaccatgggaggacctcttcctccacatctggctctcaaagcagaaaataattctgaggtaggggcctctggctatggtgttcctgggcccacctgggaccgaggagccaacttgaaggattactactcaagaaaggaagaacaagaagtgcaagcgactctagaatcagaagaagtggatttaaatgctgggcttcatggaaactggaccttggaaaatgctaaagctcgtctaaaccaatattttcagaaagaaaagatccaaggagaatataagtacacccaagtgggtcctgatcacaacaggagctttattgcagaaatgaccatttatatcaagcagctgggcagaaggatttttgcacgagaacatggatcaaataagaaattggcagcacagtcctgtgccctgtcacttgtcagacaactgtaccatcttggagtggttgaagcttactccggacttacaaagaagaaggaaggagagacagtggagccttacaaagtaaacctctctcaagatttagagcatcagctgcaaaacatcattcaagagctaaatcttgagattttgcccccgcctgaagatccttctgtgccagttgcactcaacattggcaaattggctcagttcgaaccatctcagcgacaaaaccaagtgggtgtggttccttggtcacctccacaatccaactggaatccttggactagtagcaacattgatgaggggcctctggcttttgctactccagagcaaataagcatggacctcaagaatgaattgatgtaccagttggaacaggatcatgatttgcaagcaatcttgcaggagagagagttactgcctgtgaagaaatttgaaagtgagattctggaagcaatcagccaaaattcagttgtcattattagaggggctactggatgtgggaaaaccacacaggttccccagttcattctagatgactttatccagaatgaccgagcagcagagtgtaacatcgtagtaactcagcccagaagaatcagtgcggtttctgtggcagagcgagttgcatttgaaagaggagaagagcctggaaaaagctgtggctacagcgttcgatttgagtctatacttcctcgtcctcatgccagtataatgttttgtactgtaggtgtgctcctgagaaaattagaagcaggcattcgaggaatcagtcatgtaattgtagatgaaatacatgaaagagatattaatactgacttccttttggtagtactgcgtgatgttgttcaggcttatcctgaagttcgcattgttcttatgtctgctactattgataccagcatgttttgtgaatatttcttcaattgccccatcattgaagtttatgggaggacttacccagttcaagaatattttctggaagactgcattcagatgacccactttgttcctccaccaaaagacaaaaagaagaaggataaggatgatgatggtggtgaggatgatgatgcaaattgcaacttgatctgtggtgatgaatatggtccagaaacaaggttgagcatgtctcaattgaacgaaaaggaaactccttttgaactcatcgaggctctacttaagtacattgaaacccttaatgttcctggagctgtgttggtttttttgcctggctggaatctgatttatactatgcagaagcatttggaaatgaatccacattttggaagccatcggtatcagattctacccctgcattctcagattcctcgagaggaacagcgcaaagtgtttgatccagtaccagttggagtaaccaaggttattttgtccacaaatattgctgaaacaagcattaccataaacgatgttgtttatgtcattgactcctgcaagcagaaagtgaaactcttcactgctcacaacaatatgaccaactatgctaccgtatgggcatcaaaaacaaaccttgagcaacggaaagggcgagctggccgagtacggcctggattctgctttcacctgtgcagccgagctcgttttgagagacttgaaacccacatgacaccagagatgttccgaacaccattgcatgaaattgctcttagcataaaacttctgcgtctaggaggaattggccaatttctggccaaagcaattgaacctccccctttggatgctgtgattgaagcagaacacactcttagagagcttgatgcattagatgccaatgatgagttgactcctttgggacgaatcctggctaaactccccattgagcctcgttttggcaaaatgatgataatggggtgtattttctacgtgggagatgctatctgtaccattgctgctgctacctgctttccagagcctttcatcaatgaaggaaagcggctgggctatatccatcgaaattttgctggaaacagattttctgatcacgtagcccttttatcagtattccaagcctgggatgatgctagaatgggtggagaagaagcagagatacgtttttgtgagcacaaaagacttaatatggctacactaagaatgacctgggaagccaaagttcagctcaaagagattttgattaattctgggtttccagaagattgtttgttgacacaagtgtttactaacactggaccagataataatttggatgttgttatctccctcctggcctttggtgtgtaccccaatgtatgctatcataaggaaaagaggaagattctcaccactgaagggcgtaatgcacttatccacaaatcatctgttaattgtccttttagtagccaagacatgaagtacccatctcccttctttgtatttggtgaaaagattcgaactcgagccatctctgctaaaggcatgactttagtcacccccctgcagttgcttctctttgcctccaagaaagtccaatctgatgggcagattgtgcttgtagatgactggattaaactgcaaatatctcatgaagctgctgcctgtatcactggtctccgggcagccatggaggctttggttgttgaagtaaccaaacaacctgctatcatcagccagttggaccccgtaaatgaacgtatgctgaacatgatccgtcagatctctagaccctcagctgctggtatcaaccttatgattggcagtacacggtatggagatggtccacgtcctcccaagatggcccgatacgacaatggaagcggatatagaaggggaggttctagttacagtggtggaggctatggcggtggctatagcagtggaggctatggtagcggaggctatggtggcagcgccaactcctttcgggcaggatatggtgcaggtgttggtggaggctatagaggagtttcccgaggtggctttagaggcaactctggaggagactacagagggcctagtggaggctacagaggatctgggggattccagcgaggaggtggtaggggggcctatggaactggctacttggacattgaagaggaggtggcggctataaaacttggttatgtcagttctgtgtgtagacagtaaggaaaaaaaggcatgctatgtgttacgtgttttttccagtatgtttatttgccaccaaaaagtaaatgcattttcacccattctgtggttcattgtagtttaaggaaaccaagcatatagatgcattagtgattttgtttattttatgtaaaatataacgatcttcttttaaaaataccacagtttgtatttttctttaaggagtaaagatttgcctttaaataacttggtattttcctggctttcgtttaatacaatagaaaataaagtattacacggaattc

SEQ ID NO: 422823 - DNA, 4414 bp, Homo sapiens
agcgccgcggtcggagccatttcgccgattcctccatgcgagttgctgtgcgtttctctgttgtctcggtagaaggccagagtcacacacggtcctaagagctgggcaccaggaagcgaaggctgatctgaagaagacacttgaatcatgggtgacgttaaaaattttctgtatgcctggtgtggcaaaaggaagatgaccccatcctatgaaattagagcagtggggaacaaaaacaggcagaaattcatgtgtgaggttcaggtggaaggttataattacactggcatgggaaattccaccaataaaaaagatgcacaaagcaatgctgccagagactttgttaactatttggttcgaataaatgaaataaagagtgaagaagttccagcttttggggtagcatctccgcccccacttactgatactcctgacactacagcaaatgctgaaggagatttaccaacaaccatgggaggacctcttcctccacatctggctctcaaagcagaaaataattctgaggtaggggcctctggctatggtgttcctgggcccacctgggaccgaggagccaacttgaaggattactactcaagaaaggaagaacaagaagtgcaagcgactctagaatcagaagaagtggatttaaatgctgggcttcatggaaactggaccttggaaaatgctaaagctcgtctaaaccaatattttcagaaagaaaagatccaaggagaatataagtacacccaagtgggtcctgatcacaacaggtggaggagaatgagattgagtgctgactttaagcctggctgagaaacatactggcatcgatgtcattaatgaaagggtggatgttgttcccctgaaagccagtggcctttgacccctgaagccgctgtgcctgaaggagctttattgcagaaatgaccatttatatcaagcagctgggcagaaggatttttgcacgagaacatggatcaaataagaaattggcagcacagtcctgtgccctgtcacttgtcagacaactgtaccatcttggagtggttgaagcttactccggacttacaaagaagaaggaaggagagacagtggagccttacaaagtaaacctctctcaagatttagagcatcagctgcaaaacatcattcaagagctaaatcttgagattttgcccccgcctgaagatccttctgtgccagttgcactcaacattggcaaattggctcagttcgaaccatctcagcgacaaaaccaagtgggtgtggttccttggtcacctccacaatccaactggaatccttggactagtagcaacattgatgaggggcctctggcttttgctactccagagcaaataagcatggacctcaagaatgaattgatgtaccagttggaacaggatcatgatttgcaagcaatcttgcaggagagagagttactgcctgtgaagaaatttgaaagtgagattctggaagcaatcagccaaaattcagttgtcattattagaggggctactggatgtgggaaaaccacacaggttccccagttcattctagatgactttatccagaatgaccgagcagcagagtgtaacatcgtagtaactcagcccagaagaatcagtgcggtttctgtggcagagcgagttgcatttgaaagaggagaagagcctggaaaaagctgtggctacagcgttcgatttgagtctatacttcctcgtcctcatgccagtataatgttttgtactgtaggtgtgctcctgagaaaattagaagcaggcattcgaggaatcagtcatgtaattgtagatgaaatacatgaaagagatattaatactgacttccttttggtagtactgcgtgatgttgttcaggcttatcctgaagttcgcattgttcttatgtctgctactattgataccagcatgttttgtgaatatttcttcaattgccccatcattgaagtttatgggaggacttacccagttcaagaatattttctggaagactgcattcagatgacccactttgttcctccaccaaaagacaaaaagaagaaggataaggatgatgatggtggtgaggatgatgatgcaaattgcaacttgatctgtggtgatgaatatggtccagaaacaaggttgagcatgtctcaattgaacgaaaaggaaactccttttgaactcatcgaggctctacttaagtacattgaaacccttaatgttcctggagctgtgttggtttttttgcctggctggaatctgatttatactatgcagaagcatttggaaatgaatccacattttggaagccatcggtatcagattctacccctgcattctcagattcctcgagaggaacagcgcaaagtgtttgatccagtaccagttggagtaaccaaggttattttgtccacaaatattgctgaaacaagcattaccataaacgatgttgtttatgtcattgactcctgcaagcagaaagtgaaactcttcactgctcacaacaatatgaccaactatgctaccgtatgggcatcaaaaacaaaccttgagcaacggaaagggcgagctggccgagtacggcctggattctgctttcacctgtgcagccgagctcgttttgagagacttgaaacccacatgacaccagagatgttccgaacaccattgcatgaaattgctcttagcataaaacttctgcgtctaggaggaattggccaatttctggccaaagcaattgaacctccccctttggatgctgtgattgaagcagaacacactcttagagagcttgatgcattagatgccaatgatgagttgactcctttgggacgaatcctggctaaactccccattgagcctcgttttggcaaaatgatgataatggggtgtattttctacgtgggagatgctatctgtaccattgctgctgctacctgctttccagagcctttcatcaatgaaggaaagcggctgggctatatccatcgaaattttgctggaaacagattttctgatcacgtagcccttttatcagtattccaagcctgggatgatgctagaatgggtggagaagaagcagagatacgtttttgtgagcacaaaagacttaatatggctacactaagaatgacctgggaagccaaagttcagctcaaagagattttgattaattctgggtttccagaagattgtttgttgacacaagtgtttactaacactggaccagataataatttggatgttgttatctccctcctggcctttggtgtgtaccccaatgtatgctatcataaggaaaagaggaagattctcaccactgaagggcgtaatgcacttatccacaaatcatctgttaattgtccttttagtagccaagacatgaagtacccatctcccttctttgtatttggtgaaaagattcgaactcgagccatctctgctaaaggcatgactttagtcacccccctgcagttgcttctctttgcctccaagaaagtccaatctgatgggcagattgtgcttgtagatgactggattaaactgcaaatatctcatgaagctgctgcctgtatcactggtctccgggcagccatggaggctttggttgttgaagtaaccaaacaacctgctatcatcagccagttggaccccgtaaatgaacgtatgctgaacatgatccgtcagatctctagaccctcagctgctggtatcaaccttatgattggcagtacacggtatggagatggtccacgtcctcccaagatggcccgatacgacaatggaagcggatatagaaggggaggttctagttacagtggtggaggctatggcggtggctatagcagtggaggctatggtagcggaggctatggtggcagcgccaactcctttcgggcaggatatggtgcaggtgttggtggaggctatagaggagtttcccgaggtggctttagaggcaactctggaggagactacagagggcctagtggaggctacagaggatctgggggattccagcgaggaggtggtaggggggcctatggaactggctacttggacattgaagaggaggtggcggctataaaacttggttatgtcagttctgtgtgtagacagtaaggaaaaaaaggcatgctatgtgttacgtgttttttccagtatgtttatttgccaccaaaaagtaaatgcattttcacccattctgtggttcattgtagtttaaggaaaccaagcatatagatgcattagtgattttgtttattttatgtaaaatataacgatcttcttttaaaaataccacagtttgtatttttctttaaggagtaaagatttgcctttaaataacttggtattttcctggctttcgtttaatacaatagaaaataaagtattacacggaattc

SEQ ID NO: 422824 - DNA, 2838 bp, Homo sapiens
agcgccgcggtcggagccatttcgccgattcctccatgcgagttgctgtgcgtttctctgttgtctcggtagaaggccagagtcacacacggtcctaagagctgggcaccaggaagcgaaggctgatctgaagaagacacttgaatcatgggtgacgttaaaaattttctgtatgcctggtgtggcaaaaggaagatgaccccatcctatgaaattagagcagtggggaacaaaaacaggcagaaattcatgtgtgaggttcaggtggaaggttataattacactggcatgggaaattccaccaataaaaaagatgcacaaagcaatgctgccagagactttgttaactatttggttcgaataaatgaaataaagagtgaagaagttccagcttttggggtagcatctccgcccccacttactgatactcctgacactacagcaaatgctgaaggagatttaccaacaaccatgggaggacctcttcctccacatctggctctcaaagcagaaaataattctgaggtaggggcctctggctatggtgttcctgggcccacctgggaccgaggagccaacttgaaggattactactcaagaaaggaagaacaagaagtgcaagcgactctagaatcagaagaagtggatttaaatgctgggcttcatggaaactggaccttggaaaatgctaaagctcgtctaaaccaatattttcagaaagaaaagatccaaggagaatataagtacacccaagtgggtcctgatcacaacaggagctttattgcagaaatgaccatttatatcaagcagctgggcagaaggatttttgcacgagaacatggatcaaataagaaattggcagcacagtcctgtgccctgtcacttgtcagacaactgtaccatcttggagtggttgaagcttactccggacttacaaagaagaaggaaggagagacagtggagccttacaaagtaaacctctctcaagatttagagcatcagctgcaaaacatcattcaagagctaaatcttgagattttgcccccgcctgaagatccttctgtgccagttgcactcaacattggcaaattggctcagttcgaaccatctcagcgacaaaaccaagtgggtgtggttccttggtcacctccacaatccaactggaatccttggactagtagcaacattgatgaggggcctctggcttttgctactccagagcaaataagcatggacctcaagaatgaattgatgtaccagttggaacaggatcatgatttgcaagcaatcttgcaggagagagagttactgcctgtgaagaaatttgaaagtgagattctggaagcaatcagccaaaattcagttgtcattattagaggggctactggatgtgggaaaaccacacaggttccccagttcattctagatgactttatccagaatgaccgagcagcagagtgtaacatcgtagtaactcagcccagaagaatcagtgcggtttctgtggcagagcgagttgcatttgaaagaggagaagagcctggaaaaagctgtggctacagcgttcgatttgagtctatacttcctcgtcctcatgccagtataatgttttgtactgtaggtgtgctcctgagaaaattagaagcaggcattcgaggaatcagtcatgtaattgtagatgaaatacatgaaagagatattaatactgacttccttttggtagtactgcgtgatgttgttcaggcttatcctgaagttcgcattgttcttatgtctgctactattgataccagcatgttttgtgaatatttcttcaattgccccatcattgaagtttatgggaggacttacccagttcaagaatattttctggaagactgcattcagatgacccactttgttcctccaccaaaagacaaaaagaagaaggataaggatgatgatggtggtgaggatgatgatgcaaattgcaacttgatctgtggtgatgaatatggtccagaaacaaggttgagcatgtctcaattgaacgaaaaggaaactccttttgaactcatcgaggctctacttaagtacattgaaacccttaatgttcctggagctgtgttggtttttttgcctggctggaatctgatttatactatgcagaagcatttggaaatgaatccacattttggaagccatcggtatcagattctacccctgcattctcagattcctcgagaggaacagcgcaaagtgtttgatccagtaccagttggagtaaccaaggttattttgtccacaaatattgctgaaacaagcattaccataaacgatgttgtttatgtcattgactcctgcaagcagaaagtgaaactcttcactgctcacaacaatatgaccaactatgctaccgtatgggcatcaaaaacaaaccttgagcaacggaaagggcgagctggccgagtacggcctggattctgctttcacctgtgcagccgagctcgttttgagagacttgaaacccacatgacaccagagatgttccgaacaccattgcatgaaattgctcttagcataaaacttctgcgtctaggaggaattggccaatttctggccaaagcaattgaacctccccctttggatgctgtgattgaagcagaacacactcttagagagcttgatgcattagatgccaatgatgagttgactcctttgggacgaatcctggctaaactccccattgagcctcgttttggcaaaatgatgataatggggtgtattttctacgtgggagatgctatctgtaccattgctgctgctacctgccgctttccttcattgatgaaaggctct

SEQ ID NO: 422825 - DNA, 2873 bp, Homo sapiens
agcgccgcggtcggagccatttcgccgattcctccatgcgagttgctgtgcgtttctctgttgtctcggtagaaggccagagtcacacacggtcctaagagctgggcaccaggaagcgaaggctgatctgaagaagacacttgaatcatgggtgacgttaaaaattttctgtatgcctggtgtggcaaaaggaagatgaccccatcctatgaaattagagcagtggggaacaaaaacaggcagaaattcatgtgtgaggttcaggtggaaggttataattacactggcatgggaaattccaccaataaaaaagatgcacaaagcaatgctgccagagactttgttaactatttggttcgaataaatgaaataaagagtgaagaagttccagcttttggggtagcatctccgcccccacttactgatactcctgacactacagcaaatgctgaaggagatttaccaacaaccatgggaggacctcttcctccacatctggctctcaaagcagaaaataattctgaggtaggggcctctggctatggtgttcctgggcccacctgggaccgaggagccaacttgaaggattactactcaagaaaggaagaacaagaagtgcaagcgactctagaatcagaagaagtggatttaaatgctgggcttcatggaaactggaccttggaaaatgctaaagctcgtctaaaccaatattttcagaaagaaaagatccaaggagaatataagtacacccaagtgggtcctgatcacaacaggagctttattgcagaaatgaccatttatatcaagcagctgggcagaaggatttttgcacgagaacatggatcaaataagaaattggcagcacagtcctgtgccctgtcacttgtcagacaactgtaccatcttggagtggttgaagcttactccggacttacaaagaagaaggaaggagagacagtggagccttacaaagtaaacctctctcaagatttagagcatcagctgcaaaacatcattcaagagctaaatcttgagattttgcccccgcctgaagatccttctgtgccagttgcactcaacattggcaaattggctcagttcgaaccatctcagcgacaaaaccaagtgggtgtggttccttggtcacctccacaatccaactggaatccttggactagtagcaacattgatgaggggcctctggcttttgctactccagagcaaataagcatggacctcaagaatgaattgatgtaccagttggaacaggatcatgatttgcaagcaatcttgcaggagagagagttactgcctgtgaagaaatttgaaagtgagattctggaagcaatcagccaaaattcagttgtcattattagaggggctactggatgtgggaaaaccacacaggttccccagttcattctagatgactttatccagaatgaccgagcagcagagtgtaacatcgtagtaactcagcccagaagaatcagtgcggtttctgtggcagagcgagttgcatttgaaagaggagaagagcctggaaaaagctgtggctacagcgttcgatttgagtctatacttcctcgtcctcatgccagtataatgttttgtactgtaggtgtgctcctgagaaaattagaagcaggcattcgaggaatcagtcatgtaattgtagatgaaatacatgaaagagatattaatactgacttccttttggtagtactgcgtgatgttgttcaggcttatcctgaagttcgcattgttcttatgtctgctactattgataccagcatgttttgtgaatatttcttcaattgccccatcattgaagtttatgggaggacttacccagttcaagaatattttctggaagactgcattcagatgacccactttgttcctccaccaaaagacaaaaagaagaaggataaggatgatgatggtggtgaggatgatgatgcaaattgcaacttgatctgtggtgatgaatatggtccagaaacaaggttgagcatgtctcaattgaacgaaaaggaaactccttttgaactcatcgaggctctacttaagtacattgaaacccttaatgttcctggagctgtgttggtttttttgcctggctggaatctgatttatactatgcagaagcatttggaaatgaatccacattttggaagccatcggtatcagattctacccctgcattctcagattcctcgagaggaacagcgcaaagtgtttgatccagtaccagttggagtaaccaaggttattttgtccacaaatattgctgaaacaagcattaccataaacgatgttgtttatgtcattgactcctgcaagcagaaagtgaaactcttcactgctcacaacaatatgaccaactatgctaccgtatgggcatcaaaaacaaaccttgagcaacggaaagggcgagctggccgagtacggcctggattctgctttcacctgtgcagccgagctcgttttgagagacttgaaacccacatgacaccagagatgttccgaacaccattgcatgaaattgctcttagcataaaacttctgcgtctaggaggaattggccaatttctggccaaagcaattgaacctccccctttggatgctgtgattgaagcagaacacactcttagaggtacttacaaatacaaacctacttgacgcagatattaatcataccatctgtcttgttctggcagataacacttacaaatgaatcaagatgatgaagatgtagtcaacagggctgtgataataatagtaaggcctccagtcttaccttagatagttagtatagtcactgttctaatgagcaatgagaaggaagaaagggacaatgtgagtcttta

SEQ ID NO: 422826 - DNA, 4223 bp, Homo sapiens
agcgccgcggtcggagccatttcgccgattcctccatgcgagttgctgtgcgtttctctgttgtctcggtagaaggccagagtcacacacggtcctaagagctgggcaccaggaagcgaaggctgatctgaagaagacacttgaatcatgggtgacgttaaaaattttctgtatgcctggtgtggcaaaaggaagatgaccccatcctatgaaattagagcagtggggaacaaaaacaggcagaaattcatgtgtgaggttcaggtggaaggttataattacactggcatgggaaattccaccaataaaaatgaaataaagagtgaagaagttccagcttttggggtagcatctccgcccccacttactgatactcctgacactacagcaaatgctgaaggagatttaccaacaaccatgggaggacctcttcctccacatctggctctcaaagcagaaaataattctgaggtaggggcctctggctatggtgttcctgggcccacctgggaccgaggagccaacttgaaggattactactcaagaaaggaagaacaagaagtgcaagcgactctagaatcagaagaagtggatttaaatgctgggcttcatggaaactggaccttggaaaatgctaaagctcgtctaaaccaatattttcagaaagaaaagatccaaggagaatataagtacacccaagtgggtcctgatcacaacaggagctttattgcagaaatgaccatttatatcaagcagctgggcagaaggatttttgcacgagaacatggatcaaataagaaattggcagcacagtcctgtgccctgtcacttgtcagacaactgtaccatcttggagtggttgaagcttactccggacttacaaagaagaaggaaggagagacagtggagccttacaaagtaaacctctctcaagatttagagcatcagctgcaaaacatcattcaagagctaaatcttgagattttgcccccgcctgaagatccttctgtgccagttgcactcaacattggcaaattggctcagttcgaaccatctcagcgacaaaaccaagtgggtgtggttccttggtcacctccacaatccaactggaatccttggactagtagcaacattgatgaggggcctctggcttttgctactccagagcaaataagcatggacctcaagaatgaattgatgtaccagttggaacaggatcatgatttgcaagcaatcttgcaggagagagagttactgcctgtgaagaaatttgaaagtgagattctggaagcaatcagccaaaattcagttgtcattattagaggggctactggatgtgggaaaaccacacaggttccccagttcattctagatgactttatccagaatgaccgagcagcagagtgtaacatcgtagtaactcagcccagaagaatcagtgcggtttctgtggcagagcgagttgcatttgaaagaggagaagagcctggaaaaagctgtggctacagcgttcgatttgagtctatacttcctcgtcctcatgccagtataatgttttgtactgtaggtgtgctcctgagaaaattagaagcaggcattcgaggaatcagtcatgtaattgtagatgaaatacatgaaagagatattaatactgacttccttttggtagtactgcgtgatgttgttcaggcttatcctgaagttcgcattgttcttatgtctgctactattgataccagcatgttttgtgaatatttcttcaattgccccatcattgaagtttatgggaggacttacccagttcaagaatattttctggaagactgcattcagatgacccactttgttcctccaccaaaagacaaaaagaagaaggataaggatgatgatggtggtgaggatgatgatgcaaattgcaacttgatctgtggtgatgaatatggtccagaaacaaggttgagcatgtctcaattgaacgaaaaggaaactccttttgaactcatcgaggctctacttaagtacattgaaacccttaatgttcctggagctgtgttggtttttttgcctggctggaatctgatttatactatgcagaagcatttggaaatgaatccacattttggaagccatcggtatcagattctacccctgcattctcagattcctcgagaggaacagcgcaaagtgtttgatccagtaccagttggagtaaccaaggttattttgtccacaaatattgctgaaacaagcattaccataaacgatgttgtttatgtcattgactcctgcaagcagaaagtgaaactcttcactgctcacaacaatatgaccaactatgctaccgtatgggcatcaaaaacaaaccttgagcaacggaaagggcgagctggccgagtacggcctggattctgctttcacctgtgcagccgagctcgttttgagagacttgaaacccacatgacaccagagatgttccgaacaccattgcatgaaattgctcttagcataaaacttctgcgtctaggaggaattggccaatttctggccaaagcaattgaacctccccctttggatgctgtgattgaagcagaacacactcttagagagcttgatgcattagatgccaatgatgagttgactcctttgggacgaatcctggctaaactccccattgagcctcgttttggcaaaatgatgataatggggtgtattttctacgtgggagatgctatctgtaccattgctgctgctacctgctttccagagcctttcatcaatgaaggaaagcggctgggctatatccatcgaaattttgctggaaacagattttctgatcacgtagcccttttatcagtattccaagcctgggatgatgctagaatgggtggagaagaagcagagatacgtttttgtgagcacaaaagacttaatatggctacactaagaatgacctgggaagccaaagttcagctcaaagagattttgattaattctgggtttccagaagattgtttgttgacacaagtgtttactaacactggaccagataataatttggatgttgttatctccctcctggcctttggtgtgtaccccaatgtatgctatcataaggaaaagaggaagattctcaccactgaagggcgtaatgcacttatccacaaatcatctgttaattgtccttttagtagccaagacatgaagtacccatctcccttctttgtatttggtgaaaagattcgaactcgagccatctctgctaaaggcatgactttagtcacccccctgcagttgcttctctttgcctccaagaaagtccaatctgatgggcagattgtgcttgtagatgactggattaaactgcaaatatctcatgaagctgctgcctgtatcactggtctccgggcagccatggaggctttggttgttgaagtaaccaaacaacctgctatcatcagccagttggaccccgtaaatgaacgtatgctgaacatgatccgtcagatctctagaccctcagctgctggtatcaaccttatgattggcagtacacggtatggagatggtccacgtcctcccaagatggcccgatacgacaatggaagcggatatagaaggggaggttctagttacagtggtggaggctatggcggtggctatagcagtggaggctatggtagcggaggctatggtggcagcgccaactcctttcgggcaggatatggtgcaggtgttggtggaggctatagaggagtttcccgaggtggctttagaggcaactctggaggagactacagagggcctagtggaggctacagaggatctgggggattccagcgaggaggtggtaggggggcctatggaactggctacttggacattgaagaggaggtggcggctataaaacttggttatgtcagttctgtgtgtagacagtaaggaaaaaaaggcatgctatgtgttacgtgttttttccagtatgtttatttgccaccaaaaagtaaatgcattttcacccattctgtggttcattgtagtttaaggaaaccaagcatatagatgcattagtgattttgtttattttatgtaaaatataacgatcttcttttaaaaataccacagtttgtatttttctttaaggagtaaagatttgcctttaaataacttggtattttcctggctttcgtttaatacaatagaaaataaagtattacacggaattc

SEQ ID NO: 422827 - DNA, 2479 bp, Homo sapiens
agcgccgcggtcggagccatttcgccgattcctccatgcgagttgctgtgcgtttctctgttgtctcggtagaaggccagagtcacacacggtcctaagagctgggcaccaggaagcgaaggctgatctgaagaagacacttgaatcatgggtgacgttaaaaattttctgtatgcctggtgtggcaaaaggaagatgaccccatcctatgaaattagagcagtggggaacaaaaacaggcagaaattcatgtgtgaggttcaggtggaaggttataattacactggcatgggaaattccaccaataaaaaagatgcacaaagcaatgctgccagagactttgttaactatttggttcgaataaatgaaataaagagtgaagaagttccagcttttggggtagcatctccgcccccacttactgatactcctgacactacagcaaatgctgaaggagatttaccaacaaccatgggaggacctcttcctccacatctggctctcaaagcagaaaataattctgaggtaggggcctctggctatggtgttcctgggcccacctgggaccgaggagccaacttgaaggattactactcaagaaaggaagaacaagaagtgcaagcgactctagaatcagaagaagtggatttaaatgctgggcttcatggaaactggaccttggaaaatgctaaagctcgtctaaaccaatattttcagaaagaaaagatccaaggagaatataagtacacccaagtgggtcctgatcacaacaggagctttattgcagaaatgaccatttatatcaagcagctgggcagaaggatttttgcacgagaacatggatcaaataagaaattggcagcacagtcctgtgccctgtcacttgtcagacaactgtaccatcttggagtggttgaagcttactccggacttacaaagaagaaggaaggagagacagtggagccttacaaagtaaacctctctcaagatttagagcatcagctgcaaaacatcattcaagagctaaatcttgagattttgcccccgcctgaagatccttctgtgccagttgcactcaacattggcaaattggctcagttcgaaccatctcagcgacaaaaccaagtgggtgtggttccttggtcacctccacaatccaactggaatccttggactagtagcaacattgatgaggggcctctggcttttgctactccagagcaaataagcatggacctcaagaatgaattgatgtaccagttggaacaggatcatgatttgcaagcaatcttgcaggagagagagttactgcctgtgaagaaatttgaaagtgagattctggaagcaatcagccaaaattcagttgtcattattagaggggctactggatgtgggaaaaccacacaggttccccagttcattctagatgactttatccagaatgaccgagcagcagagtgtaacatcgtagtaactcagcccagaagaatcagtgcggtttctgtggcagagcgagttgcatttgaaagaggagaagagcctggaaaaagctgtggctacagcgttcgatttgagtctatacttcctcgtcctcatgccagtataatgttttgtactgtaggtgtgctcctgagaaaattagaagcaggcattcgaggaatcagtcatgtaattgtagatgaaatacatgaaagagatattaatactgacttccttttggtagtactgcgtgatgttgttcaggcttatcctgaagttcgcattgttcttatgtctgctactattgataccagcatgttttgtgaatatttcttcaattgccccatcattgaagtttatgggaggacttacccagttcaagaatattttctggaagactgcattcagatgacccactttgttcctccaccaaaagacaaaaagaagaaggataaggatgatgatggtggtgaggatgatgatgcaaattgcaacttgatctgtggtgatgaatatggtccagaaacaaggttgagcatgtctcaattgaacgaaaaggaaactccttttgaactcatcgaggctctacttaagtacattgaaacccttaatgttcctggagctgtgttggtttttttgcctggctggaatctgatttatactatgcagaagcatttggaaatgaatccacattttggaagccatcggtatcagattctacccctgcattctcagattcctcgagaggaacagcgcaaagtgtttgatccagtaccagttggagtaaccaaggtaaatattaaacattagagtgatgggattggaagtgacgtagatactaaacaaatgttacaggctttcaaagagctacccaaaaaattgtaacccatctaaattgaggaagaaaaaaggagtcttctctttctgagcttagtagattgttgttcattaatcagttattgggtgatctttttaggacttctgtaattttcttgtcatt

SEQ ID NO: 422828 - DNA, 2356 bp, Homo sapiens
agcgccgcggtcggagccatttcgccgattcctccatgcgagttgctgtgcgtttctctgttgtctcggtagaaggccagagtcacacacggtcctaagagctgggcaccaggaagcgaaggctgatctgaagaagacacttgaatcatgggtgacgttaaaaattttctgtatgcctggtgtggcaaaaggaagatgaccccatcctatgaaattagagcagtggggaacaaaaacaggcagaaattcatgtgtgaggttcaggtggaaggttataattacactggcatgggaaattccaccaataaaaaagatgcacaaagcaatgctgccagagactttgttaactatttggttcgaataaatgaaataaagagtgaagaagttccagcttttggggtagcatctccgcccccacttactgatactcctgacactacagcaaatgctgaaggagatttaccaacaaccatgggaggacctcttcctccacatctggctctcaaagcagaaaataattctgaggtaggggcctctggctatggtgttcctgggcccacctgggaccgaggagccaacttgaaggattactactcaagaaaggaagaacaagaagtgcaagcgactctagaatcagaagaagtggatttaaatgctgggcttcatggaaactggaccttggaaaatgctaaagctcgtctaaaccaatattttcagaaagaaaagatccaaggagaatataagtacacccaagtgggtcctgatcacaacaggagctttattgcagaaatgaccatttatatcaagcagctgggcagaaggatttttgcacgagaacatggatcaaataagaaattggcagcacagtcctgtgccctgtcacttgtcagacaactgtaccatcttggagtggttgaagcttactccggacttacaaagaagaaggaaggagagacagtggagccttacaaagtaaacctctctcaagatttagagcatcagctgcaaaacatcattcaagagctaaatcttgagattttgcccccgcctgaagatccttctgtgccagttgcactcaacattggcaaattggctcagttcgaaccatctcagcgacaaaaccaagtgggtgtggttccttggtcacctccacaatccaactggaatccttggactagtagcaacattgatgaggggcctctggcttttgctactccagagcaaataagcatggacctcaagaatgaattgatgtaccagttggaacaggatcatgatttgcaagcaatcttgcaggagagagagttactgcctgtgaagaaatttgaaagtgagattctggaagcaatcagccaaaattcagttgtcattattagaggggctactggatgtgggaaaaccacacaggttccccagttcattctagatgactttatccagaatgaccgagcagcagagtgtaacatcgtagtaactcagcccagaagaatcagtgcggtttctgtggcagagcgagttgcatttgaaagaggagaagagcctggaaaaagctgtggctacagcgttcgatttgagtctatacttcctcgtcctcatgccagtataatgttttgtactgtaggtgtgctcctgagaaaattagaagcaggcattcgaggaatcagtcatgtaattgtagatgaaatacatgaaagagatattaatactgacttccttttggtagtactgcgtgatgttgttcaggcttatcctgaagttcgcattgttcttatgtctgctactattgataccagcatgttttgtgaatatttcttcaattgccccatcattgaagtttatgggaggacttacccagttcaagaatattttctggaagactgcattcagatgacccactttgttcctccaccaaaagacaaaaagaagaaggataaggatgatgatggtggtgaggatgatgatgcaaattgcaacttgatctgtggtgatgaatatggtccagaaacaaggttgagcatgtctcaattgaacgaaaaggaaactccttttgaactcatcgaggctctacttaagtacattgaaacccttaatgttcctggagctgtgttggtttttttgcctggctggaatctgatttatactatgcagaagcatttggaaatgaatccacattttggtatgagtctttgaattctcacatatttgagagtgaaaatgaatgtttttgctagtgccttagccagtatgtgaaaacaaaattttgtattgtttctactttcgaataaaaatatgtataatggagagctgtttgaaaccagctcctgtttttagtccctgattgttctttattgttata

SEQ ID NO: 422829 - DNA, 3127 bp, Homo sapiens
ttaggtagaggccgggtgttaatcgagcgaggcacattgatgaggggcctctggcttttgctactccagagcaaataagcatggacctcaagaatgaattgatgtaccagttggaacaggatcatgatttgcaagcaatcttgcaggagagagagttactgcctgtgaagaaatttgaaagtgagattctggaagcaatcagccaaaattcagttgtcattattagaggggctactggatgtgggaaaaccacacaggttccccagttcattctagatgactttatccagaatgaccgagcagcagagtgtaacatcgtagtaactcagcccagaagaatcagtgcggtttctgtggcagagcgagttgcatttgaaagaggagaagagcctggaaaaagctgtggctacagcgttcgatttgagtctatacttcctcgtcctcatgccagtataatgttttgtactgtaggtgtgctcctgagaaaattagaagcaggcattcgaggaatcagtcatgtaattgtagatgaaatacatgaaagagatattaatactgacttccttttggtagtactgcgtgatgttgttcaggcttatcctgaagttcgcattgttcttatgtctgctactattgataccagcatgttttgtgaatatttcttcaattgccccatcattgaagtttatgggaggacttacccagttcaagaatattttctggaagactgcattcagatgacccactttgttcctccaccaaaagacaaaaagaagaaggataaggatgatgatggtggtgaggatgatgatgcaaattgcaacttgatctgtggtgatgaatatggtccagaaacaaggttgagcatgtctcaattgaacgaaaaggaaactccttttgaactcatcgaggctctacttaagtacattgaaacccttaatgttcctggagctgtgttggtttttttgcctggctggaatctgatttatactatgcagaagcatttggaaatgaatccacattttggaagccatcggtatcagattctacccctgcattctcagattcctcgagaggaacagcgcaaagtgtttgatccagtaccagttggagtaaccaaggttattttgtccacaaatattgctgaaacaagcattaccataaacgatgttgtttatgtcattgactcctgcaagcagaaagtgaaactcttcactgctcacaacaatatgaccaactatgctaccgtatgggcatcaaaaacaaaccttgagcaacggaaagggcgagctggccgagtacggcctggattctgctttcacctgtgcagccgagctcgttttgagagacttgaaacccacatgacaccagagatgttccgaacaccattgcatgaaattgctcttagcataaaacttctgcgtctaggaggaattggccaatttctggccaaagcaattgaacctccccctttggatgctgtgattgaagcagaacacactcttagagagcttgatgcattagatgccaatgatgagttgactcctttgggacgaatcctggctaaactccccattgagcctcgttttggcaaaatgatgataatggggtgtattttctacgtgggagatgctatctgtaccattgctgctgctacctgctttccagagcctttcatcaatgaaggaaagcggctgggctatatccatcgaaattttgctggaaacagattttctgatcacgtagcccttttatcagtattccaagcctgggatgatgctagaatgggtggagaagaagcagagatacgtttttgtgagcacaaaagacttaatatggctacactaagaatgacctgggaagccaaagttcagctcaaagagattttgattaattctgggtttccagaagattgtttgttgacacaagtgtttactaacactggaccagataataatttggatgttgttatctccctcctggcctttggtgtgtaccccaatgtatgctatcataaggaaaagaggaagattctcaccactgaagggcgtaatgcacttatccacaaatcatctgttaattgtccttttagtagccaagacatgaagtacccatctcccttctttgtatttggtgaaaagattcgaactcgagccatctctgctaaaggcatgactttagtcacccccctgcagttgcttctctttgcctccaagaaagtccaatctgatgggcagattgtgcttgtagatgactggattaaactgcaaatatctcatgaagctgctgcctgtatcactggtctccgggcagccatggaggctttggttgttgaagtaaccaaacaacctgctatcatcagccagttggaccccgtaaatgaacgtatgctgaacatgatccgtcagatctctagaccctcagctgctggtatcaaccttatgattggcagtacacggtatggagatggtccacgtcctcccaagatggcccgatacgacaatggaagcggatatagaaggggaggttctagttacagtggtggaggctatggcggtggctatagcagtggaggctatggtagcggaggctatggtggcagcgccaactcctttcgggcaggatatggtgcaggtgttggtggaggctatagaggagtttcccgaggtggctttagaggcaactctggaggagactacagagggcctagtggaggctacagaggatctgggggattccagcgaggaggtggtaggggggcctatggaactggctacttggacattgaagaggaggtggcggctataaaacttggttatgtcagttctgtgtgtagacagtaaggaaaaaaaggcatgctatgtgttacgtgttttttccagtatgtttatttgccaccaaaaagtaaatgcattttcacccattctgtggttcattgtagtttaaggaaaccaagcatatagatgcattagtgattttgtttattttatgtaaaatataacgatcttcttttaaaaataccacagtttgtatttttctttaaggagtaaagatttgcctttaaataacttggtattttcctggctttcgtttaatacaatagaaaataaagtattacacggaattc

SEQ ID NO: 422830 - DNA, 1600 bp, Homo sapiens
agcgccgcggtcggagccatttcgccgattcctccatgcgagttgctgtgcgtttctctgttgtctcggtagaaggccagagtcacacacggtcctaagagctgggcaccaggaagcgaaggctgatctgaagaagacacttgaatcatgggtgacgttaaaaattttctgtatgcctggtgtggcaaaaggaagatgaccccatcctatgaaattagagcagtggggaacaaaaacaggcagaaattcatgtgtgaggttcaggtggaaggttataattacactggcatgggaaattccaccaataaaaaagatgcacaaagcaatgctgccagagactttgttaactatttggttcgaataaatgaaataaagagtgaagaagttccagcttttggggtagcatctccgcccccacttactgatactcctgacactacagcaaatgctgaaggagatttaccaacaaccatgggaggacctcttcctccacatctggctctcaaagcagaaaataattctgaggtaggggcctctggctatggtgttcctgggcccacctgggaccgaggagccaacttgaaggattactactcaagaaaggaagaacaagaagtgcaagcgactctagaatcagaagaagtggatttaaatgctgggcttcatggaaactggaccttggaaaatgctaaagctcgtctaaaccaatattttcagaaagaaaagatccaaggagaatataagtacacccaagtgggtcctgatcacaacaggagctttattgcagaaatgaccatttatatcaagcagctgggcagaaggatttttgcacgagaacatggatcaaataagaaattggcagcacagtcctgtgccctgtcacttgtcagacaactgtaccatcttggagtggttgaagcttactccggacttacaaagaagaaggaaggagagacagtggagccttacaaagtaaacctctctcaagatttagagcatcagctgcaaaacatcattcaagagctaaatcttgagattttgcccccgcctgaagatccttctgtgccagttgcactcaacattggcaaattggctcagttcgaaccatctcagcgacaaaaccaagtgggtgtggttccttggtcacctccacaatccaactggaatccttggactagtagcaacattgatgaggggcctctggcttttgctactccagagcaaataagcatggacctcaagaatgaattgatgtaccagttggaacaggatcatgatttgcaagcaatcttgcaggagagagagttactgcctgtgaagaaatttgaaagtgagattctggaagcaatcagccaaaattcagttgtcattattagaggggctactggatgtgggaaaaccacacaggttccccagttcattctagatgactttatccagaatgaccgagcagcagagtgtaacatcgtagtaactcaggtaagtggtaaaccaaccatgaaatacctagagagcagactatttctgattctttctttgattaactaatttttgtaattatttaagattgagagagcattgtgcccttgaaattaaattt

SEQ ID NO: 422831 - DNA, 2083 bp, Homo sapiens
aatctgagaatgcaggggtagaatctgataccgatggcttccaaaatgtggattcatttccaaatggagtaaccaaggttattttgtccacaaatattgctgaaacaagcattaccataaacgatgttgtttatgtcattgactcctgcaagcagaaagtgaaactcttcactgctcacaacaatatgaccaactatgctaccgtatgggcatcaaaaacaaaccttgagcaacggaaagggcgagctggccgagtacggcctggattctgctttcacctgtgcagccgagctcgttttgagagacttgaaacccacatgacaccagagatgttccgaacaccattgcatgaaattgctcttagcataaaacttctgcgtctaggaggaattggccaatttctggccaaagcaattgaacctccccctttggatgctgtgattgaagcagaacacactcttagagagcttgatgcattagatgccaatgatgagttgactcctttgggacgaatcctggctaaactccccattgagcctcgttttggcaaaatgatgataatggggtgtattttctacgtgggagatgctatctgtaccattgctgctgctacctgctttccagagcctttcatcaatgaaggaaagcggctgggctatatccatcgaaattttgctggaaacagattttctgatcacgtagcccttttatcagtattccaagcctgggatgatgctagaatgggtggagaagaagcagagatacgtttttgtgagcacaaaagacttaatatggctacactaagaatgacctgggaagccaaagttcagctcaaagagattttgattaattctgggtttccagaagattgtttgttgacacaagtgtttactaacactggaccagataataatttggatgttgttatctccctcctggcctttggtgtgtaccccaatgtatgctatcataaggaaaagaggaagattctcaccactgaagggcgtaatgcacttatccacaaatcatctgttaattgtccttttagtagccaagacatgaagtacccatctcccttctttgtatttggtgaaaagattcgaactcgagccatctctgctaaaggcatgactttagtcacccccctgcagttgcttctctttgcctccaagaaagtccaatctgatgggcagattgtgcttgtagatgactggattaaactgcaaatatctcatgaagctgctgcctgtatcactggtctccgggcagccatggaggctttggttgttgaagtaaccaaacaacctgctatcatcagccagttggaccccgtaaatgaacgtatgctgaacatgatccgtcagatctctagaccctcagctgctggtatcaaccttatgattggcagtacacggtatggagatggtccacgtcctcccaagatggcccgatacgacaatggaagcggatatagaaggggaggttctagttacagtggtggaggctatggcggtggctatagcagtggaggctatggtagcggaggctatggtggcagcgccaactcctttcgggcaggatatggtgcaggtgttggtggaggctatagaggagtttcccgaggtggctttagaggcaactctggaggagactacagagggcctagtggaggctacagaggatctgggggattccagcgaggaggtggtaggggggcctatggaactggctacttggacattgaagaggaggtggcggctataaaacttggttatgtcagttctgtgtgtagacagtaaggaaaaaaaggcatgctatgtgttacgtgttttttccagtatgtttatttgccaccaaaaagtaaatgcattttcacccattctgtggttcattgtagtttaaggaaaccaagcatatagatgcattagtgattttgtttattttatgtaaaatataacgatcttcttttaaaaataccacagtttgtatttttctttaaggagtaaagatttgcctttaaataacttggtattttcctggctttcgtttaatacaatagaaaataaagtattacacggaattc

SEQ ID NO: 422832 - DNA, 1689 bp, Homo sapiens
agcgccgcggtcggagccatttcgccgattcctccatgcgagttgctgtgcgtttctctgttgtctcggtagaaggccagagtcacacacggtcctaagagctgggcaccaggaagcgaaggctgatctgaagaagacacttgaatcatgggtgacgttaaaaattttctgtatgcctggtgtggcaaaaggaagatgaccccatcctatgaaattagagcagtggggaacaaaaacaggcagaaattcatgtgtgaggttcaggtggaaggttataattacactggcatgggaaattccaccaataaaaaagatgcacaaagcaatgctgccagagactttgttaactatttggttcgaataaatgaaataaagagtgaagaagttccagcttttggggtagcatctccgcccccacttactgatactcctgacactacagcaaatgctgaaggagatttaccaacaaccatgggaggacctcttcctccacatctggctctcaaagcagaaaataattctgaggtaggggcctctggctatggtgttcctgggcccacctgggaccgaggagccaacttgaaggattactactcaagaaaggaagaacaagaagtgcaagcgactctagaatcagaagaagtggatttaaatgctgggcttcatggaaactggaccttggaaaatgctaaagctcgtctaaaccaatattttcagaaagaaaagatccaaggagaatataagtacacccaagtgggtcctgatcacaacaggtttgcttgtttcattcttttccttctgtagtaagttaaggtggttttggatattcactgttgaatataatctatttttgtacgttgtctggttaattgtgtggattagaattgaattgttaaaagataacgttaatttgcacaagaataattattgatttgtgcagtttccatggttttcacatgagtgaattttagctgtgtaagaagttcagcgtaaatctttttgacatgctagacatttaagatgctcatttgaatctgaaaggcaaaagtcatgaccacaattgctggtttgtccctagttgatgtaaaagccagccaaaggtggtgattttttttttcaccttggtattgttagaggcagttactatttctttaatgggtcaggttagatacttaagctttgagtcccagaattagattgtattgcatctacatccacatttcacttaagccttgaaaactgccagctttcctaggagtcctagtgaaatttaagggcttatcgtaaggtcgaaaaggaacagccttggtctttgtatgtgggggtgtacttttttcctgttaaatgtataaaacaatataaagggaggtcattttaacagtatgtttctcagcctgcttgctgttcttcctgagagcattccagggtgtagtaattattactcccaggaaggctcatatggattagacttttctggggagcgatgtatttttattagaacggaggggaggttgtaatggaaacctttttgaatgattccgtttgctgtccgtacttatgaaataaattatccaaatacattaaaaatatttttctcgaaaatcaaagtgttctccattggatgcatctagcgaccctgaaataattaatattaatacaaaattttgtcactgatcaaaatgatattta

SEQ ID NO: 422833 - DNA, 1684 bp, Homo sapiens
  misc_feature (38)..(38): n is a, c, g, or t
tgtgtgggtatctagaggatccggctcccactggttgntgtgatgaagcagaacacactcttagagagcttgatgcattagatgccaatgatgagttgactcctttgggacgaatcctggctaaactccccattgagcctcgttttggcaaaatgatgataatggggtgtattttctacgtgggagatgctatctgtaccattgctgctgctacctgctttccagagcctttcatcaatgaaggaaagcggctgggctatatccatcgaaattttgctggaaacagattttctgatcacgtagcccttttatcagtattccaagcctgggatgatgctagaatgggtggagaagaagcagagatacgtttttgtgagcacaaaagacttaatatggctacactaagaatgacctgggaagccaaagttcagctcaaagagattttgattaattctgggtttccagaagattgtttgttgacacaagtgtttactaacactggaccagataataatttggatgttgttatctccctcctggcctttggtgtgtaccccaatgtatgctatcataaggaaaagaggaagattctcaccactgaagggcgtaatgcacttatccacaaatcatctgttaattgtccttttagtagccaagacatgaagtacccatctcccttctttgtatttggtgaaaagattcgaactcgagccatctctgctaaaggcatgactttagtcacccccctgcagttgcttctctttgcctccaagaaagtccaatctgatgggcagattgtgcttgtagatgactggattaaactgcaaatatctcatgaagctgctgcctgtatcactggtctccgggcagccatggaggctttggttgttgaagtaaccaaacaacctgctatcatcagccagttggaccccgtaaatgaacgtatgctgaacatgatccgtcagatctctagaccctcagctgctggtatcaaccttatgattggcagtacacggtatggagatggtccacgtcctcccaagatggcccgatacgacaatggaagcggatatagaaggggaggttctagttacagtggtggaggctatggcggtggctatagcagtggaggctatggtagcggaggctatggtggcagcgccaactcctttcgggcaggatatggtgcaggtgttggtggaggctatagaggagtttcccgaggtggctttagaggcaactctggaggagactacagagggcctagtggaggctacagaggatctgggggattccagcgaggaggtggtaggggggcctatggaactggctacttggacattgaagaggaggtggcggctataaaacttggttatgtcagttctgtgtgtagacagtaaggaaaaaaaggcatgctatgtgttacgtgttttttccagtatgtttatttgccaccaaaaagtaaatgcattttcacccattctgtggttcattgtagtttaaggaaaccaagcatatagatgcattagtgattttgtttattttatgtaaaatataacgatcttcttttaaaaataccacagtttgtatttttctttaaggagtaaagatttgcctttaaataacttggtattttcctggctttcgtttaatacaatagaaaataaagtattacacggaattc

SEQ ID NO: 422834 - DNA, 1663 bp, Homo sapiens
cttatgttctgacccacccttaggttctccaccctttctgacccacctagacaaggcccctgaaaagtcgaaggcagtggaatgcagctcgccatggtagggttagactcaggaggggacagaagagaacgaacaggattggtgtgaatgcaggaggcgtgggagatgctatctgtaccattgctgctgctacctgctttccagagcctttcatcaatgaaggaaagcggctgggctatatccatcgaaattttgctggaaacagattttctgatcacgtagcccttttatcagtattccaagcctgggatgatgctagaatgggtggagaagaagcagagatacgtttttgtgagcacaaaagacttaatatggctacactaagaatgacctgggaagccaaagttcagctcaaagagattttgattaattctgggtttccagaagattgtttgttgacacaagtgtttactaacactggaccagataataatttggatgttgttatctccctcctggcctttggtgtgtaccccaatgtatgctatcataaggaaaagaggaagattctcaccactgaagggcgtaatgcacttatccacaaatcatctgttaattgtccttttagtagccaagacatgaagtacccatctcccttctttgtatttggtgaaaagattcgaactcgagccatctctgctaaaggcatgactttagtcacccccctgcagttgcttctctttgcctccaagaaagtccaatctgatgggcagattgtgcttgtagatgactggattaaactgcaaatatctcatgaagctgctgcctgtatcactggtctccgggcagccatggaggctttggttgttgaagtaaccaaacaacctgctatcatcagccagttggaccccgtaaatgaacgtatgctgaacatgatccgtcagatctctagaccctcagctgctggtatcaaccttatgattggcagtacacggtatggagatggtccacgtcctcccaagatggcccgatacgacaatggaagcggatatagaaggggaggttctagttacagtggtggaggctatggcggtggctatagcagtggaggctatggtagcggaggctatggtggcagcgccaactcctttcgggcaggatatggtgcaggtgttggtggaggctatagaggagtttcccgaggtggctttagaggcaactctggaggagactacagagggcctagtggaggctacagaggatctgggggattccagcgaggaggtggtaggggggcctatggaactggctacttggacattgaagaggaggtggcggctataaaacttggttatgtcagttctgtgtgtagacagtaaggaaaaaaaggcatgctatgtgttacgtgttttttccagtatgtttatttgccaccaaaaagtaaatgcattttcacccattctgtggttcattgtagtttaaggaaaccaagcatatagatgcattagtgattttgtttattttatgtaaaatataacgatcttcttttaaaaataccacagtttgtatttttctttaaggagtaaagatttgcctttaaataacttggtattttcctggctttcgtttaatacaatagaaaataaagtattacacggaattc

SEQ ID NO: 422835 - DNA, 1517 bp, Homo sapiens
ctaagatccggctccattgtttgttcaactcagctcggcacaccttccctatttccagagcctttcatcaatgaaggaaagcggctgggctatatccatcgaaattttgctggaaacagattttctgatcacgtagcccttttatcagtattccaagcctgggatgatgctagaatgggtggagaagaagcagagatacgtttttgtgagcacaaaagacttaatatggctacactaagaatgacctgggaagccaaagttcagctcaaagagattttgattaattctgggtttccagaagattgtttgttgacacaagtgtttactaacactggaccagataataatttggatgttgttatctccctcctggcctttggtgtgtaccccaatgtatgctatcataaggaaaagaggaagattctcaccactgaagggcgtaatgcacttatccacaaatcatctgttaattgtccttttagtagccaagacatgaagtacccatctcccttctttgtatttggtgaaaagattcgaactcgagccatctctgctaaaggcatgactttagtcacccccctgcagttgcttctctttgcctccaagaaagtccaatctgatgggcagattgtgcttgtagatgactggattaaactgcaaatatctcatgaagctgctgcctgtatcactggtctccgggcagccatggaggctttggttgttgaagtaaccaaacaacctgctatcatcagccagttggaccccgtaaatgaacgtatgctgaacatgatccgtcagatctctagaccctcagctgctggtatcaaccttatgattggcagtacacggtatggagatggtccacgtcctcccaagatggcccgatacgacaatggaagcggatatagaaggggaggttctagttacagtggtggaggctatggcggtggctatagcagtggaggctatggtagcggaggctatggtggcagcgccaactcctttcgggcaggatatggtgcaggtgttggtggaggctatagaggagtttcccgaggtggctttagaggcaactctggaggagactacagagggcctagtggaggctacagaggatctgggggattccagcgaggaggtggtaggggggcctatggaactggctacttggacattgaagaggaggtggcggctataaaacttggttatgtcagttctgtgtgtagacagtaaggaaaaaaaggcatgctatgtgttacgtgttttttccagtatgtttatttgccaccaaaaagtaaatgcattttcacccattctgtggttcattgtagtttaaggaaaccaagcatatagatgcattagtgattttgtttattttatgtaaaatataacgatcttcttttaaaaataccacagtttgtatttttctttaaggagtaaagatttgcctttaaataacttggtattttcctggctttcgtttaatacaatagaaaataaagtattacacggaattc

SEQ ID NO: 422836 - DNA, 514 bp, Homo sapiens
agcgccgcggtcggagccatttcgccgattcctccatgcgagttgctgtgcgtttctctgttgtctcggtagaaggccagagtcacacacggtcctaagagctgggcaccaggaagcgaaggctgatctgaagaagacacttgaatcatgggtgacgttaaaaattttctgtatgcctggtgtggcaaaaggaagatgaccccatcctatgaaattagagcagtggggaacaaaaacaggcagaaattcatgtgtgaggtactgaagaatacagtttgcatttatgtgatttatgaggttcattttggggttaaaagaaaaatgttttctgtttggagatgttaatgtgttgcacattaggaaacgacagttctttattgtgacttgactgctattgtaaatcattttcaagtcagcattacttttaaaacaatctgacaggtaaattattctaattagagcctatatcttcctcagcttcctcagtaccagtagtggggatgggaccgacatt

SEQ ID NO: 422837 - DNA, 312 bp, Homo sapiens
gagcgcctttggctagtatagcgaggtaaggcgtctcgaaggagggaggctttgagctgataacctcggccaacgcgaaggaaaagcagagcctgcagaagcggaagggattagttatcgcttaagggcagaaactgggcgggagctgaaagcaggccatgtgactggagtgtggcgagaaggccttcaaaggagaatgggttttagggtggcaagagtggaaacaaaaaccgtgtaggacaatatttcactagcccgggtgtgcagtagtggtggcaggagagatggggagaaacgaatggataggggacg

SEQ ID NO: 422838 - DNA, 236 bp, Homo sapiens
tttccagagcctttcatcaatgaaggaaagcggctgggctatatccatcgaaattttgctggaaacagattttctgatcacgtagcccttttatcagtattccaagcctgggatgatgctaggtatgagtaagatttgggtgagctgtctgtagtttctcatttgtatttagttctctggtcttagagaatgatttctcatgccaatttattttagaatgggtggagaagaagcag

SEQ ID NO: 422839 - DNA, 622 bp, Homo sapiens
tactcagaaggctccatgagagttttgagtcaaatttaagtttgtgtttgaattttagtcctatcctgtgagaaatactaattagtggaaaagttcagtatattgatgtaagctctacatttttggaaattaaatttcttctgtattctatagtgtgtgactagtcaactagaataaataatgacattacaagtaattagagtcactagaagaaatctagaagacttacctcatgagtaactgagacaatccaaaaatatgtctccctgttttttacaggcaaattgcaacttgatctgtggtgatgaatatggtccagaaacaaggttgagcatgtctcaattgaacgaaaaggaaactccttttgaactcatcgaggctctacttaagtacattgaaacccttaatgttcctggagctgtgttggtttttttgcctggctggaatctgatttatactatgcagaagcatttggaaatgaatccacattttggtatgagtctttgaattctcacatatttgagagtgaaaatgaatgtttttgctagtgccttagccagtatgtgaaaacaaaattttgtattgtttctactttcgaataaaaatatgtataatggagagc

SEQ ID NO: 422840 - DNA, 4266 bp, Homo sapiens
  misc_feature (163)..(163): n is a, c, g, or t
gcggccgccgcccgcccaccgcgcgctcgcttgaccgcggcgcccgcccccggccgcccccgcccgtccccctgccgcgatgccctcccttcggggccccggcggcccgcgcccctgctaggctgcggcggcatggcccgcgcgcccggcgcgacctctgcgnattgcatcgttgtgtggcggcggggcatgcccagagcaccgggcacggccttcaatgggcgaggacacggacacgcggaaaattaaccacagcttcctgcgggaccacagctatgtgactgaagctgacatcatctctaccgttgagttcaaccacacgggagagctgctggccacaggtgacaagggcggccgggtcgtcatcttccagcgggaaccagagagtaaaaatgcgccccacagccagggcgaatacgacgtgtacagcactttccagagccacgagccggagtttgactatctcaagagcctggagatagaggagaagatcaacaagatcaagtggctcccacagcagaacgccgcccactcactcctgtccaccaacgataaaactatcaaattatggaagattaccgaacgagataaaaggcccgaaggatacaacctgaaggatgaagaggggaaacttaaggacctgtccacggtgacgtcactgcaggtgccagtgctgaagcccatggatctgatggtggaggtgagccctcggaggatctttgccaatggccacacctaccacatcaactccatctccgtcaacagtgactgcgagacctacatgtcggcggatgacctgcgcatcaacctctggcacctggccatcaccgacaggagcttcaacatcgtggacatcaagccggccaacatggaggaccttacggaggtgatcacagcatctgagttccatccgcaccactgcaacctcttcgtctacagcagcagcaagggctccctgcggctctgcgacatgcgggcagctgccctgtgtgacaagcattccaagctctttgaagagcctgaggaccccagtaaccgctcattcttctcggaaatcatctcctccgtgtccgacgtgaagttcagccacagcggccgctacatgctcacccgggactaccttacagtcaaggtctgggacctgaacatggaggcaagacccatagagacctaccaggtccatgactaccttcggagcaagctctgttccctgtacgagaacgactgcattttcgacaagtttgaatgtgcctggaacgggagcgacagcgtcatcatgaccggggcctacaacaacttcttccgcatgttcgatcggaacaccaagcgggacgtgaccctggaggcctcgagggaaagcagcaagccccgggctgtgctcaagccacggcgcgtgtgcgtggggggcaagcgccggcgtgatgacatcagtgtggacagcttggacttcaccaagaagatcctgcacacggcctggcacccggctgagaacatcattgccatcgccgccaccaacaacctgtacatcttccaggacaaggtaaactctgacatgcactaggtatgtgcagttcccggcccctgccacccagcctcatgcaagtcatccccgacatgaccttcacgaccgcaatgcaaggaggggaagaaagtcacagcactgatgaggacagctgcagaggtggcagtgtgtggacacaggaagtttgggccccctccctgccccagctttcctaggccagaattgtgtttggcagtaattgtctgtttaaaaaaataaaaaggagaggaagcgttcaccgccgcaaatcataaaatggacatgactgtggagtcttacagttcagggttctttcattcacgtcccttcctgtctcggtctgcggtctttaccacatcaataggactttttatgcgtccgggttaatttttcactccagtgtgtcctgttgcagggaccggagctgatgggagctgcttctcccccatgcctcactggtcccagatcagggctccagggacagatgatgagtctcaaacgagccagccaggggttcttttggttataaatggggcaattcgccctgtctcagagctgatgacctcaccgttgttttttggatggtgaattcatgctgagaatttgcagatgcaagctcctctcctaggtcttctgaatgtcttgaaacatcccaggtcccaggtctggtgcggtttcccgagaggagcggagtggggtttgtcttctgtgtgcctgtgtcctcatctgattcacctgccatttgctgagcctctgctgtgtaccaggcgtggtgctcagccctagaggcagttgacttaccccctgcagccctccctgccgcctcacccttcagcattcactgggcaccttcccggagcggacactgactcccatgcacgattttttggaatcttcctcctgactgtgaggtgggtgttcattcatttcctccataaacaccaacttctcgaagcgtgccaggctctgggctggatgctggggataagcgggaacccttaggatcccctctgtccacgagaagaagctgaggctctgagcggatgcacaggtcacccatggcaggtgccgtgcagtggtgtcaggaacccgtccgggtcttcacacaaggttctctccagtccatctcgtgggcggctcatgttagagcgacattcaaatggaaggtttggaaaggaatgcctctgtcttgtgaagtaggacaagggtccgggagaactgagacgcaggatggaagacagagaagaccccccggagctcctcgctctgcttggtggcttcaggagtgcggccctccccaggactccacttcatcctgggcttgcaccctccttgagccaatgcactgaactgcctttgaaaggaaattgcatgttctgaccattttaggatacctttactttaaggaccacacagtcccagaggacacatccctcgggaactctgcccctctgacaatgagggccacagagaaggtggtgtttccatggtagatgctcctgttctggtgataccaaacctgcccacccctctgagtcgtctttgctcatggacttgcagcagaaccacgtagtttggcattttgattcagaaagtggggagcagagacccagccaaatccaaacttttttttggttttgtttgttttgttttttacaagatataacataacccaggaaacagacccagctgaggttattctcagtggattacagtatacttttgtgtgtgtaaaagcacaaagtgcatgtgtactcacttctggccatataacatttacacagggaaatggatcattgatttttttttaatcaacgtgaatgaagaatgtttgtttatatatcactataaaatccagttgacctggacagtattatatgtacatatctattctaattaaatttaacaatcaaaggattggattacttttttcccccttgtaaagaggttcgagaatgtggtcaattgtatagatagcgtgttaaagccaaaacccagctctgagggccttacccattacttggatatttgctacgatccatctccctttgtgagtcaaatgttaagagaagaaacttgtatttgcagctagaggttactgtcacatcatagatttaacatttaccatcttcaaagtacaaatcttacatgtccttcaaaaggaggtcttaatacagttcctagttccttacttctgttttaaactttgggtaccaaaccaaaaagaagaaaaaagaaaggaaaagatcttctttgaagaaaagtatgtctctggatccctggaaaataatgatgtccaaagcaaattgtgaagatcaaatgtgtgttaagaaaaggtgtcgaggggagggacaaaaccagaaacggtggaaggaccagtgtaatagtcacagacttgcatcctggctctgcttacatttcctggtactctcgaatgtacgggcgttcacatagtcattgtgaagttgttggggtttttttggttttgtttttaatttagctcttctctgaggacgaagctgttggtggtggtggtggtgggggtggtggtgtgggatacatggtggtcaagttgtcagccctgatcagtttggactctgtaactcataggtgcattctttttttctttggtgtctcacaaattacccaattgttgaataaaactataaatatgttaataccagctttttccaataaaataacaaatgttacatcaaaaacgaggt

SEQ ID NO: 422841 - DNA, 4138 bp, Homo sapiens
  misc_feature (163)..(163): n is a, c, g, or t
gcggccgccgcccgcccaccgcgcgctcgcttgaccgcggcgcccgcccccggccgcccccgcccgtccccctgccgcgatgccctcccttcggggccccggcggcccgcgcccctgctaggctgcggcggcatggcccgcgcgcccggcgcgacctctgcgnattgcatcgttgtgtggcggcggggcatgcccagagcaccgggcacggccttcaatgggcgaggacacggacacgcggaaaattaaccacagcttcctgcgggaccacagctatgtgactgaagctgacatcatctctaccgttgagttcaaccacacgggagagctgctggccacaggtgacaagggcggccgggtcgtcatcttccagcgggaaccagagagtaaaaatgcgccccacagccagggcgaatacgacgtgtacagcactttccagagccacgagccggagtttgactatctcaagagcctggagatagaggagaagatcaacaagatcaagtggctcccacagcagaacgccgcccactcactcctgtccaccaacgataaaactatcaaattatggaagattaccgaacgagataaaaggcccgaaggatacaacctgaaggatgaagaggggaaacttaaggacctgtccacggtgacgtcactgcaggtgccagtgctgaagcccatggatctgatggtggaggtgagccctcggaggatctttgccaatggccacacctaccacatcaactccatctccgtcaacagtgactgcgagacctacatgtcggcggatgacctgcgcatcaacctctggcacctggccatcaccgacaggagcttcaacatcgtggacatcaagccggccaacatggaggaccttacggaggtgatcacagcatctgagttccatccgcaccactgcaacctcttcgtctacagcagcagcaagggctccctgcggctctgcgacatgcgggcagctgccctgtgtgacaagcattccaagctctttgaagagcctgaggaccccagtaaccgctcattcttctcggaaatcatctcctccgtgtccgacgtgaagttcagccacagcggccgctacatgctcacccgggactaccttacagtcaaggtctgggacctgaacatggaggcaagacccatagagacctaccaggtccatgactaccttcggagcaagctctgttccctgtacgagaacgactgcattttcgacaagtttgaatgtgcctggaacgggagcgacagcgtcatcatgaccggggcctacaacaacttcttccgcatgttcgatcggaacaccaagcgggacgtgaccctggaggcctcgagggaaagcagcaagccccgggctgtgctcaagccacggcgcgtgtgcgtggggggcaagcgccggcgtgatgacatcagtgtggacagcttggacttcaccaagaagatcctgcacacggcctggcacccggctgagaacatcattgccatcgccgccaccaacaacctgtacatcttccaggacaaggtaaactctgacatgcactaggtatgtgcagttcccggcccctgccacccagcctcatgcaagtcatccccgacatgaccttcacgaccgcaatgcaaggaggggaagaaagtcacagcactgatgaggacagctgcagaggtggcagtgtgtggacacaggaagtttgggccccctccctgccccagctttcctaggccagaattgtgtttggcagtaattgtctgtttaaaaaaataaaaaggagaggaagcgttcaccgccgcaaatcataaaatggacatgactgtggagtcttacagttcagggttctttcattcacgtcccttcctgtctcggtctgcggtctttaccacatcaataggactttttatgcgtccgggttaatttttcactccagtgtgtcctgttgcagggaccggagctgatgggagctgcttctcccccatgcctcactggtcccagatcagggctccagggacagatgatgagtctcaaacgagccagccaggggttcttttggttataaatggggcaattcgccctgtctcagagctgatgacctcaccgttgttttttggatggtgaattcatgctgagaatttgcagatgcaagctcctctcctaggtcttctgaatgtcttgaaacatcccaggtcccaggtctggtgcggtttcccgagaggagcggagtggggtttgtcttctgtgtgcctgtgtcctcatctgattcacctgccatttgctgagcctctgctgtgtaccaggcgtggtgctcagccctagaggcagttgacttaccccctgcagccctccctgccgcctcacccttcagcattcactgggcaccttcccggagcggacactgactcccatgcacgattttttggaatcttcctcctgactgtgaggtgggtgttcattcatttcctccataaacaccaacttctcgaagcgtgccaggctctgggctggatgctggggataagcgggaacccttaggatcccctctgtccacgagaagaagctgaggctctgagcggatgcacaggtcacccatggcaggtgccgtgcagtggtgtcaggaacccgtccgggtcttcacacaaggttctctccagtccatctcgtgggcggtctgcttggtggcttcaggagtgcggccctccccaggactccacttcatcctgggcttgcaccctccttgagccaatgcactgaactgcctttgaaaggaaattgcatgttctgaccattttaggatacctttactttaaggaccacacagtcccagaggacacatccctcgggaactctgcccctctgacaatgagggccacagagaaggtggtgtttccatggtagatgctcctgttctggtgataccaaacctgcccacccctctgagtcgtctttgctcatggacttgcagcagaaccacgtagtttggcattttgattcagaaagtggggagcagagacccagccaaatccaaacttttttttggttttgtttgttttgttttttacaagatataacataacccaggaaacagacccagctgaggttattctcagtggattacagtatacttttgtgtgtgtaaaagcacaaagtgcatgtgtactcacttctggccatataacatttacacagggaaatggatcattgatttttttttaatcaacgtgaatgaagaatgtttgtttatatatcactataaaatccagttgacctggacagtattatatgtacatatctattctaattaaatttaacaatcaaaggattggattacttttttcccccttgtaaagaggttcgagaatgtggtcaattgtatagatagcgtgttaaagccaaaacccagctctgagggccttacccattacttggatatttgctacgatccatctccctttgtgagtcaaatgttaagagaagaaacttgtatttgcagctagaggttactgtcacatcatagatttaacatttaccatcttcaaagtacaaatcttacatgtccttcaaaaggaggtcttaatacagttcctagttccttacttctgttttaaactttgggtaccaaaccaaaaagaagaaaaaagaaaggaaaagatcttctttgaagaaaagtatgtctctggatccctggaaaataatgatgtccaaagcaaattgtgaagatcaaatgtgtgttaagaaaaggtgtcgaggggagggacaaaaccagaaacggtggaaggaccagtgtaatagtcacagacttgcatcctggctctgcttacatttcctggtactctcgaatgtacgggcgttcacatagtcattgtgaagttgttggggtttttttggttttgtttttaatttagctcttctctgaggacgaagctgttggtggtggtggtggtgggggtggtggtgtgggatacatggtggtcaagttgtcagccctgatcagtttggactctgtaactcataggtgcattctttttttctttggtgtctcacaaattacccaattgttgaataaaactataaatatgttaataccagctttttccaataaaataacaaatgttacatcaaaaacgaggt

SEQ ID NO: 422842 - DNA, 4073 bp, Homo sapiens
acatgcaaaaagtggggcctggagatggggctgtcttttttctccaaacacttgcccatccaggaaggccagccctgggcattgaagactccagctgacatcatctctaccgttgagttcaaccacacgggagagctgctggccacaggtgacaagggcggccgggtcgtcatcttccagcgggaaccagagagtaaaaatgcgccccacagccagggcgaatacgacgtgtacagcactttccagagccacgagccggagtttgactatctcaagagcctggagatagaggagaagatcaacaagatcaagtggctcccacagcagaacgccgcccactcactcctgtccaccaacgataaaactatcaaattatggaagattaccgaacgagataaaaggcccgaaggatacaacctgaaggatgaagaggggaaacttaaggacctgtccacggtgacgtcactgcaggtgccagtgctgaagcccatggatctgatggtggaggtgagccctcggaggatctttgccaatggccacacctaccacatcaactccatctccgtcaacagtgactgcgagacctacatgtcggcggatgacctgcgcatcaacctctggcacctggccatcaccgacaggagcttcaacatcgtggacatcaagccggccaacatggaggaccttacggaggtgatcacagcatctgagttccatccgcaccactgcaacctcttcgtctacagcagcagcaagggctccctgcggctctgcgacatgcgggcagctgccctgtgtgacaagcattccaagctctttgaagagcctgaggaccccagtaaccgctcattcttctcggaaatcatctcctccgtgtccgacgtgaagttcagccacagcggccgctacatgctcacccgggactaccttacagtcaaggtctgggacctgaacatggaggcaagacccatagagacctaccaggtccatgactaccttcggagcaagctctgttccctgtacgagaacgactgcattttcgacaagtttgaatgtgcctggaacgggagcgacagcgtcatcatgaccggggcctacaacaacttcttccgcatgttcgatcggaacaccaagcgggacgtgaccctggaggcctcgagggaaagcagcaagccccgggctgtgctcaagccacggcgcgtgtgcgtggggggcaagcgccggcgtgatgacatcagtgtggacagcttggacttcaccaagaagatcctgcacacggcctggcacccggctgagaacatcattgccatcgccgccaccaacaacctgtacatcttccaggacaaggtaaactctgacatgcactaggtatgtgcagttcccggcccctgccacccagcctcatgcaagtcatccccgacatgaccttcacgaccgcaatgcaaggaggggaagaaagtcacagcactgatgaggacagctgcagaggtggcagtgtgtggacacaggaagtttgggccccctccctgccccagctttcctaggccagaattgtgtttggcagtaattgtctgtttaaaaaaataaaaaggagaggaagcgttcaccgccgcaaatcataaaatggacatgactgtggagtcttacagttcagggttctttcattcacgtcccttcctgtctcggtctgcggtctttaccacatcaataggactttttatgcgtccgggttaatttttcactccagtgtgtcctgttgcagggaccggagctgatgggagctgcttctcccccatgcctcactggtcccagatcagggctccagggacagatgatgagtctcaaacgagccagccaggggttcttttggttataaatggggcaattcgccctgtctcagagctgatgacctcaccgttgttttttggatggtgaattcatgctgagaatttgcagatgcaagctcctctcctaggtcttctgaatgtcttgaaacatcccaggtcccaggtctggtgcggtttcccgagaggagcggagtggggtttgtcttctgtgtgcctgtgtcctcatctgattcacctgccatttgctgagcctctgctgtgtaccaggcgtggtgctcagccctagaggcagttgacttaccccctgcagccctccctgccgcctcacccttcagcattcactgggcaccttcccggagcggacactgactcccatgcacgattttttggaatcttcctcctgactgtgaggtgggtgttcattcatttcctccataaacaccaacttctcgaagcgtgccaggctctgggctggatgctggggataagcgggaacccttaggatcccctctgtccacgagaagaagctgaggctctgagcggatgcacaggtcacccatggcaggtgccgtgcagtggtgtcaggaacccgtccgggtcttcacacaaggttctctccagtccatctcgtgggcggctcatgttagagcgacattcaaatggaaggtttggaaaggaatgcctctgtcttgtgaagtaggacaagggtccgggagaactgagacgcaggatggaagacagagaagaccccccggagctcctcgctctgcttggtggcttcaggagtgcggccctccccaggactccacttcatcctgggcttgcaccctccttgagccaatgcactgaactgcctttgaaaggaaattgcatgttctgaccattttaggatacctttactttaaggaccacacagtcccagaggacacatccctcgggaactctgcccctctgacaatgagggccacagagaaggtggtgtttccatggtagatgctcctgttctggtgataccaaacctgcccacccctctgagtcgtctttgctcatggacttgcagcagaaccacgtagtttggcattttgattcagaaagtggggagcagagacccagccaaatccaaacttttttttggttttgtttgttttgttttttacaagatataacataacccaggaaacagacccagctgaggttattctcagtggattacagtatacttttgtgtgtgtaaaagcacaaagtgcatgtgtactcacttctggccatataacatttacacagggaaatggatcattgatttttttttaatcaacgtgaatgaagaatgtttgtttatatatcactataaaatccagttgacctggacagtattatatgtacatatctattctaattaaatttaacaatcaaaggattggattacttttttcccccttgtaaagaggttcgagaatgtggtcaattgtatagatagcgtgttaaagccaaaacccagctctgagggccttacccattacttggatatttgctacgatccatctccctttgtgagtcaaatgttaagagaagaaacttgtatttgcagctagaggttactgtcacatcatagatttaacatttaccatcttcaaagtacaaatcttacatgtccttcaaaaggaggtcttaatacagttcctagttccttacttctgttttaaactttgggtaccaaaccaaaaagaagaaaaaagaaaggaaaagatcttctttgaagaaaagtatgtctctggatccctggaaaataatgatgtccaaagcaaattgtgaagatcaaatgtgtgttaagaaaaggtgtcgaggggagggacaaaaccagaaacggtggaaggaccagtgtaatagtcacagacttgcatcctggctctgcttacatttcctggtactctcgaatgtacgggcgttcacatagtcattgtgaagttgttggggtttttttggttttgtttttaatttagctcttctctgaggacgaagctgttggtggtggtggtggtgggggtggtggtgtgggatacatggtggtcaagttgtcagccctgatcagtttggactctgtaactcataggtgcattctttttttctttggtgtctcacaaattacccaattgttgaataaaactataaatatgttaataccagctttttccaataaaataacaaatgttacatcaaaaacgaggt

SEQ ID NO: 422843 - DNA, 4342 bp, Homo sapiens
  misc_feature (163)..(163): n is a, c, g, or t
gcggccgccgcccgcccaccgcgcgctcgcttgaccgcggcgcccgcccccggccgcccccgcccgtccccctgccgcgatgccctcccttcggggccccggcggcccgcgcccctgctaggctgcggcggcatggcccgcgcgcccggcgcgacctctgcgnattgcatcgttgtgtggcggcggggcatgcccagagcaccgggcacggccttcaatgggcgaggacacggacacgcggaaaattaaccacagcttcctgcgggaccacagctatgtgactgaaggtaacgtacgtgttgtctgagacccctccggccggccgcggcgtggggatgccgtcgcaccgaatgccctccgaagctgacatcatctctaccgttgagttcaaccacacgggagagctgctggccacaggtgacaagggcggccgggtcgtcatcttccagcgggaaccagagagtaaaaatgcgccccacagccagggcgaatacgacgtgtacagcactttccagagccacgagccggagtttgactatctcaagagcctggagatagaggagaagatcaacaagatcaagtggctcccacagcagaacgccgcccactcactcctgtccaccaacgataaaactatcaaattatggaagattaccgaacgagataaaaggcccgaaggatacaacctgaaggatgaagaggggaaacttaaggacctgtccacggtgacgtcactgcaggtgccagtgctgaagcccatggatctgatggtggaggtgagccctcggaggatctttgccaatggccacacctaccacatcaactccatctccgtcaacagtgactgcgagacctacatgtcggcggatgacctgcgcatcaacctctggcacctggccatcaccgacaggagcttcaacatcgtggacatcaagccggccaacatggaggaccttacggaggtgatcacagcatctgagttccatccgcaccactgcaacctcttcgtctacagcagcagcaagggctccctgcggctctgcgacatgcgggcagctgccctgtgtgacaagcattccaagctctttgaagagcctgaggaccccagtaaccgctcattcttctcggaaatcatctcctccgtgtccgacgtgaagttcagccacagcggccgctacatgctcacccgggactaccttacagtcaaggtctgggacctgaacatggaggcaagacccatagagacctaccaggtccatgactaccttcggagcaagctctgttccctgtacgagaacgactgcattttcgacaagtttgaatgtgcctggaacgggagcgacagcgtcatcatgaccggggcctacaacaacttcttccgcatgttcgatcggaacaccaagcgggacgtgaccctggaggcctcgagggaaagcagcaagccccgggctgtgctcaagccacggcgcgtgtgcgtggggggcaagcgccggcgtgatgacatcagtgtggacagcttggacttcaccaagaagatcctgcacacggcctggcacccggctgagaacatcattgccatcgccgccaccaacaacctgtacatcttccaggacaaggtaaactctgacatgcactaggtatgtgcagttcccggcccctgccacccagcctcatgcaagtcatccccgacatgaccttcacgaccgcaatgcaaggaggggaagaaagtcacagcactgatgaggacagctgcagaggtggcagtgtgtggacacaggaagtttgggccccctccctgccccagctttcctaggccagaattgtgtttggcagtaattgtctgtttaaaaaaataaaaaggagaggaagcgttcaccgccgcaaatcataaaatggacatgactgtggagtcttacagttcagggttctttcattcacgtcccttcctgtctcggtctgcggtctttaccacatcaataggactttttatgcgtccgggttaatttttcactccagtgtgtcctgttgcagggaccggagctgatgggagctgcttctcccccatgcctcactggtcccagatcagggctccagggacagatgatgagtctcaaacgagccagccaggggttcttttggttataaatggggcaattcgccctgtctcagagctgatgacctcaccgttgttttttggatggtgaattcatgctgagaatttgcagatgcaagctcctctcctaggtcttctgaatgtcttgaaacatcccaggtcccaggtctggtgcggtttcccgagaggagcggagtggggtttgtcttctgtgtgcctgtgtcctcatctgattcacctgccatttgctgagcctctgctgtgtaccaggcgtggtgctcagccctagaggcagttgacttaccccctgcagccctccctgccgcctcacccttcagcattcactgggcaccttcccggagcggacactgactcccatgcacgattttttggaatcttcctcctgactgtgaggtgggtgttcattcatttcctccataaacaccaacttctcgaagcgtgccaggctctgggctggatgctggggataagcgggaacccttaggatcccctctgtccacgagaagaagctgaggctctgagcggatgcacaggtcacccatggcaggtgccgtgcagtggtgtcaggaacccgtccgggtcttcacacaaggttctctccagtccatctcgtgggcggctcatgttagagcgacattcaaatggaaggtttggaaaggaatgcctctgtcttgtgaagtaggacaagggtccgggagaactgagacgcaggatggaagacagagaagaccccccggagctcctcgctctgcttggtggcttcaggagtgcggccctccccaggactccacttcatcctgggcttgcaccctccttgagccaatgcactgaactgcctttgaaaggaaattgcatgttctgaccattttaggatacctttactttaaggaccacacagtcccagaggacacatccctcgggaactctgcccctctgacaatgagggccacagagaaggtggtgtttccatggtagatgctcctgttctggtgataccaaacctgcccacccctctgagtcgtctttgctcatggacttgcagcagaaccacgtagtttggcattttgattcagaaagtggggagcagagacccagccaaatccaaacttttttttggttttgtttgttttgttttttacaagatataacataacccaggaaacagacccagctgaggttattctcagtggattacagtatacttttgtgtgtgtaaaagcacaaagtgcatgtgtactcacttctggccatataacatttacacagggaaatggatcattgatttttttttaatcaacgtgaatgaagaatgtttgtttatatatcactataaaatccagttgacctggacagtattatatgtacatatctattctaattaaatttaacaatcaaaggattggattacttttttcccccttgtaaagaggttcgagaatgtggtcaattgtatagatagcgtgttaaagccaaaacccagctctgagggccttacccattacttggatatttgctacgatccatctccctttgtgagtcaaatgttaagagaagaaacttgtatttgcagctagaggttactgtcacatcatagatttaacatttaccatcttcaaagtacaaatcttacatgtccttcaaaaggaggtcttaatacagttcctagttccttacttctgttttaaactttgggtaccaaaccaaaaagaagaaaaaagaaaggaaaagatcttctttgaagaaaagtatgtctctggatccctggaaaataatgatgtccaaagcaaattgtgaagatcaaatgtgtgttaagaaaaggtgtcgaggggagggacaaaaccagaaacggtggaaggaccagtgtaatagtcacagacttgcatcctggctctgcttacatttcctggtactctcgaatgtacgggcgttcacatagtcattgtgaagttgttggggtttttttggttttgtttttaatttagctcttctctgaggacgaagctgttggtggtggtggtggtgggggtggtggtgtgggatacatggtggtcaagttgtcagccctgatcagtttggactctgtaactcataggtgcattctttttttctttggtgtctcacaaattacccaattgttgaataaaactataaatatgttaataccagctttttccaataaaataacaaatgttacatcaaaaacgaggt

SEQ ID NO: 422844 - DNA, 4212 bp, Homo sapiens
  misc_feature (34)..(34): n is a, c, g, or t
  misc_feature (83)..(83): n is a, c, g, or t
  misc_feature (198)..(198): n is a, c, g, or t
gcggtggtgcagagctgcggcaaagggccctcgncgttggggttcacttctcatcacccagaagcagggagaagggcctgcgntgcacttgggctgccacaccggcctccagacagcacacagcagaagtaaaatagaaagaagaccttttttgaaatgacctgtgttagtcacctctctcaggatgcgtgaggcggncacgttgaggccacctcagctgatggaagtttccgctgacatcatctctaccgttgagttcaaccacacgggagagctgctggccacaggtgacaagggcggccgggtcgtcatcttccagcgggaaccagagagtaaaaatgcgccccacagccagggcgaatacgacgtgtacagcactttccagagccacgagccggagtttgactatctcaagagcctggagatagaggagaagatcaacaagatcaagtggctcccacagcagaacgccgcccactcactcctgtccaccaacgataaaactatcaaattatggaagattaccgaacgagataaaaggcccgaaggatacaacctgaaggatgaagaggggaaacttaaggacctgtccacggtgacgtcactgcaggtgccagtgctgaagcccatggatctgatggtggaggtgagccctcggaggatctttgccaatggccacacctaccacatcaactccatctccgtcaacagtgactgcgagacctacatgtcggcggatgacctgcgcatcaacctctggcacctggccatcaccgacaggagcttcaacatcgtggacatcaagccggccaacatggaggaccttacggaggtgatcacagcatctgagttccatccgcaccactgcaacctcttcgtctacagcagcagcaagggctccctgcggctctgcgacatgcgggcagctgccctgtgtgacaagcattccaagctctttgaagagcctgaggaccccagtaaccgctcattcttctcggaaatcatctcctccgtgtccgacgtgaagttcagccacagcggccgctacatgctcacccgggactaccttacagtcaaggtctgggacctgaacatggaggcaagacccatagagacctaccaggtccatgactaccttcggagcaagctctgttccctgtacgagaacgactgcattttcgacaagtttgaatgtgcctggaacgggagcgacagcgtcatcatgaccggggcctacaacaacttcttccgcatgttcgatcggaacaccaagcgggacgtgaccctggaggcctcgagggaaagcagcaagccccgggctgtgctcaagccacggcgcgtgtgcgtggggggcaagcgccggcgtgatgacatcagtgtggacagcttggacttcaccaagaagatcctgcacacggcctggcacccggctgagaacatcattgccatcgccgccaccaacaacctgtacatcttccaggacaaggtaaactctgacatgcactaggtatgtgcagttcccggcccctgccacccagcctcatgcaagtcatccccgacatgaccttcacgaccgcaatgcaaggaggggaagaaagtcacagcactgatgaggacagctgcagaggtggcagtgtgtggacacaggaagtttgggccccctccctgccccagctttcctaggccagaattgtgtttggcagtaattgtctgtttaaaaaaataaaaaggagaggaagcgttcaccgccgcaaatcataaaatggacatgactgtggagtcttacagttcagggttctttcattcacgtcccttcctgtctcggtctgcggtctttaccacatcaataggactttttatgcgtccgggttaatttttcactccagtgtgtcctgttgcagggaccggagctgatgggagctgcttctcccccatgcctcactggtcccagatcagggctccagggacagatgatgagtctcaaacgagccagccaggggttcttttggttataaatggggcaattcgccctgtctcagagctgatgacctcaccgttgttttttggatggtgaattcatgctgagaatttgcagatgcaagctcctctcctaggtcttctgaatgtcttgaaacatcccaggtcccaggtctggtgcggtttcccgagaggagcggagtggggtttgtcttctgtgtgcctgtgtcctcatctgattcacctgccatttgctgagcctctgctgtgtaccaggcgtggtgctcagccctagaggcagttgacttaccccctgcagccctccctgccgcctcacccttcagcattcactgggcaccttcccggagcggacactgactcccatgcacgattttttggaatcttcctcctgactgtgaggtgggtgttcattcatttcctccataaacaccaacttctcgaagcgtgccaggctctgggctggatgctggggataagcgggaacccttaggatcccctctgtccacgagaagaagctgaggctctgagcggatgcacaggtcacccatggcaggtgccgtgcagtggtgtcaggaacccgtccgggtcttcacacaaggttctctccagtccatctcgtgggcggctcatgttagagcgacattcaaatggaaggtttggaaaggaatgcctctgtcttgtgaagtaggacaagggtccgggagaactgagacgcaggatggaagacagagaagaccccccggagctcctcgctctgcttggtggcttcaggagtgcggccctccccaggactccacttcatcctgggcttgcaccctccttgagccaatgcactgaactgcctttgaaaggaaattgcatgttctgaccattttaggatacctttactttaaggaccacacagtcccagaggacacatccctcgggaactctgcccctctgacaatgagggccacagagaaggtggtgtttccatggtagatgctcctgttctggtgataccaaacctgcccacccctctgagtcgtctttgctcatggacttgcagcagaaccacgtagtttggcattttgattcagaaagtggggagcagagacccagccaaatccaaacttttttttggttttgtttgttttgttttttacaagatataacataacccaggaaacagacccagctgaggttattctcagtggattacagtatacttttgtgtgtgtaaaagcacaaagtgcatgtgtactcacttctggccatataacatttacacagggaaatggatcattgatttttttttaatcaacgtgaatgaagaatgtttgtttatatatcactataaaatccagttgacctggacagtattatatgtacatatctattctaattaaatttaacaatcaaaggattggattacttttttcccccttgtaaagaggttcgagaatgtggtcaattgtatagatagcgtgttaaagccaaaacccagctctgagggccttacccattacttggatatttgctacgatccatctccctttgtgagtcaaatgttaagagaagaaacttgtatttgcagctagaggttactgtcacatcatagatttaacatttaccatcttcaaagtacaaatcttacatgtccttcaaaaggaggtcttaatacagttcctagttccttacttctgttttaaactttgggtaccaaaccaaaaagaagaaaaaagaaaggaaaagatcttctttgaagaaaagtatgtctctggatccctggaaaataatgatgtccaaagcaaattgtgaagatcaaatgtgtgttaagaaaaggtgtcgaggggagggacaaaaccagaaacggtggaaggaccagtgtaatagtcacagacttgcatcctggctctgcttacatttcctggtactctcgaatgtacgggcgttcacatagtcattgtgaagttgttggggtttttttggttttgtttttaatttagctcttctctgaggacgaagctgttggtggtggtggtggtgggggtggtggtgtgggatacatggtggtcaagttgtcagccctgatcagtttggactctgtaactcataggtgcattctttttttctttggtgtctcacaaattacccaattgttgaataaaactataaatatgttaataccagctttttccaataaaataacaaatgttacatcaaaaacgaggt

SEQ ID NO: 422845 - DNA, 3666 bp, Homo sapiens
gcccatcgaggccaaggaattgggcaagaggcttaaggacctgtccacggtgcagtcactgcaggtgccagtgctgaagcccatggatctgatggtggaggtgagccctcggaggatctttgccaatggccacacctaccacatcaactccatctccgtcaacagtgactgcgagacctacatgtcggcggatgacctgcgcatcaacctctggcacctggccatcaccgacaggagcttcaacatcgtggacatcaagccggccaacatggaggaccttacggaggtgatcacagcatctgagttccatccgcaccactgcaacctcttcgtctacagcagcagcaagggctccctgcggctctgcgacatgcgggcagctgccctgtgtgacaagcattccaagctctttgaagagcctgaggaccccagtaaccgctcattcttctcggaaatcatctcctccgtgtccgacgtgaagttcagccacagcggccgctacatgctcacccgggactaccttacagtcaaggtctgggacctgaacatggaggcaagacccatagagacctaccaggtccatgactaccttcggagcaagctctgttccctgtacgagaacgactgcattttcgacaagtttgaatgtgcctggaacgggagcgacagcgtcatcatgaccggggcctacaacaacttcttccgcatgttcgatcggaacaccaagcgggacgtgaccctggaggcctcgagggaaagcagcaagccccgggctgtgctcaagccacggcgcgtgtgcgtggggggcaagcgccggcgtgatgacatcagtgtggacagcttggacttcaccaagaagatcctgcacacggcctggcacccggctgagaacatcattgccatcgccgccaccaacaacctgtacatcttccaggacaaggtaaactctgacatgcactaggtatgtgcagttcccggcccctgccacccagcctcatgcaagtcatccccgacatgaccttcacgaccgcaatgcaaggaggggaagaaagtcacagcactgatgaggacagctgcagaggtggcagtgtgtggacacaggaagtttgggccccctccctgccccagctttcctaggccagaattgtgtttggcagtaattgtctgtttaaaaaaataaaaaggagaggaagcgttcaccgccgcaaatcataaaatggacatgactgtggagtcttacagttcagggttctttcattcacgtcccttcctgtctcggtctgcggtctttaccacatcaataggactttttatgcgtccgggttaatttttcactccagtgtgtcctgttgcagggaccggagctgatgggagctgcttctcccccatgcctcactggtcccagatcagggctccagggacagatgatgagtctcaaacgagccagccaggggttcttttggttataaatggggcaattcgccctgtctcagagctgatgacctcaccgttgttttttggatggtgaattcatgctgagaatttgcagatgcaagctcctctcctaggtcttctgaatgtcttgaaacatcccaggtcccaggtctggtgcggtttcccgagaggagcggagtggggtttgtcttctgtgtgcctgtgtcctcatctgattcacctgccatttgctgagcctctgctgtgtaccaggcgtggtgctcagccctagaggcagttgacttaccccctgcagccctccctgccgcctcacccttcagcattcactgggcaccttcccggagcggacactgactcccatgcacgattttttggaatcttcctcctgactgtgaggtgggtgttcattcatttcctccataaacaccaacttctcgaagcgtgccaggctctgggctggatgctggggataagcgggaacccttaggatcccctctgtccacgagaagaagctgaggctctgagcggatgcacaggtcacccatggcaggtgccgtgcagtggtgtcaggaacccgtccgggtcttcacacaaggttctctccagtccatctcgtgggcggctcatgttagagcgacattcaaatggaaggtttggaaaggaatgcctctgtcttgtgaagtaggacaagggtccgggagaactgagacgcaggatggaagacagagaagaccccccggagctcctcgctctgcttggtggcttcaggagtgcggccctccccaggactccacttcatcctgggcttgcaccctccttgagccaatgcactgaactgcctttgaaaggaaattgcatgttctgaccattttaggatacctttactttaaggaccacacagtcccagaggacacatccctcgggaactctgcccctctgacaatgagggccacagagaaggtggtgtttccatggtagatgctcctgttctggtgataccaaacctgcccacccctctgagtcgtctttgctcatggacttgcagcagaaccacgtagtttggcattttgattcagaaagtggggagcagagacccagccaaatccaaacttttttttggttttgtttgttttgttttttacaagatataacataacccaggaaacagacccagctgaggttattctcagtggattacagtatacttttgtgtgtgtaaaagcacaaagtgcatgtgtactcacttctggccatataacatttacacagggaaatggatcattgatttttttttaatcaacgtgaatgaagaatgtttgtttatatatcactataaaatccagttgacctggacagtattatatgtacatatctattctaattaaatttaacaatcaaaggattggattacttttttcccccttgtaaagaggttcgagaatgtggtcaattgtatagatagcgtgttaaagccaaaacccagctctgagggccttacccattacttggatatttgctacgatccatctccctttgtgagtcaaatgttaagagaagaaacttgtatttgcagctagaggttactgtcacatcatagatttaacatttaccatcttcaaagtacaaatcttacatgtccttcaaaaggaggtcttaatacagttcctagttccttacttctgttttaaactttgggtaccaaaccaaaaagaagaaaaaagaaaggaaaagatcttctttgaagaaaagtatgtctctggatccctggaaaataatgatgtccaaagcaaattgtgaagatcaaatgtgtgttaagaaaaggtgtcgaggggagggacaaaaccagaaacggtggaaggaccagtgtaatagtcacagacttgcatcctggctctgcttacatttcctggtactctcgaatgtacgggcgttcacatagtcattgtgaagttgttggggtttttttggttttgtttttaatttagctcttctctgaggacgaagctgttggtggtggtggtggtgggggtggtggtgtgggatacatggtggtcaagttgtcagccctgatcagtttggactctgtaactcataggtgcattctttttttctttggtgtctcacaaattacccaattgttgaataaaactataaatatgttaataccagctttttccaataaaataacaaatgttacatcaaaaacgaggt

SEQ ID NO: 422846 - DNA, 1161 bp, Homo sapiens
acatgcaaaaagtggggcctggagatggggctgtcttttttctccaaacacttgcccatccaggaaggccagccctgggcattgaagactccagctgacatcatctctaccgttgagttcaaccacacgggagagctgctggccacaggtgacaagggcggccgggtcgtcatcttccagcgggaaccagagagtaaaaatgcgccccacagccagggcgaatacgacgtgtacagcactttccagagccacgagccggagtttgactatctcaagagcctggagatagaggagaagatcaacaagatcaagtggctcccacagcagaacgccgcccactcactcctgtccaccaacgataaaactatcaaattatggaagattaccgaacgagataaaaggcccgaaggatacaacctgaaggatgaagaggggaaacttaaggacctgtccacggtgacgtcactgcaggtgccagtgctgaagcccatggatctgatggtggaggtgagccctcggaggatctttgccaatggccacacctaccacatcaactccatctccgtcaacagtgactgcgagacctacatgtcggcggatgacctgcgcatcaacctctggcacctggccatcaccgacaggagcttcaacatcgtggacatcaagccggccaacatggaggaccttacggaggtgatcacagcatctgagttccatccgcaccactgcaacctcttcgtctacagcagcagcaagggctccctgcggctctgcgacatgcgggcagctgccctgtgtgacaagcattccaagctctttgaagagcctgaggaccccagtaaccgctcattcttctcggaaatcatctcctccgtgtccgacgtgaagttcagccacagcggccgctacatgctcacccgggactaccttacagtcaaggtctgggacctgaacatggaggcaagacccatagagacctaccaggtccatgactaccttcggagcaagctctgttccctgtacgagaacgactgcattttcgacaagtttgaatgtgcctggaacgggagcgacagcgtcatcatgaccggggcctacaacaacttcttccgcatgttcgctaggcgaccatgctgcatcaacacgccggcaaggagagcc

SEQ ID NO: 422847 - DNA, 1498 bp, Homo sapiens
acatgcaaaaagtggggcctggagatggggctgtcttttttctccaaacacttgcccatccaggaaggccagccctgggcattgaagactccagctgacatcatctctaccgttgagttcaaccacacgggagagctgctggccacaggtgacaagggcggccgggtcgtcatcttccagcgggaaccagagagtaaaaatgcgccccacagccagggcgaatacgacgtgtacagcactttccagagccacgagccggagtttgactatctcaagagcctggagatagaggagaagatcaacaagatcaagtggctcccacagcagaacgccgcccactcactcctgtccaccaacgataaaactatcaaattatggaagattaccgaacgagataaaaggcccgaaggatacaacctgaaggatgaagaggggaaacttaaggacctgtccacggtgacgtcactgcaggtgccagtgctgaagcccatggatctgatggtggaggtgagccctcggaggatctttgccaatggccacacctaccacatcaactccatctccgtcaacagtgactgcgagacctacatgtcggcggatgacctgcgcatcaacctctggcacctggccatcaccgacaggagcttcaacatcgtggacatcaagccggccaacatggaggaccttacggaggtgatcacagcatctgagttccatccgcaccactgcaacctcttcgtctacagcagcagcaagggctccctgcggctctgcgacatgcgggcagctgccctgtgtgacaagcattccaagctctttgaagagcctgaggaccccagtaaccgctcattcttctcggaaatcatctcctccgtgtccgacgtgaagttcagccacagcggccgctacatgctcacccgggactaccttacagtcaaggtctgggacctgaacatggaggcaagacccatagagacctaccaggtccatgactaccttcggagcaagctctgttccctgtacgagaacgactgcattttcgacaagtttgaatgtgcctggaacgggagcgacagcgtcatcatgaccggggcctacaacaacttcttccgcatgttcgcttcaagcgtacatgcggtgagtatggggacagtggacatctgggcccctgggggaagggaaggaccccaaatatcaagggcccccaaaggaaggggtgggatgctgagggtcctaaataaggagggggtagggacttggacttctgggtactaggggatgaagacagaggtagaggaggcgctggggcaccccgactcctgggtctttctggagaggggctgggggtctagacacctgggtctgaggggagaggggctggggtctggactcctgggttcccaagaaaggagcagccaggacccggggcacactgagtctacactgcaggaaatgaccggttcacagatgttcacatggggatcactctagagtctac

SEQ ID NO: 422848 - DNA, 1245 bp, Homo sapiens
acatgcaaaaagtggggcctggagatggggctgtcttttttctccaaacacttgcccatccaggaaggccagccctgggcattgaagactccagctgacatcatctctaccgttgagttcaaccacacgggagagctgctggccacaggtgacaagggcggccgggtcgtcatcttccagcgggaaccagagagtaaaaatgcgccccacagccagggcgaatacgacgtgtacagcactttccagagccacgagccggagtttgactatctcaagagcctggagatagaggagaagatcaacaagatcaagtggctcccacagcagaacgccgcccactcactcctgtccaccaacgataaaactatcaaattatggaagattaccgaacgagataaaaggcccgaaggatacaacctgaaggatgaagaggggaaacttaaggacctgtccacggtgacgtcactgcaggtgccagtgctgaagcccatggatctgatggtggaggtgagccctcggaggatctttgccaatggccacacctaccacatcaactccatctccgtcaacagtgactgcgagacctacatgtcggcggatgacctgcgcatcaacctctggcacctggccatcaccgacaggagcttcaacatcgtggacatcaagccggccaacatggaggaccttacggaggtgatcacagcatctgagttccatccgcaccactgcaacctcttcgtctacagcagcagcaagggctccctgcggctctgcgacatgcgggcagctgccctgtgtgacaagcattccaagctctttgaagagcctgaggaccccagtaaccgctcattcttctcggaaatcatctcctccgtgtccgacgtgaagttcagccacagcggccgctacatgctcacccgggactaccttacagtcaaggtctgggacctgaacatggaggcaagacccatagagacctaccaggtccatgactaccttcggagcaagctctgttccctgtacgagaacgactgcattttcgacaagtttgaatgtgcctggaacgggagcgacagcgtcatcatcaatgcggttagatccctggccctgctccgtgggttaaggatctggagttgccttgagctatggtataggtggcggatgcagatcggatctggcgtggcaggaaattaagatcagagcgatgaagggccggaggcgaggaatgcaagcagcctctagaag

SEQ ID NO: 422849 - DNA, 1384 bp, Homo sapiens
acatgcaaaaagtggggcctggagatggggctgtcttttttctccaaacacttgcccatccaggaaggccagccctgggcattgaagactccagctgacatcatctctaccgttgagttcaaccacacgggagagctgctggccacaggtgacaagggcggccgggtcgtcatcttccagcgggaaccagagagtaaaaatgcgccccacagccagggcgaatacgacgtgtacagcactttccagagccacgagccggagtttgactatctcaagagcctggagatagaggagaagatcaacaagatcaagtggctcccacagcagaacgccgcccactcactcctgtccaccaacgataaaactatcaaattatggaagattaccgaacgagataaaaggcccgaaggatacaacctgaaggatgaagaggggaaacttaaggacctgtccacggtgacgtcactgcaggtgccagtgctgaagcccatggatctgatggtggaggtgagccctcggaggatctttgccaatggccacacctaccacatcaactccatctccgtcaacagtgactgcgagacctacatgtcggcggatgacctgcgcatcaacctctggcacctggccatcaccgacaggagcttcaacatcgtggacatcaagccggccaacatggaggaccttacggaggtgatcacagcatctgagttccatccgcaccactgcaacctcttcgtctacagcagcagcaagggctccctgcggctctgcgacatgcgggcagctgccctgtgtgacaagcattccaagctctttgaagagcctgaggaccccagtaaccgctcattcttctcggaaatcatctcctccgtgtccgacgtgaagttcagccacagcggccgctacatgctcacccgggactaccttacagtcaaggtctgggacctgaacatggaggcaagacccatagagacctaccaggtgggcaccacagcaggagacccccaatcccgggtcttttttccctatgctgagatccccatggagggggccttcctagccaggcgtggctttcatatgcccagtatgtaggtgaagacacggaggctgaagaaatccagcaactcatccccacacgtagcttggcagagggcaggagtgctcagtcttgcctcacagggagctttggatgtccctgagcaaggcctgcagtccagggcccaggggcctcaattccagggaggaaagagatgtgggaacagagatgagcgtcaggctgggccccagtggagcatgtagacgatggcttccctccccactccctgggagcctgcatcggagctgtaccattaaagagggttaagcgttgccctcccagggt

SEQ ID NO: 422850 - DNA, 443 bp, Homo sapiens
ctcatgttagagcgacattcaaatggaaggtttggaaaggaatgcctctgtcttgtgaagtaggacatggcagacttggcgacgacaagggtccgggagaactgagacgcaggatggaagacagagaagaccccccggagctcctcgctctgcttggtggcttcaggagtgcggccctccccaggactccacttcatcctgggcttgcaccctccttgagccaatgcactgaactgcctttgaaaggaaattgcatgttctgaccattttaggatacctttactttaaggaccacacagtcccagaggacacatccctcgggaactctgcccctctgacaatgagggccacagagaaggtggtgtttccatggtagatgctcctgttctggtgataccaaacctgcccacccctctgagtcgtctttgctcatggacttgcag

SEQ ID NO: 422851 - DNA, 429 bp, Homo sapiens
atcattgatttttttttaatcaacgtgaatgaagaatgtttgtttatatatcactataaaatccagttgacctggacagtattatatgtacatatctattctaattaaatttaacaatcaaaggattggattacttttttcccccttgtaaagaggttcgagaatgtggtcaattgtatagatagcgtgttaaagccaaaacccagctctgagggccttacccattacttggatatttgctacgatccatctccctttgtgagtcaaatgttaagagaagaaacttgtatttgcagctagaggttactgtcacatcatagatttaacatttaccatcttcaaagtacaaatcttacatgtccttcaaaaggaggtcttaatacagttcctagttccttacttctgttttaaactttgggtaccaaacca

SEQ ID NO: 422852 - DNA, 2035 bp, Homo sapiens
aaagcaggggaaggtatttccccaaagcctgcttttcctctctctgttctccttgggaaaataatgattccaattaaagaggacaccagtaatactgacccacaaggtaactgacctaaacactataaaactgtatatatttccaggctgcatcttcagcctgatatgtactttgtagttgcaacagcgccctaggtgccctatggcccaccaagtttgaggagggtggtgctttccggattgagcctgggcaggctctgtggagctcaccaagagagctgggggcaggcccaccctcctctttgcgccctttctctccctcttggtgcccctgccctccgccccaccacagcactctcaggaaaggatcagaatgcaggatctttgtgtatttcttccagggatatttgcatttaagccttaattctcattgcaagcgaaaggcttggtccccctgggaaggcgggtttcggcaccggtgggcaggtggttcagtgtcaaggaggctgctgctggtcccatggccacctgctggctttgaggtagtgagggagggtcaatccttagggggagtcaacatgtgaatgctaaagaacactgctgcacagcccgtggggtggcgccagggtttctcaacctctactgacattttgcgataggttctgtatgccgtaggatgtttagcaacatccctggtctctacccatcatctgccagtagcaacccccaagttaggtgtgacaaccaaaagtatctgtcgacattgctaggtatctcctgggggcctccacaagttgagaaccaccaggttatgccagtggtttgtcatgcatggatctgtagagggactgtggcgctccggctgctttgttccatagaaagcctgtatgtgacaaagctgccagcctttatcttgatacccaagcccaggattttccatgtgtcttcagggggcaggtaggggaaaatggggtgagccacctccaacagatgccaacctgttgggtcttgaattttcactcactgaagatgccccctgcccgctccccacttcctagaaagcaaaactcgttacctttgttttccttggccacattttactggaagcaacaggaacttcttaatgggtttgtggccctcaattggtttttaaaaaaatctaacagatcttattggcaaatattcaagatggtgatgctggaaaatttcaggacttttcttttgcaagtgagccggtagctgtgtttgttgaccacattctttggcagttcctcccagaagatcaaaggatcctgcagctttaacctaatatctaggctgtaaaaatatgagggcaggtttcgggcaggatgtattgatcagacaccaagttcagccctcggttacttccctcttttaacctggctttaatagtgattcatggtatgagtgggggccaatctcttatcctttctgtgcctcagtatccccacctgaaatgagactagtcatactaacctacctcctctgatgtattgtgaggattatacaataacatttttaaagaaaaaaagtgcagtctttcatctctggcatctaagctaatgattcccattcagtgactcaaacctgtggggggcgttccagtgttctctgaccagtgtcttccatccaagcctccttgtgaccagggcaaggagctgcctggcctccagtgggtaaaatagacctttaagacaggtttcctatgaccatagaaagtaacaccccatatgtttccattcccggcgaggcctgtttgaatggcgctctgtgtgagtgctatgaacaggctacctgtcagcagtctcactgcgaggcctcaaggctctgtgagcagaagcccctttaaaccaaggaaggacactaacccaggcctctgccttctttgttacctaagttctggtatctaaggggtctctcatctcacagcttgcctcctttgtttcgaggggtctctgcagtgtgaatgggtttgaaatccagtgtggatagcacgaagagatgcaactgagcc

SEQ ID NO: 422853 - DNA, 2260 bp, Homo sapiens
ctcctcctgccgctgccgctgctttggctgctgcgtcatacgccccagagccgccgggacggaggggctgggcctggggaccccccggcctccgcctgcacgcccccccacgcccggacgtgccctctccgcgcgggggactcgcctaggtctcctacgtctgcccctgcccggctcccggcggccccagctgtcaccggcccccccaggatgcaatggcgcagcccccccggctgagccgctctggtgcctcctcactttgggacccagcttctcctgctcccacctctggccccaggcctcggctttgggagggtcaagatgtgctggccagatggactgatgggctgctatacttgggtaccatcaaaaaggtggacagtgctagggaggtgtgtctggtccagtttgaggatgattcgcagtttctggttctatggaaagacattagccctgctgccctccctggagaggaactcctctgttgtgtctgtcgctctgagactgtggtccctgggaaccggctggtcagctgtgagaagtgtcgccatgcttatcaccaggactgccatgttcccagggctccagcccctggagagggagagggcacatcctgggtatgccgccagtgtgtctttgcgatcgccaccaagaggggaggtgccctgaagaagggcccctatgcccgggccatgctgggtatgaagctttctctgccatatggactgaaggggctggactgggatgctggacatctgagcaaccgacagcagagttactgttactgtggtggccctggggagtggaacctgaaaatgctgcagtgccggagctgcctgcagtggttccatgaggcctgcacccagtgtctgagcaagcccctcctctatggggacaggttctatgaatttgaatgctgtgtgtgtcgcgggggccctgagaaagtccggagactacagcttcgctgggtggatgtggcccatcttgtcctgtatcacctcagtgtttgctgtaagaagaaatactttgattttgatcgtgagatcctccccttcacttctgagaattgggacagtttgctcctgggggagctttcagacacccccaaaggagaacgttcttccaagctcctctctgctcttaacagccacaaggaccgtttcatttcagggagagagattaagaagaggaaatgtttgtttggtctccatgctcggatgcctccccctgtggagccccctactggagatggagcactcaccagcttcccttcagggcagggccctgggggaggggtctcacgtcccctggggaagcgccggaggccggagccagagcccctgaggaggaggcagaaggggaaagtggaggagctggggccaccctcagcagtgcgcaatcagcccgagccccaggagcagagggagcgggctcatctgcagagggcactgcaggcctcagtgtctccaccatcccccagccctaaccagagttaccagggcagcagcggctacaacttccggcccacagatgcccgctgcctgcccagcagccccatccggatgtttgcttccttccacccttctgccagcaccgcagggacctctggggacagtggacccccagacaggtcacccctggaacttcacattggtttccccacagacatccctaaaagtgccccccactcgatgactgcctcatcttcctcagtttcatccccatccccaggtcttcctagacgctcagcacccccttctcccctgtgccgtagtttgtctcctgggactgggggaggagtccgaggtggggttggttacctgtcccgaggggaccctgtccgggtccttgctcggagagtacggcctgatggctctgtgcagtacctggttgagtggggaggagggggcatcttctgaacagcctgcctctgcccagctccccattcacacacaccggcactttcataccctgacctctgacctcacctacagctgggatgtacctggagagatagggggtagttctccctactgcccaggctggaatccaagagtggggagtggggaagaggccctcttctctaccctccttcatgattcctgacccctcccatccttcccatttcctttgatgttattttgttacagctttttaaatattttttaaaattatttaacccctgggggcagagactgaggagggaggatgataagggatcccggactctgtatgattgaaataaagagaaataaacaaa

SEQ ID NO: 422854 - DNA, 2165 bp, Homo sapiens
ctcctcctgccgctgccgctgctttggctgctgcgtcatacgccccagagccgccgggacggaggggctgggcctggggaccccccggcctccgcctgcacgcccccccacgcccggacgtgccctctccgcgcgggggactcgcctaggtctcctacgtctgcccctgcccggctcccggcggccccagctgtcaccggcccccccaggatgcaatggcgcagcccccccggctgagccgctctggtgcctcctcactttgggacccagcttctcctgctcccacctctggccccaggcctcggctttgggagggtcaagatgtgctggccagatggactgatgggctgctatacttgggtaccatcaaaaaggtggacagtgctagggaggtgtgtctggtccagtttgaggatgattcgcagtttctggttctatggaaagacattagccctgctgccctccctggagaggaactcctctgttgtgtctgtcgctctgagactgtggtccctgggaaccggctggtcagctgtgagaagtgtcgccatgcttatcaccaggactgccatgttcccagggctccagcccctggagagggagagggcacatcctgggtatgccgccagtgtgtctttgcgatcgccaccaagaggggaggtgccctgaagaagggcccctatgcccgggccatgctgggtatgaagctttctctgccatatggactgaaggggctggactgggatgctggacatctgagcaaccgacagcagagttactgttactgtggtggccctggggagtggaacctgaaaatgctgcagtgccggagctgcctgcagtggttccatgaggcctgcacccagtgtctgagcaagcccctcctctatggggacaggttctatgaatttgaatgctgtgtgtgtcgcgggggccctgagaaagtccggagactacagcttcgctgggtggatgtggcccatcttgtcctgtatcacctcagtgtttgctgtaagaagaaatactttgattttgatcgtgagatcctccccttcacttctgagaattgggacagtttgctcctgggggagctttcagacacccccaaaggagaacgttcttccaagctcctctctgctcttaacagccacaaggaccgtttcatttcagggagagagattaagaagaggaaatgtttgtttggtctccatgctcggatgcctccccctgtggagccccctactggagatggagcactcaccagcttcccttcagggcagggccctgggggaggggtctcacgtcccctggggaagcgccggaggccggagccagagcccctgaggaggaggcagaaggggaaagtggaggagctggggccaccctcagcagtgcgcaatcagcccgagccccaggagcagagggagcgggctcatctgcagagggcactgcagcagccccatccggatgtttgcttccttccacccttctgccagcaccgcagggacctctggggacagtggacccccagacaggtcacccctggaacttcacattggtttccccacagacatccctaaaagtgccccccactcgatgactgcctcatcttcctcagtttcatccccatccccaggtcttcctagacgctcagcacccccttctcccctgtgccgtagtttgtctcctgggactgggggaggagtccgaggtggggttggttacctgtcccgaggggaccctgtccgggtccttgctcggagagtacggcctgatggctctgtgcagtacctggttgagtggggaggagggggcatcttctgaacagcctgcctctgcccagctccccattcacacacaccggcactttcataccctgacctctgacctcacctacagctgggatgtacctggagagatagggggtagttctccctactgcccaggctggaatccaagagtggggagtggggaagaggccctcttctctaccctccttcatgattcctgacccctcccatccttcccatttcctttgatgttattttgttacagctttttaaatattttttaaaattatttaacccctgggggcagagactgaggagggaggatgataagggatcccggactctgtatgattgaaataaagagaaataaacaaa

SEQ ID NO: 422855 - DNA, 2113 bp, Homo sapiens
agtagaagagcgatgttgagagctaaggtcgggccggtgatgtagagggtgatggtagatgtggcggcttaagggaccccccaaggtcccttaagcctggtgcctcctcactttgggacccagcttctcctgctcccacctctggccccaggcctcggctttgggagggtcaagatgtgctggccagatggactgatgggctgctatacttgggtaccatcaaaaaggtggacagtgctagggaggtgtgtctggtccagtttgaggatgattcgcagtttctggttctatggaaagacattagccctgctgccctccctggagaggaactcctctgttgtgtctgtcgctctgagactgtggtccctgggaaccggctggtcagctgtgagaagtgtcgccatgcttatcaccaggactgccatgttcccagggctccagcccctggagagggagagggcacatcctgggtatgccgccagtgtgtctttgcgatcgccaccaagaggggaggtgccctgaagaagggcccctatgcccgggccatgctgggtatgaagctttctctgccatatggactgaaggggctggactgggatgctggacatctgagcaaccgacagcagagttactgttactgtggtggccctggggagtggaacctgaaaatgctgcagtgccggagctgcctgcagtggttccatgaggcctgcacccagtgtctgagcaagcccctcctctatggggacaggttctatgaatttgaatgctgtgtgtgtcgcgggggccctgagaaagtccggagactacagcttcgctgggtggatgtggcccatcttgtcctgtatcacctcagtgtttgctgtaagaagaaatactttgattttgatcgtgagatcctccccttcacttctgagaattgggacagtttgctcctgggggagctttcagacacccccaaaggagaacgttcttccaagctcctctctgctcttaacagccacaaggaccgtttcatttcagggagagagattaagaagaggaaatgtttgtttggtctccatgctcggatgcctccccctgtggagccccctactggagatggagcactcaccagcttcccttcagggcagggccctgggggaggggtctcacgtcccctggggaagcgccggaggccggagccagagcccctgaggaggaggcagaaggggaaagtggaggagctggggccaccctcagcagtgcgcaatcagcccgagccccaggagcagagggagcgggctcatctgcagagggcactgcaggcctcagtgtctccaccatcccccagccctaaccagagttaccagggcagcagcggctacaacttccggcccacagatgcccgctgcctgcccagcagccccatccggatgtttgcttccttccacccttctgccagcaccgcagggacctctggggacagtggacccccagacaggtcacccctggaacttcacattggtttccccacagacatccctaaaagtgccccccactcgatgactgcctcatcttcctcagtttcatccccatccccaggtcttcctagacgctcagcacccccttctcccctgtgccgtagtttgtctcctgggactgggggaggagtccgaggtggggttggttacctgtcccgaggggaccctgtccgggtccttgctcggagagtacggcctgatggctctgtgcagtacctggttgagtggggaggagggggcatcttctgaacagcctgcctctgcccagctccccattcacacacaccggcactttcataccctgacctctgacctcacctacagctgggatgtacctggagagatagggggtagttctccctactgcccaggctggaatccaagagtggggagtggggaagaggccctcttctctaccctccttcatgattcctgacccctcccatccttcccatttcctttgatgttattttgttacagctttttaaatattttttaaaattatttaacccctgggggcagagactgaggagggaggatgataagggatcccggactctgtatgattgaaataaagagaaataaacaaa

SEQ ID NO: 422856 - DNA, 2647 bp, Homo sapiens
ctcctcctgccgctgccgctgctttggctgctgcgtcatacgccccagagccgccgggacggaggggctgggcctggggaccccccggcctccgcctgcacgcccccccacgcccggacgtgccctctccgcgcgggggactcgcctaggtctcctacgtctgcccctgcccggctcccggcggccccagctgtcaccggcccccccaggatgcaatggcgcagcccccccggctgagccgctctggtgcctcctcactttgggacccagcttctcctgctcccacctctggccccaggcctcggctttgggagggtcaagatgtgctggccagatggactgatgggctgctatacttgggtaccatcaaaaaggtggacagtgctagggaggtgtgtctggtccagtttgaggatgattcgcagtttctggttctatggaaagacattagccctgctgccctccctggagaggaactcctctgttgtgtctgtcgctctgagactgtggtccctgggaaccggctggtcagctgtgagaagtgtcgccatgcttatcaccaggactgccatgttcccagggctccagcccctggagagggagagggcacatcctgggtatgccgccagtgtgtctttgcgatcgccaccaagaggggaggtgccctgaagaagggcccctatgcccgggccatgctgggtatgaagctttctctgccatatggactgaaggggctggactgggatgctggacatctgagcaaccgacagcagagttactgttactgtggtggccctggggagtgagtaatgagaggggagcagactgtggaatgaatgatgtggtggtggatcccaggaaatgaaggaaaaagaacaggatgagggtagcactcagggggataggaggtaagtttagggtttgggacagttatggggaagggggtttctggaggccagaagtcctgtgttccccctcaggtggaacctgaaaatgctgcagtgccggagctgcctgcagtggttccatgaggcctgcacccagtgtctgagcaagcccctcctctatggggacaggtgagaccaaggcagactctctaggagccaaggatgccctctttcttcgtgttccaccctcagttctcccacgcccttctccactccagtctcttcccaacctctgcagcgttacctcacctgtttgccccgtccttgcttgtgagtcttccaggggatggcacagttttcctgtgtaagtgtgtttgctccctcttgcccatgtccaggttctatgaatttgaatgctgtgtgtgtcgcgggggccctgagaaagtccggagactacagcttcgctgggtggatgtggcccatcttgtcctgtatcacctcagtgtttgctgtaagaagaaatactttgattttgatcgtgagatcctccccttcacttctgagaattgggacagtttgctcctgggggagctttcagacacccccaaaggagaacgttcttccaagctcctctctgctcttaacagccacaaggaccgtttcatttcagggagagagattaagaagaggaaatgtttgtttggtctccatgctcggatgcctccccctgtggagccccctactggagatggagcactcaccagcttcccttcagggcagggccctgggggaggggtctcacgtcccctggggaagcgccggaggccggagccagagcccctgaggaggaggcagaaggggaaagtggaggagctggggccaccctcagcagtgcgcaatcagcccgagccccaggagcagagggagcgggctcatctgcagagggcactgcaggcctcagtgtctccaccatcccccagccctaaccagagttaccagggcagcagcggctacaacttccggcccacagatgcccgctgcctgcccagcagccccatccggatgtttgcttccttccacccttctgccagcaccgcagggacctctggggacagtggacccccagacaggtcacccctggaacttcacattggtttccccacagacatccctaaaagtgccccccactcgatgactgcctcatcttcctcagtttcatccccatccccaggtcttcctagacgctcagcacccccttctcccctgtgccgtagtttgtctcctgggactgggggaggagtccgaggtggggttggttacctgtcccgaggggaccctgtccgggtccttgctcggagagtacggcctgatggctctgtgcagtacctggttgagtggggaggagggggcatcttctgaacagcctgcctctgcccagctccccattcacacacaccggcactttcataccctgacctctgacctcacctacagctgggatgtacctggagagatagggggtagttctccctactgcccaggctggaatccaagagtggggagtggggaagaggccctcttctctaccctccttcatgattcctgacccctcccatccttcccatttcctttgatgttattttgttacagctttttaaatattttttaaaattatttaacccctgggggcagagactgaggagggaggatgataagggatcccggactctgtatgattgaaataaagagaaataaacaaa

SEQ ID NO: 422857 - DNA, 1801 bp, Homo sapiens
ctcctcctgccgctgccgctgctttggctgctgcgtcatacgccccagagccgccgggacggaggggctgggcctggggaccccccggcctccgcctgcacgcccccccacgcccggacgtgccctctccgcgcgggggactcgcctaggtctcctacgtctgcccctgcccggctcccggcggccccagctgtcaccggcccccccaggatgcaatggcgcagcccccccggctgagccgctctggtgcctcctcactttgggacccagcttctcctgctcccacctctggccccaggcctcggctttgggagggtcaagatgtgctggccagatggactgatgggctgctatacttgggtaccatcaaaaaggtggacagtgctagggaggtgtgtctggtccagtttgaggatgattcgcagtttctggttctatggaaagacattagccctgctgccctccctggagaggaactcctctgttgtgtctgtcgctctgagactgtggtccctgggaaccggctggtcagctgtgagaagtgtcgccatgcttatcaccaggactgccatgttcccagggctccagcccctggagagggagagggcacatcctgggtatgccgccagtgtgtctttgcgatcgccaccaagaggggaggtgccctgaagaagggcccctatgcccgggccatgctgggtatgaagctttctctgccatatggactgaaggggctggactgggatgctggacatctgagcaaccgacagcagagttactgttactgtggtggccctggggagtgagtaatgagaggggagcagactgtggaatgaatgatgtggtggtggatcccaggaaatgaaggaaaaagaacaggatgagggaggaggcagaaggggaaagtggaggagctggggccaccctcagcagtgcgcaatcagcccgagccccaggagcagagggagcgggctcatctgcagagggcactgcaggcctcagtgtctccaccatcccccagccctaaccagagttaccagggcagcagcggctacaacttccggcccacagatgcccgctgcctgcccagcagccccatccggatgtttgcttccttccacccttctgccagcaccgcagggacctctggggacagtggacccccagacaggtcacccctggaacttcacattggtttccccacagacatccctaaaagtgccccccactcgatgactgcctcatcttcctcagtttcatccccatccccaggtcttcctagacgctcagcacccccttctcccctgtgccgtagtttgtctcctgggactgggggaggagtccgaggtggggttggttacctgtcccgaggggaccctgtccgggtccttgctcggagagtacggcctgatggctctgtgcagtacctggttgagtggggaggagggggcatcttctgaacagcctgcctctgcccagctccccattcacacacaccggcactttcataccctgacctctgacctcacctacagctgggatgtacctggagagatagggggtagttctccctactgcccaggctggaatccaagagtggggagtggggaagaggccctcttctctaccctccttcatgattcctgacccctcccatccttcccatttcctttgatgttattttgttacagctttttaaatattttttaaaattatttaacccctgggggcagagactgaggagggaggatgataagggatcccggactctgtatgattgaaataaagagaaataaacaaa

SEQ ID NO: 422858 - DNA, 915 bp, Homo sapiens
tcctcctccccactcacccaggtactgcacagagccatcaagccgtactctccgagcaaggacccggacagggtcccctcgggacaggtaaccaaccccacctcggactgcctcagtgtctccaccatcccccagccctaaccagagttaccagggcagcagcggctacaacttccggcccacagatgcccgctgcctgcccagcagccccatccggatgtttgcttccttccacccttctgccagcaccgcagggacctctggggacagtggacccccagacaggtcacccctggaacttcacattggtttccccacagacatccctaaaagtgccccccactcgatgactgcctcatcttcctcagtttcatccccatccccaggtcttcctagacgctcagcacccccttctcccctgtgccgtagtttgtctcctgggactgggggaggagtccgaggtggggttggttacctgtcccgaggggaccctgtccgggtccttgctcggagagtacggcctgatggctctgtgcagtacctggttgagtggggaggagggggcatcttctgaacagcctgcctctgcccagctccccattcacacacaccggcactttcataccctgacctctgacctcacctacagctgggatgtacctggagagatagggggtagttctccctactgcccaggctggaatccaagagtggggagtggggaagaggccctcttctctaccctccttcatgattcctgacccctcccatccttcccatttcctttgatgttattttgttacagctttttaaatattttttaaaattatttaacccctgggggcagagactgaggagggaggatgataagggatcccggactctgtatgattgaaataaagagaaataaacaaa

SEQ ID NO: 422859 - DNA, 2157 bp, Homo sapiens
ctcctcctgccgctgccgctgctttggctgctgcgtcatacgccccagagccgccgggacggaggggctgggcctggggaccccccggcctccgcctgcacgcccccccacgcccggacgtgccctctccgcgcgggggactcgcctaggtctcctacgtctgcccctgcccggctcccggcggccccagctgtcaccggcccccccaggatgcaatggcgcagcccccccggctgagccgctctggtgcctcctcactttgggacccagcttctcctgctcccacctctggccccaggcctcggctttgggagggtcaagatgtgctggccagatggactgatgggctgctatacttgggtaccatcaaaaaggtggacagtgctagggaggtgtgtctggtccagtttgaggatgattcgcagtttctggttctatggaaagacattagccctgctgccctccctggagaggaactcctctgttgtgtctgtcgctctgagactgtggtccctgggaaccggctggtcagctgtgagaagtgtcgccatgcttatcaccaggactgccatgttcccagggctccagcccctggagagggagagggcacatcctgggtatgccgccagtgtgtctttgcgatcgccaccaagaggggaggtgccctgaagaagggcccctatgcccgggccatgctgggtatgaagctttctctgccatatggactgaaggggctggactgggatgctggacatctgagcaaccgacagcagagttactgttactgtggtggccctggggagtggaacctgaaaatgctgcagtgccggagctgcctgcagtggttccatgaggcctgcacccagtgtctgagcaagcccctcctctatggggacaggttctatgaatttgaatgctgtgtgtgtcgcgggggccctgagaaagtccggagactacagcttcgctgggtggatgtggcccatcttgtcctgtatcacctcagtgtttgctgtaagaagaaatactttgattttgatcgtgagatcctccccttcacttctgagaattgggacagtttgctcctgggggagctttcagacacccccaaaggagaacgttcttccaagctcctctctgctcttaacagccacaaggaccgtttcatttcagggagagagattaagaagaggaaatgtttgtttggtctccatgctcggatgcctccccctgtggagccccctactggagatggagcactcaccagcttcccttcagggcagggccctgggggaggggtctcacgtcccctggggaagcgccggaggccggagccagagcccctgaggaggaggcagaaggggaaagtggaggagctggggccaccctcagcagtgcgcaatcagcccgagccccaggagcagagggagcgggctcatctgcagagggcactgcaggcctcagtgtctccaccatcccccagccctaaccagagttaccagggcagcagcggctacaacttccggcccacagatgcccgctgcctgcccagcagccccatccggatgtttgcttccttccacccttctgccagcaccgcagggacctctggggacagtggacccccagacaggtcacccctggaacttcacattggtttccccacagacatccctaaaagtgccccccactcgatgactgcctcatcttcctcagtttcatccccatccccaggtcttcctagacgctcagcacccccttctcccctgatggctctgtgcagtacctggttgagtggggaggagggggcatcttctgaacagcctgcctctgcccagctccccattcacacacaccggcactttcataccctgacctctgacctcacctacagctgggatgtacctggagagatagggggtagttctccctactgcccaggctggaatccaagagtggggagtggggaagaggccctcttctctaccctccttcatgattcctgacccctcccatccttcccatttcctttgatgttattttgttacagctttttaaatattttttaaaattatttaacccctgggggcagagactgaggagggaggatgataagggatcccggactctgtatgattgaaataaagagaaataaacaaa

SEQ ID NO: 422860 - DNA, 314 bp, Homo sapiens
gtaaagactattcctgtcccaataccaagcacacacaggtatgcaataagtggtctactattatcactgcagcttatcaccaggactgccatgttcccagggctccagcccctggagagggagagggcacatcctgggtatgccgccagtgtgtctttgcgatcgccaccaaggtaaaggcacttccctgttacccttcctgtgggagcctcccatccacagcctctcccaagccttttcctctccccacccctctgaagccacccacctgtcctgtctctgcagaggggaggtgccctgaagaagggccccta

SEQ ID NO: 422861 - DNA, 249 bp, Homo sapiens
gactcccctggctcttaaaatgcctctgtggtcttgaaaactttgtttttccagggtggatgtggcccatcttgtcctgtatcacctcagtgtttgctgtaagaagaaatactttgattttgatcgtgagatcctccccttcacttctgagaattgggacagtttgctcctgggggaggtaaggggtagtgcagttttgggggttgggatgggacagggagatgtagcggaaaggggaagagaagaaat

SEQ ID NO: 422862 - DNA, 358 bp, Homo sapiens
gaggaatggcgtaaggaggaaccgttttttacagcactgaccctatatcatttctcttcttgccccagtttcatttcagggagagagattaagaagaggaaatgtttgtttggtctccatgctcggatgcctccccctgtggagccccctactggagatggagcactcaccaggtcactggtccaggggggatgggggaaattctcagggtgttagtcctggggggtatatgtatagagatggggaggtcttgggggtgtccgggagggggctggggggataaggaggcctcttacagcttcccttcagggcagggccctgggggaggggtctcacgtcccctggggaagcgccggag

SEQ ID NO: 422863 - DNA, 495 bp, Homo sapiens
ctcctcctgccgctgccgctgctttggctgctgcgtcatacgccccagagccgccgggacggaggggctgggcctggggaccccccggcctccgcctgcacgcccccccacgcccggacgtgccctctccgcgcgggggactcgcctaggtctcctacgtctgcccctgcccggctcccggcggccccagctgtcaccggcccccccaggatgcaatggcgcagcccccccggctgagccgctctggtgcctcctcactttgggacccagcttctcctgctcccacaagagtggggagtggggaagaggccctcttctctaccctccttcatgattcctgacccctcccatccttcccatttcctttgatgttattttgttacagctttttaaatattttttaaaattatttaacccctgggggcagagactgaggagggaggatgataagggatcccggactctgtatgattgaaataaagagaaataaacaaa

SEQ ID NO: 422864 - DNA, 2385 bp, Homo sapiens
ctcctcctgccgctgccgctgctttggctgctgcgtcatacgccccagagccgccgggacggaggggctgggcctggggaccccccggcctccgcctgcacgcccccccacgcccggacgtgccctctccgcgcgggggactcgcctaggtctcctacgtctgcccctgcccggctcccggcggccccagctgtcaccggcccccccaggatgcaatggcgcagcccccccggctgagccgctctggtgcctcctcactttgggacccagcttctcctgctcccacctctggccccaggcctcggctttgggagggtcaagatgtgctggccagatggactgatgggctgctatacttgggtaccatcaaaaaggtggacagtgctagggaggtgtgtctggtccagtttgaggatgattcgcagtttctggttctatggaaagacattagccctgctgccctccctggagaggaactcctctgttgtgtctgtcgctctgagactgtggtccctgggaaccggctggtcagctgtgagaagtgtcgccatgcttatcaccaggactgccatgttcccagggctccagcccctggagagggagagggcacatcctgggtatgccgccagtgtgtctttgcgatcgccaccaagaggggaggtgccctgaagaagggcccctatgcccgggccatgctgggtatgaagctttctctgccatatggactgaaggggctggactgggatgctggacatctgagcaaccgacagcagagttactgttactgtggtggccctggggagtggaacctgaaaatgctgcagtgccggagctgcctgcagtggttccatgaggcctgcacccagtgtctgagcaagcccctcctctatggggacaggttctatgaatttgaatgctgtgtgtgtcgcgggggccctgagaaagtccggagactacagcttcgctgggtggatgtggcccatcttgtcctgtatcacctcagtgtttgctgtaagaagaaatactttgattttgatcgtgagatcctccccttcacttctgagaattgggacagtttgctcctgggggagctttcagacacccccaaaggagaacgttcttccaagctcctctctgctcttaacagccacaaggaccgtttcatttcagggagagagattaagaagaggaaatgtttgtttggtctccatgctcggatgcctccccctgtggagccccctactggagatggagcactcaccaggtcactggtccaggggggatgggggaaattctcagggtgttagtcctggggggtatatgtatagagatggggaggtcttgggggtgtccgggagggggctggggggataaggaggcctcttacagcttcccttcagggcagggccctgggggaggggtctcacgtcccctggggaagcgccggaggccggagccagagcccctgaggaggaggcagaaggggaaagtggaggagctggggccaccctcagcagtgcgcaatcagcccgagccccaggagcagagggagcgggctcatctgcagagggcactgcaggcctcagtgtctccaccatcccccagccctaaccagagttaccagggcagcagcggctacaacttccggcccacagatgcccgctgcctgcccagcagccccatccggatgtttgcttccttccacccttctgccagcaccgcagggacctctggggacagtggacccccagacaggtcacccctggaacttcacattggtttccccacagacatccctaaaagtgccccccactcgatgactgcctcatcttcctcagtttcatccccatccccaggtcttcctagacgctcagcacccccttctcccctgtgccgtagtttgtctcctgggactgggggaggagtccgaggtggggttggttacctgtcccgaggggaccctgtccgggtccttgctcggagagtacggcctgatggctctgtgcagtacctggttgagtggggaggagggggcatcttctgaacagcctgcctctgcccagctccccattcacacacaccggcactttcataccctgacctctgacctcacctacagctgggatgtacctggagagatagggggtagttctccctactgcccaggctggaatccaagagtggggagtggggaagaggccctcttctctaccctccttcatgattcctgacccctcccatccttcccatttcctttgatgttattttgttacagctttttaaatattttttaaaattatttaacccctgggggcagagactgaggagggaggatgataagggatcccggactctgtatgattgaaataaagagaaataaacaaa

SEQ ID NO: 422865 - DNA, 2780 bp, Homo sapiens
ctcctcctgccgctgccgctgctttggctgctgcgtcatacgccccagagccgccgggacggaggggctgggcctggggaccccccggcctccgcctgcacgcccccccacgcccggacgtgccctctccgcgcgggggactcgcctaggtctcctacgtctgcccctgcccggctcccggcggccccagctgtcaccggcccccccaggatgcaatggcgcagcccccccggctgagccgctctggtgcctcctcactttgggacccagcttctcctgctcccacctctggccccaggcctcggctttgggagggtcaagatgtgctggccagatggactgatgggctgctatacttgggtaccatcaaaaaggtggacagtgctagggaggtgtgtctggtccagtttgaggatgattcgcagtttctggttctatggaaagacattagccctgctgccctccctggagaggaactcctctgttgtgtctgtcgctctgagactgtggtccctgggaaccggctggtcagctgtgagaagtgtcgccatgcttatcaccaggactgccatgttcccagggctccagcccctggagagggagagggcacatcctgggtatgccgccagtgtgtctttgcgatcgccaccaagaggggaggtgccctgaagaagggcccctatgcccgggccatgctgggtatgaagctttctctgccatatggactgaaggggctggactgggatgctggacatctgagcaaccgacagcagagttactgttactgtggtggccctggggagtgagtaatgagaggggagcagactgtggaatgaatgatgtggtggtggatcccaggaaatgaaggaaaaagaacaggatgagggtagcactcagggggataggaggtaagtttagggtttgggacagttatggggaagggggtttctggaggccagaagtcctgtgttccccctcaggtggaacctgaaaatgctgcagtgccggagctgcctgcagtggttccatgaggcctgcacccagtgtctgagcaagcccctcctctatggggacaggtgagaccaaggcagactctctaggagccaaggatgccctctttcttcgtgttccaccctcagttctcccacgcccttctccactccagtctcttcccaacctctgcagcgttacctcacctgtttgccccgtccttgcttgtgagtcttccaggggatggcacagttttcctgtgtaagtgtgtttgctccctcttgcccatgtccaggttctatgaatttgaatgctgtgtgtgtcgcgggggccctgagaaagtccggagactacagcttcgctggtgagctggattgggcatgacctcagtgtaactccacaccacagtatttcactctatatgccccaacctcccacctcaggactcccctggctcttaaaatgcctctgtggtcttgaaaactttgtttttccagggtggatgtggcccatcttgtcctgtatcacctcagtgtttgctgtaagaagaaatactttgattttgatcgtgagatcctccccttcacttctgagaattgggacagtttgctcctgggggagctttcagacacccccaaaggagaacgttcttccaagctcctctctgctcttaacagccacaaggaccgtttcatttcagggagagagattaagaagaggaaatgtttgtttggtctccatgctcggatgcctccccctgtggagccccctactggagatggagcactcaccagcttcccttcagggcagggccctgggggaggggtctcacgtcccctggggaagcgccggaggccggagccagagcccctgaggaggaggcagaaggggaaagtggaggagctggggccaccctcagcagtgcgcaatcagcccgagccccaggagcagagggagcgggctcatctgcagagggcactgcaggcctcagtgtctccaccatcccccagccctaaccagagttaccagggcagcagcggctacaacttccggcccacagatgcccgctgcctgcccagcagccccatccggatgtttgcttccttccacccttctgccagcaccgcagggacctctggggacagtggacccccagacaggtcacccctggaacttcacattggtttccccacagacatccctaaaagtgccccccactcgatgactgcctcatcttcctcagtttcatccccatccccaggtcttcctagacgctcagcacccccttctcccctgtgccgtagtttgtctcctgggactgggggaggagtccgaggtggggttggttacctgtcccgaggggaccctgtccgggtccttgctcggagagtacggcctgatggctctgtgcagtacctggttgagtggggaggagggggcatcttctgaacagcctgcctctgcccagctccccattcacacacaccggcactttcataccctgacctctgacctcacctacagctgggatgtacctggagagatagggggtagttctccctactgcccaggctggaatccaagagtggggagtggggaagaggccctcttctctaccctccttcatgattcctgacccctcccatccttcccatttcctttgatgttattttgttacagctttttaaatattttttaaaattatttaacccctgggggcagagactgaggagggaggatgataagggatcccggactctgtatgattgaaataaagagaaataaacaaa

SEQ ID NO: 422866 - DNA, 2796 bp, Homo sapiens
ctcctcctgccgctgccgctgctttggctgctgcgtcatacgccccagagccgccgggacggaggggctgggcctggggaccccccggcctccgcctgcacgcccccccacgcccggacgtgccctctccgcgcgggggactcgcctaggtctcctacgtctgcccctgcccggctcccggcggccccagctgtcaccggcccccccaggatgcaatggcgcagcccccccggctgagccgctctggtgcctcctcactttgggacccagcttctcctgctcccacctctggccccaggcctcggctttgggagggtcaagatgtgctggccagatggactgatgggctgctatacttgggtaccatcaaaaaggtggacagtgctagggaggtgtgtctggtccagtttgaggatgattcgcagtttctggttctatggaaagacattagccctgctgccctccctggagaggaactcctctgttgtgtctgtcgctctgagactgtggtccctgggaaccggctggtcagctgtgagaagtgtcgccatgcttatcaccaggactgccatgttcccagggctccagcccctggagagggagagggcacatcctgggtatgccgccagtgtgtctttgcgatcgccaccaagaggggaggtgccctgaagaagggcccctatgcccgggccatgctgggtatgaagctttctctgccatatggactgaaggggctggactgggatgctggacatctgagcaaccgacagcagagttactgttactgtggtggccctggggagtggaacctgaaaatgctgcagtgccggagctgcctgcagtggttccatgaggcctgcacccagtgtctgagcaagcccctcctctatggggacaggttctatgaatttgaatgctgtgtgtgtcgcgggggccctgagaaagtccggagactacagcttcgctgggtggatgtggcccatcttgtcctgtatcacctcagtgtttgctgtaagaagaaatactttgattttgatcgtgagatcctccccttcacttctgagaattgggacagtttgctcctgggggagctttcagacacccccaaaggagaacgttcttccaagctcctctctgctcttaacagccacaaggaccgtttcatttcagggagagagattaagaagaggaaatgtttgtttggtctccatgctcggatgcctccccctgtggagccccctactggagatggagcactcaccagcttcccttcagggcagggccctgggggaggggtctcacgtcccctggggaagcgccggaggccggagccagagcccctgaggaggaggcagaaggggaaagtggaggagctggggccaccctcagcagtgcgcaatcagcccgagccccaggagcagagggagcgggctcatctgcagagggcactgcaggcctcagtgtctccaccatcccccagccctaaccagagttaccagggcagcagcggctacaacttccggcccacagatgcccgctgcctgcccagcagccccatccggatgtttgcttccttccacccttctgccagcaccgcagggacctctggggacagtggacccccagacaggtcacccctggaacttcacattggtttccccacagacatccctaaaagtgccccccactcgatgactgcctcatcttcctcagtttcatccccatccccaggtcttcctagacgctcagcacccccttctcccctgtgccgtagtttgtctcctgggactgggggaggagtccgaggtggggttggttacctgtcccgaggggaccctgtccgggtccttgctcggagagtacggcctgatggctctgtgcagtacctggttgagtggggaggagggggcatcttctgaacagcctgcctctgcccagctccccattcacacacaccggcactttcataccctgacctctgacctcacctacagctgggatgtacctggagagatagggggtagttctccctactgcccaggctggaatccaagagtggggagtggggaagaggccctcttctctaccctccttcatgattcctgacccctcccatccttcccatttcctttgatgttattttgttacagctttttaaatattttttaaaattatttaacccctgggggcagagactgaggagggaggatgataagggatcccggactctgtatgattgaaataaagagaaataaacaaaaaaaaacaaaacaaaaaaaaaaacaaaacaaaaaaaaaaacacaaacaaaaaaaagggggggggccgccaaaaaattccccccggggggggccacaatatagacgcgcaaccccgcgacttttgtgcaacagagggggccccaaaaagggggggcgcctaataaagagacacagacgcggggcgcggtaacaacagcggcgagacgggggaaaacggggacgagggaaacactctgggagaaaggcgagccacacaacactacggggggggaggaggaagacaacatattgtggtggggaagacagtagcttcacttagcagagggagtagaattattaaagaggccctccaaaaggagtgaaataactaaagacgaactttgtagagcgggtgtgaaatctaggtggtgggtgacacaaaacgaagggaaggaagataattgtcgagtatcgggtggtgagagagtaagtttgaggggcaaacagctgagagaatgatgtagttgtagcgcaaggataattttttattcccgggg

SEQ ID NO: 422867 - DNA, 662 bp, Homo sapiens
gattctgtcttctattaccagtgatgctcttcttcccctctatgtgctcaaggctcttagtctctaacactgtttctctgattcacatgtgctctccatttctgcccatttcttacaattgccttctctccctaggtcacccctggaacttcacattggtttccccacagacatccctaaaagtgccccccactcgatgactgcctcatcttcctcagtttcatccccatccccaggtcttcctagacgctcagcacccccttctcccctgatggctctgtgcagtacctggttgagtggggaggagggggcatcttctgaacagcctgcctctgcccagctccccattcacacacaccggcactttcataccctgacctctgacctcacctacagctgggatgtacctggagagatagggggtagttctccctactgcccaggctggaatccaagagtggggagtggggaagaggccctcttctctaccctccttcatgattcctgacccctcccatccttcccatttcctttgatgttattttgttacagctttttaaatattttttaaaattatttaacccctgggggcagagactgaggagggaggatgataagggatcccggactctgtatgattgaaataaagagaaataaacaaa

SEQ ID NO: 422868 - DNA, 2340 bp, Homo sapiens
aaggtctgaaaaataaatcatatttagaacgccattggtagcttaaaaatggttttaaacctgaatttgaagaaaatgttgagaccacgatgtaaccaaaaagaaataattgggttatttctattccaaatgtctttggtgactgtgtgattttaaaccaaattggtttatctatctaggcatttaaacaagttctcagtgttctaaagaagtacatgtactgaccctgacaatcatgttcttttaagcctttagattattgactatccaggttgttccacagagtctctttttttcccccttctttcttgaagatctgtgagtaatggactaattgctattaaatttgggagctttacatatgccacaacagaaaaagtcagaagaaggtaagtcttgaatcttgtttggatgaaatgtagatacatgtgatatgtgtatatgtttaggaataggatcagactcagttatggtggtaatataggtaaaagggctttgccacttcccacatcaagggcaggattctttgtgtatttatacatagagaatgatttgacttctgattgaatagaaccttactgccctgcagtttatgtcatacggtttcctataattaatactcctgagctccctgttgacaaagaaagtaatgtggttcccatgggcagatggcctgcagggctgaagttcttgttacgaccaaaaaaaattatgaggtgatgccattcttagtgatgggagattttcttaggattcaaaatggtaacagtacctaagccatccctgaggcttcgcaagggaaagaagtgactaatcataggctgatctttttctcacttttttcctcacataaaataagtttttttatgataaagtctttggagttgctgtgcctatttttcatgtgtagtatcttatttttatttctcagtctagtcaactctgctgaatgtgtatataaggtgtcattcatagaatttccacaggcttaaggcctaaccattgatggccaggggctttctagaactgaaacaacttcacagatttttgggggtcatgattacccatttttaagatttggttatatatgtgaataatcagtacaaaaagtaactgattttaatacaaaccaatgatatattttaaatgttattgtacagaatgtcacttaacttttaaatttttttctgcttgctgccagtataacatgcatacaatattttctcagtagtcacgatcatctttgatataacaaaacttattttaattctagcatctacagttgtttagatgcacagttttatgatgatgaaactgtaacagtagttcttaaagacactgtaggacgtgaaggaagagatagactcttggtccagctgcctttgtctttagtatataacagtgaagattctgcagaatatcagttcactgggacttattctacaaggctagatgaacagtgtagtgctattcccacccgtaccatgcattttgagaagcactggagattactggaaagtatgaaagcacagtatgttgctgggaatggttttcgaaaagtgtcctgtgtggtaagtgtttagagatcgttcagcaactaagaaattacaagaagtaacgttgcttctttggaaccttcatcaaatacatgatatataaggtccttttgtgcaaatatttttactgtgatttatagcttgtattgattatgatcatgtggtggccttagctatttagttcttgttctgataaagcttactaagtagttaataataatactagattttaatctcacgaaattgccactgttgttatgtggagatctttttatacaaaatgaaggctgaatttattgattttgttgtaaattgatgggaatataactttcctataaaaccattctttgattcagacttctgatttctaattctttatatatgataagccattaatttaaaaatgcttttatggccttttcttttttagttaagctcaaatcttcgtcatgtgagagtatttgaaatggacatagatgatgaatgggagctcgatgagtcttcagatgaagaggaggaggccagtaataagcctgtaaaaataaaggaagaagtgttgtcggagtcagaggcagagaaccaacaagctggtgctgccgctttagctccagagatagtcattaaagtggaaaaacttgaccctgagctagactcctaatctagcttgccattattgtgtgtgtaattatggccaaaaggacataggagatggactaagatgtcttggaccacctttgtgtaacaaagaaataaacagtaaattttattttttcaaaaaaaaaaa

SEQ ID NO: 422869 - DNA, 2695 bp, Homo sapiens
cccgacgccggaagtgcctggagcgcgcgacagcggcggggcggggcggcctggaggctgtggcgcgcggccggcagagggaggggagaggccactggggccgtgttagtctgccggtggggactcttgcagggccgtccccatgttgcgttttccgacctgtttcccatccttccgggtggtgggagagaagcagctcccgcaggagattattttcctggtctggtcgcccaagcgggatctcattgctttggccaacacagctggcgaggttttacttcatcgactggcaagttttcatcgagtttggagttttccaccaaatgaaaatacaggaaaggaggtgacgtgtctggcatggagaccagatggcaaacttttggcctttgctcttgctgataccaagaaaattgttttgtgtgatgtagaaaaacctgagagcttacactctttttctgtggaggctccagtttcctgtatgcattggatggaagtgacagtagaaagcagtgttctcacatcattttataatgctgaggatgaatcaaatcttctcttacctaaactacctacactgccaaaaaactatagcaacacctcaaaaatatttagtgaagaaaattctgatgaaattattaagctcttgggagacgtcaggcttaatattctcgtccttggaggaagctctggatttattgagctttatgcttatggaatgtttaaaattgctcgagtcacagggattgctggtacttgtcttgcattatgtttatcaagtgatttgaaatcattatcagtggtcacagaagtctctaccaatggtgcttcagaagtttcatactttcagcttgaaactaatctgttgtactctttcttacctgaagtaactcggatggccagaaagtttactcatatttcagctctgttacagtatataaatttgtcactaacatgtatgtgtgaagcatgggaagaaatactaatgcagatggattctcgtctcaccaagtttgtgcaggaaaagaacacaaccacatcagtgcaagatgagttcatgcacttgctattatgggggaaagcaagtgctgaacttcagactctcttgatgaatcagttaacagtaaagggcttgaaaaagcttggccagtctatagagtcatcatactccagtatacaaaaattggtcataagtcatttacagagtggctcggagtctttattataccatttgagtgaattgaaaggaatggcttcatggaagcaaaaatatgaacctcttggactagatgctgcaggaatcgaagaagctataactgctgtgggttcttttatactcaaggcaaatgaacttcttcaagttatagatagtagtatgaaaaacttcaaagcattttttcggtggctttatgtggcaatgttgagaatgacagaagaccatgtgcttcccgagctgaataagatgactcagaaagatatcacatttgttgctgaatttcttactgaacatttcaatgaggctccagacctttataatcgaaaaggaaaatactttaacgttgaaagagttggtcagtacttgaaagatgaagatgatgatcttgtgtcaccccctaacacagaaggaaaccagtggtatgactttcttcaaaatagcagccaccttaaagaaagtcctttgctgtttccttattatcctcgaaaatcattgcattttgtgaaaaggcggatggagaatattattgatcagtgtttgcaaaagccagcagatgtaattggaaaatcgatgaatcaagcaatctgtattccattgtatagagataccagaagtgaggattctacacgtagattgttcaaatttccttttctgtggaataataaaacttcaaatctacattatcttctttttactattctagaagattcactttataaaatgtgcatcttaaggagacatactgatatttctcaatctgtgagtaatggactaattgctattaaatttgggagctttacatatgccacaacagaaaaagtcagaagaagcatctacagttgtttagatgcacagttttatgatgatgaaactgtaacagtagttcttaaagacactgtaggacgtgaaggaagagatagactcttggtccagctgcctttgtctttagtatataacagtgaagattctgcagaatatcagttcactgggacttattctacaaggctagatgaacagtgtagtgctattcccacccgtaccatgcattttgagaagcactggagattactggaaagtatgaaagcacagtatgttgctgggaatggttttcgaaaagtgtcctgtgtgttaagctcaaatcttcgtcatgtgagagtatttgaaatggacatagatgatgaatgggagctcgatgagtcttcagatgaagaggaggaggccagtaataagcctgtaaaaataaaggaagaagtgttgtcggagtcagaggcagagaaccaacaagctggtgctgccgctttagctccagagatagtcattaaagtggaaaaacttgaccctgagctagactcctaatctagcttgccattattgtgtgtgtaattatggccaaaaggacataggagatggactaagatgtcttggaccacctttgtgtaacaaagaaataaacagtaaattttattttttcaaaaaaaaaaa

SEQ ID NO: 422870 - DNA, 2599 bp, Homo sapiens
caggagaatcgcttgaatccgggaggcagagtttgcaatgagctgagactgcaccactgcactccaacctgggcaacagaatgagactctgtctttaaaaaaagaaaaaaaaaaatgttcctgtcacctttatcactcaggaaattccaagggttttggaagctctgttctaggaactagaaacaaagatcaatgtttttctgtgataacatagcatctgtcaccttgagaacttaaaatgttaatgtgattgtagttcattttatccagcatggctttatctaagggagggcctacaaagcacagtggaagagggtgggcattagagtcagacttgggtttgattgacagaactagatacttagttattttcacactgggcaattgcctaaacctgttaagcttcattttttttttcatctgtaaattggagaatatggtgtttacttcatatggctattgtaagcaataaaaaaaaaaggtattttaaacacctagcatagcaggtgttagtgctaaattatatattactttctcctgataaagtaaccttttaaaaagtaaagagcttatttatatagagctagtttccagtctcttgttttagagacttaaaaaacagtactggactgctgttgttgtttcactgtggcaaagaatagaagaatgaattttatttcatcatatatttgatggttcccaaatcattccttgcttcttatagccagcagaaacctacagttggattttggtgagtctaagtttgtagtaagtgagattgtttttagtgagctgtcagcgggggttgatgaaaggcagaagaccatggtcgtttttaatgaggttgtgtgaaaatccaatgaagtggtcagtgaaaattctacctcgagataaactgtgcagactggctctaacagtagattattttcttctaattataagtttgctatagcttcttttatttttgtttctgtttttgtttgaaaccagaaagtcctttgctgtttccttattatcctcgaaaatcattgcattttgtgaaaaggcggatggagaatattattgatcagtgtttgcaaaagccagcagtaagtttgaaagaaatgcatgtctttgtgtaggagcaatagtgtctacagtatgtggctcacttatgtaaatgatcttaatttttagaatgaactatgaaaatgttgatagtcaactgtttttgattaacaaaagtaacaatttcatatggttcaacctaatactccaacttaagtttcttacacacgtgtgtgtgtgtgtgtgtgtgtataaagattactgaaggtgttggcatcttgagtattttatttgttcccagaagaaattcattgtaaacagtcttagttacagagctgatgtgtctctgcttactactgaaggatgtgaatgaatggttgttatgagaccagagggaggtggtcttaaacctgccatgtgcttagcaccaaggtccttttcagctcagaattttctctttttccttactgttacaattgtcattaacgtttcttatgtacaaggtttggtgatgtaggcgatttttttaccacattcgaacagtgatggtcagtcactttctgtagagtatctgtgtgcatattaacgctctaattatattttaaaatcttattttatataggatgtaattggaaaatcgatgaatcaagcaatctgtattccattgtatagagataccagaagtgaggattctacacgtagattgttcaaatttccttttctgtggaataataaaacttcaaatctacattatcttctttttactattctagaagattcactttataaaatgtgcatcttaaggagacatactgatatttctcaatctgtgagtaatggactaattgctattaaatttgggagctttacatatgccacaacagaaaaagtcagaagaagcatctacagttgtttagatgcacagttttatgatgatgaaactgtaacagtagttcttaaagacactgtaggacgtgaaggaagagatagactcttggtccagctgcctttgtctttagtatataacagtgaagattctgcagaatatcagttcactgggacttattctacaaggctagatgaacagtgtagtgctattcccacccgtaccatgcattttgagaagcactggagattactggaaagtatgaaagcacagtatgttgctgggaatggttttcgaaaagtgtcctgtgtgttaagctcaaatcttcgtcatgtgagagtatttgaaatggacatagatgatgaatgggagctcgatgagtcttcagatgaagaggaggaggccagtaataagcctgtaaaaataaaggaagaagtgttgtcggagtcagaggcagagaaccaacaagctggtgctgccgctttagctccagagatagtcattaaagtggaaaaacttgaccctgagctagactcctaatctagcttgccattattgtgtgtgtaattatggccaaaaggacataggagatggactaagatgtcttggaccacctttgtgtaacaaagaaataaacagtaaattttattttttcaaaaaaaaaaa

SEQ ID NO: 422871 - DNA, 5257 bp, Homo sapiens
  misc_feature (3873)..(3873): n is a, c, g, or t
  misc_feature (4333)..(4333): n is a, c, g, or t
cccgacgccggaagtgcctggagcgcgcgacagcggcggggcggggcggcctggaggctgtggcgcgcggccggcagagggaggggagaggccactggggccgtgttagtctgccggtggggactcttgcagggccgtccccatgttgcgttttccgacctgtttcccatccttccgggtggtgggagagaagcagctcccgcaggagattattttcctggtctggtcgcccaagcgggatctcattgctttggccaacacagctggcgaggttttacttcatcgactggcaagttttcatcgagtttggagttttccaccaaatgaaaatacaggaaaggaggtgacgtgtctggcatggagaccagatggcaaacttttggcctttgctcttgctgataccaagaaaattgttttgtgtgatgtagaaaaacctgagagcttacactctttttctgtggaggctccagtttcctgtatgcattggatggaagtgacagtagaaagcagtgttctcacatcattttataatgctgaggatgaatcaaatcttctcttacctaaactacctacactgccaaaaaactatagcaacacctcaaaaatatttagtgaagaaaattctgatgaaattattaagctcttgggagacgtcaggcttaatattctcgtccttggaggaagctctggatttattgagctttatgcttatggaatgtttaaaattgctcgagtcacagggattgctggtacttgtcttgcattatgtttatcaagtgatttgaaatcattatcagtggtcacagaagtctctaccaatggtgcttcagaagtttcatactttcagcttgaaactaatctgttgtactctttcttacctgaagtaactcggatggccagaaagtttactcatatttcagctctgttacagtatataaatttgtcactaacatgtatgtgtgaagcatgggaagaaatactaatgcagatggattctcgtctcaccaagtttgtgcaggaaaagaacacaaccacatcagtgcaagatgagttcatgcacttgctattatgggggaaagcaagtgctgaacttcagactctcttgatgaatcagttaacagtaaagggcttgaaaaagcttggccagtctatagagtcatcatactccagtatacaaaaattggtcataagtcatttacagagtggctcggagtctttattataccatttgagtgaattgaaaggaatggcttcatggaagcaaaaatatgaacctcttggactagatgctgcaggaatcgaagaagctataactgctgtgggttcttttatactcaaggcaaatgaacttcttcaagttatagatagtagtatgaaaaacttcaaagcattttttcggtggctttatgtggcaatgttgagaatgacagaagaccatgtgcttcccgagctgaataagatgactcagaaagatatcacatttgttgctgaatttcttactgaacatttcaatgaggctccagacctttataatcgaaaaggaaaatactttaacgttgaaagagttggtcagtacttgaaagatgaagatgatgatcttgtgtcaccccctaacacagaaggaaaccagtggtatgactttcttcaaaatagcagccaccttaaagaaagtcctttgctgtttccttattatcctcgaaaatcattgcattttgtgaaaaggcggatggagaatattattgatcagtgtttgcaaaagccagcagtaagtttgaaagaaatgcatgtctttgtgtaggagcaatagtgtctacagtatgtggctcacttatgtaaatgatcttaatttttagaatgaactatgaaaatgttgatagtcaactgtttttgattaacaaaagtaacaatttcatatggttcaacctaatactccaacttaagtttcttacacacgtgtgtgtgtgtgtgtgtgtgtataaagattactgaaggtgttggcatcttgagtattttatttgttcccagaagaaattcattgtaaacagtcttagttacagagctgatgtgtctctgcttactactgaaggatgtgaatgaatggttgttatgagaccagagggaggtggtcttaaacctgccatgtgcttagcaccaaggtccttttcagctcagaattttctctttttccttactgttacaattgtcattaacgtttcttatgtacaaggtttggtgatgtaggcgatttttttaccacattcgaacagtgatggtcagtcactttctgtagagtatctgtgtgcatattaacgctctaattatattttaaaatcttattttatataggatgtaattggaaaatcgatgaatcaagcaatctgtattccattgtatagagataccagaaggtaattctgtttacctattggatggtgtaattccgcagccaatttaaatttttctcatttctttttcccttttattttagtgaggattctacacgtagattgttcaaatttccttttctgtggaataataaaacttcaaatctacattatcttctttttactattctagaagattcactttataaaatgtgcatcttaaggagacatactgatatttctcaatctgtgagtaatggactaattgctattaaatttgggagctttacatatgccacaacagaaaaagtcagaagaaggtaagtcttgaatcttgtttggatgaaatgtagatacatgtgatatgtgtatatgtttaggaataggatcagactcagttatggtggtaatataggtaaaagggctttgccacttcccacatcaagggcaggattctttgtgtatttatacatagagaatgatttgacttctgattgaatagaaccttactgccctgcagtttatgtcatacggtttcctataattaatactcctgagctccctgttgacaaagaaagtaatgtggttcccatgggcagatggcctgcagggctgaagttcttgttacgaccaaaaaaaattatgaggtgatgccattcttagtgatgggagattttcttaggattcaaaatggtaacagtacctaagccatccctgaggcttcgcaagggaaagaagtgactaatcataggctgatctttttctcacttttttcctcacataaaataagtttttttatgataaagtctttggagttgctgtgcctatttttcatgtgtagtatcttatttttatttctcagtctagtcaactctgctgaatgtgtatataaggtgtcattcatagaatttccacaggcttaaggcctaaccattgatggccaggggctttctagaactgaaacaacttcacagatttttgggggtcatgattacccatttttaagatttggttatatatgtgaataatcagtacaaaaagtaactgattttaatacaaaccaatgatatattttaaatgttattgtacagaatgtcacttaacttttaaatttttttctgcttgctgccagtataacatgcatacaatattttctcagtagtcacgatcatctttgatataacaaaacttattttaattctagcatctacagttgtttagatgcacagttttatgatgatgaaactgtaacagtagttcttaaagacactgtaggacgtgaaggaagagatagactcttggtccagctgcctttgtctttagtatataacagtgaagattctgcagaatatcagttcactgggacttattctacaaggtaactagtaacattgtctttctgatattacagttaaatgtttttttaatgcacattataaattccaaccttttaggtacgctagataatggttatttcgttactagaganaaccacagaggtagctgagcagaaatgctccaatttttcattcaaaatatgctggccttaatagctttttttgtccctttgctttactagtaaatcaggaagtatttgctggaatcaaggtggggaattatttggagtggataatgggacttcttttagttacatttttaaggatagcattaaccctagttggttggaattagttatttttgatttgccttcagtattttccttccagaattaagacctcagtacccatgtaggaagtatactgtcaattccaagagatggctttaattgactgagacttaagtaagcagatctctaatttaaaaatgtatccatttgctttctttgaaagggagtcagaaaccttgctaagatgatattctgcctgtttggaattacagtatttcttttcttttttttttttgaaacagggcctctctttgtcacccangttggagtgcagtgacgcaatcatagctcactgcagcctccaactcatgggctcaagtgaccctcctgcctcagcctctcatagctgggactacaggcatgtgccaccttgcctgactaattttatttttttacagagatagagtcttactatgttgcccaggctggccttgaactcctggactcaagcaatcctcccaccttggcctcgcaaagtgctgagattccaggcatgagccactgtgcctagccagaatatagaatatggaatttttatagaatattatatcacagctttttttctaacacaacagttgctaaaattatattggaaatagaagtatgagtagaagtcaaaaccataattgaccctaataccacctgtagtaaaactagggaggataagatccccttttcattcctgagttggtttttttccctctttaggctagatgaacagtgtagtgctattcccacccgtaccatgcattttgagaagcactggagattactggaaagtatgaaagcacagtatgttgctgggaatggttttcgaaaagtgtcctgtgtgttaagctcaaatcttcgtcatgtgagagtatttgaaatggacatagatgatgaatgggagctcgatgagtcttcagatgaagaggaggaggccagtaataagcctgtaaaaataaaggaagaagtgttgtcggagtcagaggcagagaaccaacaagctggtgctgccgctttagctccagagatagtcattaaagtggaaaaacttgaccctgagctagactcctaatctagcttgccattattgtgtgtgtaattatggccaaaaggacataggagatggactaagatgtcttggaccacctttgtgtaacaaagaaataaacagtaaattttattttttcaaaaaaaaaaa

SEQ ID NO: 422872 - DNA, 1948 bp, Homo sapiens
tttttgtgagtttctaacacatgtacccctctccatccacagccattttaatggtattttagaaggtagaggctgtagatgtgtgtgctcagaagacaaaaaaaacacgaagagaaatggcattgcttttcctgtatttcgaagtattttttggttcaccgtatttgcagagagcagatataaaatactacgctttctatgatcacttctcagtatgaatgaaaggtagtttaacttattgttctttcaggtaagtagaattattacaggttccagatggagaaactgaggcattgagcattttgatgttggtctggtggcctggggtagggttgaacatattgactgcacaaaggaactttttttctttctcttatcattgctgcaagagggttttgattatattgcttagtaacataagagatgtttcagtcttttattccaagcgttttactttgtactgaaaggttaatgatactgacctacctcttcattggtattatgaaacttaatgcttggaaagggctttgagatttgggaatgaaaagcacaggtttttgcctagaataattatcgtatacatgtgagcttaaagagattgtttaaaaagtgataacccatgtctgtattcagaaacagttttatcaaaatgaagatgacttccatttataacacttaattttgggggtacatttgtgtaaagccaagggaaattcaacttttgagatctcaattgttaggataaaaaatcagcttccaaaaataatggtccattgatatcagaggtaatgacagcacaaatttgtaataatggttttctgttgaatacttgaaagatgaagatgatgatcttgtgtcaccccctaacacagaaggaaaccagtggtatgactttcttcaaaatagcagccaccttaaagaaagtcctttgctgtttccttattatcctcgaaaatcattgcattttgtgaaaaggcggatggagaatattattgatcagtgtttgcaaaagccagcagatgtaattggaaaatcgatgaatcaagcaatctgtattccattgtatagagataccagaagtgaggattctacacgtagattgttcaaatttccttttctgtggaataataaaacttcaaatctacattatcttctttttactattctagaagattcactttataaaatgtgcatcttaaggagacatactgatatttctcaatctgtgagtaatggactaattgctattaaatttgggagctttacatatgccacaacagaaaaagtcagaagaagcatctacagttgtttagatgcacagttttatgatgatgaaactgtaacagtagttcttaaagacactgtaggacgtgaaggaagagatagactcttggtccagctgcctttgtctttagtatataacagtgaagattctgcagaatatcagttcactgggacttattctacaaggctagatgaacagtgtagtgctattcccacccgtaccatgcattttgagaagcactggagattactggaaagtatgaaagcacagtatgttgctgggaatggttttcgaaaagtgtcctgtgtgttaagctcaaatcttcgtcatgtgagagtatttgaaatggacatagatgatgaatgggagctcgatgagtcttcagatgaagaggaggaggccagtaataagcctgtaaaaataaaggaagaagtgttgtcggagtcagaggcagagaaccaacaagctggtgctgccgctttagctccagagatagtcattaaagtggaaaaacttgaccctgagctagactcctaatctagcttgccattattgtgtgtgtaattatggccaaaaggacataggagatggactaagatgtcttggaccacctttgtgtaacaaagaaataaacagtaaattttattttttcaaaaaaaaaaa

SEQ ID NO: 422873 - DNA, 1450 bp, Homo sapiens
ctgcgcaattaaggttttgtcaataaagggtgtaacgcaactaagtcatagtccgcctagaagcatatgcggtggacgatggaggggccgatctcgtcatactcctgcttgctgatccacatctgctggaaggtggacagcgaggccaggatggagccgccgatccacacggagtacttgcgctcaggaggagcaatgatcttgcggcgttggatgcagtcgactgcatccaacgccgcgactgcaccaacgccgtgaacatttcaatgaggctccagacctttataatcgaaaaggaaaatactttaacgttgaaagagttggtcagtacttgaaagatgaagatgatgatcttgtgtcaccccctaacacagaaggaaaccagtggtatgactttcttcaaaatagcagccaccttaaagaaagtcctttgctgtttccttattatcctcgaaaatcattgcattttgtgaaaaggcggatggagaatattattgatcagtgtttgcaaaagccagcagatgtaattggaaaatcgatgaatcaagcaatctgtattccattgtatagagataccagaagtgaggattctacacgtagattgttcaaatttccttttctgtggaataataaaacttcaaatctacattatcttctttttactattctagaagattcactttataaaatgtgcatcttaaggagacatactgatatttctcaatctgtgagtaatggactaattgctattaaatttgggagctttacatatgccacaacagaaaaagtcagaagaagcatctacagttgtttagatgcacagttttatgatgatgaaactgtaacagtagttcttaaagacactgtaggacgtgaaggaagagatagactcttggtccagctgcctttgtctttagtatataacagtgaagattctgcagaatatcagttcactgggacttattctacaaggctagatgaacagtgtagtgctattcccacccgtaccatgcattttgagaagcactggagattactggaaagtatgaaagcacagtatgttgctgggaatggttttcgaaaagtgtcctgtgtgttaagctcaaatcttcgtcatgtgagagtatttgaaatggacatagatgatgaatgggagctcgatgagtcttcagatgaagaggaggaggccagtaataagcctgtaaaaataaaggaagaagtgttgtcggagtcagaggcagagaaccaacaagctggtgctgccgctttagctccagagatagtcattaaagtggaaaaacttgaccctgagctagactcctaatctagcttgccattattgtgtgtgtaattatggccaaaaggacataggagatggactaagatgtcttggaccacctttgtgtaacaaagaaataaacagtaaattttattttttcaaaaaaaaaaa

SEQ ID NO: 422874 - DNA, 1925 bp, Homo sapiens
aaggtctgaaaaataaatcatatttagaacgccattggtagcttaaaaatggttttaaacctgaatttgaagaaaatgttgagaccacgatgtaaccaaaaagaaataattgggttatttctattccaaatgtctttggtgactgtgtgattttaaaccaaattggtttatctatctaggcatttaaacaagttctcagtgttctaaagaagtacatgtactgaccctgacaatcatgttcttttaagcctttagattattgactatccaggttgttccacagagtctctttttttcccccttctttcttgaagatctgtgagtaatggactaattgctattaaatttgggagctttacatatgccacaacagaaaaagtcagaagaaggtaagtcttgaatcttgtttggatgaaatgtagatacatgtgatatgtgtatatgtttaggaataggatcagactcagttatggtggtaatataggtaaaagggctttgccacttcccacatcaagggcaggattctttgtgtatttatacatagagaatgatttgacttctgattgaatagaaccttactgccctgcagtttatgtcatacggtttcctataattaatactcctgagctccctgttgacaaagaaagtaatgtggttcccatgggcagatggcctgcagggctgaagttcttgttacgaccaaaaaaaattatgaggtgatgccattcttagtgatgggagattttcttaggattcaaaatggtaacagtacctaagccatccctgaggcttcgcaagggaaagaagtgactaatcataggctgatctttttctcacttttttcctcacataaaataagtttttttatgataaagtctttggagttgctgtgcctatttttcatgtgtagtatcttatttttatttctcagtctagtcaactctgctgaatgtgtatataaggtgtcattcatagaatttccacaggcttaaggcctaaccattgatggccaggggctttctagaactgaaacaacttcacagatttttgggggtcatgattacccatttttaagatttggttatatatgtgaataatcagtacaaaaagtaactgattttaatacaaaccaatgatatattttaaatgttattgtacagaatgtcacttaacttttaaatttttttctgcttgctgccagtataacatgcatacaatattttctcagtagtcacgatcatctttgatataacaaaacttattttaattctagcatctacagttgtttagatgcacagttttatgatgatgaaactgtaacagtagttcttaaagacactgtaggacgtgaaggaagagatagactcttggtccagctgcctttgtctttagtatataacagtgaagattctgcagaatatcagttcactgggacttattctacaaggctagatgaacagtgtagtgctattcccacccgtaccatgcattttgagaagcactggagattactggaaagtatgaaagcacagtatgttgctgggaatggttttcgaaaagtgtcctgtgtgttaagctcaaatcttcgtcatgtgagagtatttgaaatggacatagatgatgaatgggagctcgatgagtcttcagatgaagaggaggaggccagtaataagcctgtaaaaataaaggaagaagtgttgtcggagtcagaggcagagaaccaacaagctggtgctgccgctttagctccagagatagtcattaaagtggaaaaacttgaccctgagctagactcctaatctagcttgccattattgtgtgtgtaattatggccaaaaggacataggagatggactaagatgtcttggaccacctttgtgtaacaaagaaataaacagtaaattttattttttcaaaaaaaaaaa

SEQ ID NO: 422875 - DNA, 1881 bp, Homo sapiens
cccgacgccggaagtgcctggagcgcgcgacagcggcggggcggggcggcctggaggctgtggcgcgcggccggcagagggaggggagaggccactggggccgtgttagtctgccggtggggactcttgcagggccgtccccatgttgcgttttccgacctgtttcccatccttccgggtggtgggagagaagcagctcccgcaggagattattttcctggtctggtcgcccaagcgggatctcattgctttggccaacacagctggcgaggttttacttcatcgactggcaagttttcatcgagtttggagttttccaccaaatgaaaatacaggaaaggaggtgacgtgtctggcatggagaccagatggcaaacttttggcctttgctcttgctgataccaagaaaattgttttgtgtgatgtagaaaaacctgagagcttacactctttttctgtggaggctccagtttcctgtatgcattggatggaagtgacagtagaaagcagtgttctcacatcattttataatgctgaggatgaatcaaatcttctcttacctaaactacctacactgccaaaaaactatagcaacacctcaaaaatatttagtgaagaaaattctgatgaaattattaagctcttgggagacgtcaggcttaatattctcgtccttggaggaagctctggatttattgagctttatgcttatggaatgtttaaaattgctcgagtcacagggattgctggtacttgtcttgcattatgtttatcaagtgatttgaaatcattatcagtggtcacagaagtctctaccaatggtgcttcagaagtttcatactttcagcttgaaactaatctgttgtactctttcttacctgaagtaactcggatggccagaaagtttactcatatttcagctctgttacagtatataaatttgtcactaacatgtatgtgtgaagcatgggaagaaatactaatgcagatggattctcgtctcaccaagtttgtgcaggaaaagaacacaaccacatcagtgcaagatgagttcatgcacttgctattatgggggaaagcaagtgctgaacttcagactctcttgatgaatcagttaacagtaaagggcttgaaaaagcttggccagtctatagagtcatcatactccagtatacaaaaattggtcataagtcatttacagagtggctcggagtctttattataccatttgagtgaattgaaaggaatggcttcatggaagcaaaaatatgaacctcttggactagatgctgcaggaatcgaagaagctataactgctgtgggttcttttatactcaaggcaaatgaacttcttcagtaagtattgggagtacctggaatcactgacctaagaatatgtcacttttgacctaaataagaacctagtaagctgttatgattctcttaaaatcagtttttaaatttttatcacaattatgcctttatatggttccgaaaagccagcagcacagagaatttataaagtaaagctgtattttcctgtcctggtcatccttacctcaggtcttctcgccagagggaatcattttaactctttaactacttctatttttagttcttctatgggttacctccatatttctaaattgtatgactatgccacatttcttttgtcaatttttagaagttattctctttgttttgtttttcttagactgttaggcttgcttgttttcttgcattgtctgttttttctgcatccttccgtcctttcccttctgaagggtggtgtagtacctctggagtcccctgttccagatgccttccttagcccacgtccccgatcggtgtcaacgacggccgtggcccagctgcatgccc

SEQ ID NO: 422876 - DNA, 533 bp, Homo sapiens
tatataaatttgtcactaacatgtatgtgtgaagcatgggaagaaatactaatgcagatggattctcgtctcaccaagtttgtgcaggtaaagcagctgaagtttcccatggagagagttaaagaatgcatgatgtatgtctttaccttgaggtacatgagaaaaatcagtttgattcataaaaggctaagatcataatttctttcaaatggcttcgtctgacttcaaactgcttcctcagatttgccaaaagggctcttttcccattgatacaacttaagtggggacaggattgtgaagtggagctggtggggctttggcaataagggcaggtgttagaacagctgattggctatcttctagtcactgatgttcagatgatcactttatggatttgatggaagtctaaggcaaggaaagggagtcatgctcctataattttgaataaatatgccttataatttaagaatacatatatcacaatttttttttcactttttttccaggaaaagaacacaaccacatcagtgcaa

SEQ ID NO: 422877 - DNA, 242 bp, Homo sapiens
tctcggaaccccaggcgttcatattttcacagtcgcataatctatatttctttgaaagaactttgccagttttcccatggcttttagtagatagtaaaaatgtcacatttataattatgtaccatttcttttattgagcagctttcttttatcttgatttttctttttgttccttttgttgatagatgactcagaaagatatcacatttgttgctgaatttcttactgaacatttcaatgag

SEQ ID NO: 422878 - DNA, 451 bp, Homo sapiens
  misc_feature (37)..(37): n is a, c, g, or t
tttaccggattcttcgcgggtactggaatagaacagnggatccttcgggctgtaggaattcggctcgagcttgcagggccgtccccatgttgcgttttccgacctgtttcccatccttccgggtggtgggagagaagcagctcccgcaggagattattttcctggtctggtcgcccaagcgggatctcattgctttggccaacacagctggcgaggttttacttcatcgactggcaagttttcatcgagtttggagttttccaccaaatgaaaatacaggaaaggaggtgacgtgtctggcatggagaccagatggcaaacgtaatgataatattacaaaaaaaatatgtttttattttcacaaagagtattctgtaaagcccattttcagaaaggatttattgttcttagtatacataagaattataaatatcagtttgggaacttttta

SEQ ID NO: 422879 - DNA, 3356 bp, Homo sapiens
cccgacgccggaagtgcctggagcgcgcgacagcggcggggcggggcggcctggaggctgtggcgcgcggccggcagagggaggggagaggccactggggccgtgttagtctgccggtggggactcttgcagggccgtccccatgttgcgttttccgacctgtttcccatccttccgggtggtgggagagaagcagctcccgcaggagattattttcctggtctggtcgcccaagcgggatctcattgctttggccaacacagctggcgaggttttacttcatcgactggcaagttttcatcgagtttggagttttccaccaaatgaaaatacaggaaaggaggtgacgtgtctggcatggagaccagatggcaaacttttggcctttgctcttgctgataccaagaaaattgttttgtgtgatgtagaaaaacctgagagcttacactctttttctgtggaggctccagtttcctgtatgcattggatggaagtgacagtagaaagcagtgttctcacatcattttataatgctgaggatgaatcaaatcttctcttacctaaactacctacactgccaaaaaactatagcaacacctcaaaaatatttagtgaagaaaattctgatgaaattattaagctcttgggagacgtcaggcttaatattctcgtccttggaggaagctctggatttattgagctttatgcttatggaatgtttaaaattgctcgagtcacagggattgctggtacttgtcttgcattatgtttatcaagtgatttgaaatcattatcagtggtcacagaagtctctaccaatggtgcttcagaagtttcatactttcagcttgaaactaatctgttgtactctttcttacctgaagtaactcggatggccagaaagtttactcatatttcagctctgttacagtatataaatttgtcactaacatgtatgtgtgaagcatgggaagaaatactaatgcagatggattctcgtctcaccaagtttgtgcaggaaaagaacacaaccacatcagtgcaagatgagttcatgcacttgctattatgggggaaagcaagtgctgaacttcagactctcttgatgaatcagttaacagtaaagggcttgaaaaagcttggccagtctatagagtcatcatactccagtatacaaaaattggtcataagtcatttacagagtggctcggagtctttattataccatttgagtgaattgaaaggaatggcttcatggaagcaaaaatatgaacctcttggactagatgctgcaggaatcgaagaagctataactgctgtgggttcttttatactcaaggcaaatgaacttcttcaagttatagatagtagtatgaaaaacttcaaagcattttttcggtggctttatgtggcaatgttgagaatgacagaagaccatgtgcttcccgagctgaataagatgactcagaaagatatcacatttgttgctgaatttcttactgaacatttcaatgaggctccagacctttataatcgaaaaggaaaatactttaacgttgaaagagttggtcagtacttgaaagatgaagatgatgatcttgtgtcaccccctaacacagaaggaaaccagtggtatgactttcttcaaaatagcagccaccttaaagaaagtcctttgctgtttccttattatcctcgaaaatcattgcattttgtgaaaaggcggatggagaatattattgatcagtgtttgcaaaagccagcagtaagtttgaaagaaatgcatgtctttgtgtaggagcaatagtgtctacagtatgtggctcacttatgtaaatgatcttaatttttagaatgaactatgaaaatgttgatagtcaactgtttttgattaacaaaagtaacaatttcatatggttcaacctaatactccaacttaagtttcttacacacgtgtgtgtgtgtgtgtgtgtgtataaagattactgaaggtgttggcatcttgagtattttatttgttcccagaagaaattcattgtaaacagtcttagttacagagctgatgtgtctctgcttactactgaaggatgtgaatgaatggttgttatgagaccagagggaggtggtcttaaacctgccatgtgcttagcaccaaggtccttttcagctcagaattttctctttttccttactgttacaattgtcattaacgtttcttatgtacaaggtttggtgatgtaggcgatttttttaccacattcgaacagtgatggtcagtcactttctgtagagtatctgtgtgcatattaacgctctaattatattttaaaatcttattttatataggatgtaattggaaaatcgatgaatcaagcaatctgtattccattgtatagagataccagaaggtaattctgtttacctattggatggtgtaattccgcagccaatttaaatttttctcatttctttttcccttttattttagtgaggattctacacgtagattgttcaaatttccttttctgtggaataataaaacttcaaatctacattatcttctttttactattctagaagattcactttataaaatgtgcatcttaaggagacatactgatatttctcaatctgtgagtaatggactaattgctattaaatttgggagctttacatatgccacaacagaaaaagtcagaagaagcatctacagttgtttagatgcacagttttatgatgatgaaactgtaacagtagttcttaaagacactgtaggacgtgaaggaagagatagactcttggtccagctgcctttgtctttagtatataacagtgaagattctgcagaatatcagttcactgggacttattctacaaggctagatgaacagtgtagtgctattcccacccgtaccatgcattttgagaagcactggagattactggaaagtatgaaagcacagtatgttgctgggaatggttttcgaaaagtgtcctgtgtgttaagctcaaatcttcgtcatgtgagagtatttgaaatggacatagatgatgaatgggagctcgatgagtcttcagatgaagaggaggaggccagtaataagcctgtaaaaataaaggaagaagtgttgtcggagtcagaggcagagaaccaacaagctggtgctgccgctttagctccagagatagtcattaaagtggaaaaacttgaccctgagctagactcctaatctagcttgccattattgtgtgtgtaattatggccaaaaggacataggagatggactaagatgtcttggaccacctttgtgtaacaaagaaataaacagtaaattttattttttcaaaaaaaaaaa

SEQ ID NO: 422880 - DNA, 1403 bp, Homo sapiens
tatctgctactgaaacaattgtttcgggggagagaatatttttagaatccaggcatggcccaaacaattctctttgaaaagaaagcaaactggaatcctgggaaagccgttaattctcaacactacttataaacatgacaaacaataaaataaattctataacaacttgtaagagcttatgttttcacatctaaattttcaatggtaaggttccttacaatctcaagtgttaaacaaaaggtatcaagcacacttaggttacaaggagaagcaaaaagattggtttgagcaacctggatcactttcaagaagcaggaactggtctatacaatggaatacagattgcttgattcatcgattttccaattacatctgctggcttttgcaaacactgatgtaattggaaaatcgatgaatcaagcaatctgtattccattgtatagagataccagaaggtaattctgtttacctattggatggtgtaattccgcagccaatttaaatttttctcatttctttttcccttttattttagtgaggattctacacgtagattgttcaaatttccttttctgtggaataataaaacttcaaatctacattatcttctttttactattctagaagattcactttataaaatgtgcatcttaaggagacatactgatatttctcaatctgtgagtaatggactaattgctattaaatttgggagctttacatatgccacaacagaaaaagtcagaagaagcatctacagttgtttagatgcacagttttatgatgatgaaactgtaacagtagttcttaaagacactgtaggacgtgaaggaagagatagactcttggtccagctgcctttgtctttagtatataacagtgaagattctgcagaatatcagttcactgggacttattctacaaggctagatgaacagtgtagtgctattcccacccgtaccatgcattttgagaagcactggagattactggaaagtatgaaagcacagtatgttgctgggaatggttttcgaaaagtgtcctgtgtgttaagctcaaatcttcgtcatgtgagagtatttgaaatggacatagatgatgaatgggagctcgatgagtcttcagatgaagaggaggaggccagtaataagcctgtaaaaataaaggaagaagtgttgtcggagtcagaggcagagaaccaacaagctggtgctgccgctttagctccagagatagtcattaaagtggaaaaacttgaccctgagctagactcctaatctagcttgccattattgtgtgtgtaattatggccaaaaggacataggagatggactaagatgtcttggaccacctttgtgtaacaaagaaataaacagtaaattttattttttcaaaaaaaaaaa

SEQ ID NO: 422881 - DNA, 361 bp, Homo sapiens
tttgaattgatagaaattaatttaaagatttcctactggacattttaaaatgcgtattgacccacaaacctgtaaatggttgaaagtactatttgagagaaatcattagctcaggtgtaggaatatagaagaactacaagattatatttgacaaagcaagatctgaaaaaatgtattttcattgacagtaagtaaaaataatgtggactcttacaaagaaatttgaaatttatcagagaaagctttgcagaaaagtaaattttcactattcacttcatctttattttcaaacacattcatctctattcacagattaggtgttctacactttaaaattcagctttataacgttatagttttt

SEQ ID NO: 422882 - DNA, 341 bp, Homo sapiens
ctgcactttgccttggtgagggccagatggctttctggcctctggaacatcagtcctgattctccaggggacagagggcagcagcactcagcgacccagtgggacagctgcgtgcctgcagagggcgtggttttgattccaggcaagggcatgcatggtctaaccctttacaagaggcctcgatgttggtggccgacttactttttcttttagttttatacacgggacaaggtctacttttccatttcttttccatttgttcctctcattttttttttttattttgtcttgtttttagacgaagtctcattcttgtcgcccaggctggagtgcagtggcac

SEQ ID NO: 422883 - DNA, 475 bp, Homo sapiens
tggtgtaatgtcttcaaatattaccaaaccttcctctttaattgaaaggtctttccccattttcagtttatacattagcactgtgggaaaaactgcttatgaaccaacactacttccacgttatattgacattatttctctatttaccaagtgtgtatgggccaattcacattaaagaaaccaacactgcaacagaacagactataatcaactctgggttatgtgctttcaagatcattatgtgctttcaagatcatttgggttatgaagcctcaaatgcctctgagtgttaacttttaggcacatagtattgactgtacccttccacctacatttgtactgctatttagtcaaatcctttacagtagtccacagaattaaaaaccatctctagtccagaggacatctaaaagagacctaaactttatatcaagagcacaatattgggccaggtgtggtggctcatgcctgtaat

SEQ ID NO: 422884 - DNA, 3262 bp, Homo sapiens
  misc_feature (972)..(972): n is a, c, g, or t
cctgtgcttctcgaccaactttgaataaaaagaaaaaatccaaagtaaaaccaaagaaaatccagcaaggagaggaggaggaaaaggaattcagtggtgaaatagaggcagtcccagtcactggcacaggcagagtgaacctgcatgaagggaacacttggtgtcccttcttcctgggtgtccagagtttgcctttagatggaagtggagctgcagaaaaagatggagtctcctcatccttcagttcttccagttggaaaagggtcagcagtagtgagtcagacttttctgatgctgaaggaggcatgcagagtaaaatgaggtcttaccaagctaaagttcgccaaggagccttagtttgttttctttctactataaaatcgatagaaaaaaaagttctttatggctactggtcagcttttattcctgatacgcctgaacttggcagcccacagtcagtgtccttgatgactcttacattgaaagacccttctccaaagacacgtgcctgtgctctgcaagttttatctgccatcttggaaggctcaaagcagtttctttctgttgctgaagataccagtgaccacagaagggcttttacccccttctccgtaatgatcgcttgcagcattagagagttgcacagatgtcttttgttagctttggtggcggagtcatcctcacagaccgttactcagataattaagtgccttgcaaatttagtatcaaatgcaccttatgatcgtctaaaactcagcctgctgaccaaagtctggaaccagataaagccttatattcgccacaaagatgttaatgttcgtgtgtcaagtctcacactcttgggagctatagtgtccacccacgcacctttacctgaagtccaactacttctgcaacagccatgttcttctggactcggtaatagcaattcagcaacccctcacctcagccctcctgattggtggaagaaancccctgcaggaccctctctggaagaaacgtcagttagctcacctaaggggtcttcagagccctgctggctcattcgactctgcatttccattgtcgtactgcccaaggaggattcctgttcaggtagcgatgctggctctgcagcaggaagcacctacgaaccatcccccatgcgactggaggccttacaggtattgactcttctggcaaggggctacttttcaatgactcaagcctacttgatggagcttggagaggtgatttgcaagtgcatgggggaagcagatccatccattcagcttcatggagcaaagcttctggaagaactgggcacaggcttaatacagcagtataaaccagactccactgcagcacctgatcagagagcaccagtcttcttggtggtgatgttctggactatgatgctgaacggtcctttacccagagccctgcagaattcagaacacccaactctccaggcgagcgcctgtgatgccctgtcttccatcttgccagaggccttcagcaatctgccgaatgacaggcagatgctgtgcatcacagtgctgctcgggctgaatgacagcaagaatcgcttagtgaaagctgcaacttcacgggccctgggagtctatgtgctttttccctgtctcagacaggatgtcatatttgttgcagacgcagcaaatgcaatattgatgtcacttgaagacaagtctctgaatgttcgagccaaagcagcctggtccctgggcaacctgacagacactctgattgtcaacatggaaacaccagacccaagtttccaggaagagttctctggtctcctgctcttgaaaatgttacgatcagctatagaagcatccaaggataaagacaaggtaaaaagcaatgcagtccgggcccttggaaatttgcttcattttctgcaaccctctcatatagaaaaacccacatttgcagaaatcattgaggagtctatccaggccctaatttctactgttctaacagaagctgccatgaaagtccgatggaatgcttgttatgcaatgggaaatgtatttaaaaatcctgcccttcctttagggacagccccatggacctcccaggcctacaatgccctgacatcggtcgtgacatcatgcaagaacttcaaagtgcgcatcagatctgcagctgccctttccgtcccggggaagagagagcagtacgggtctgttgaccagtatgctcggatctggaatgcattggtcaccgctttacagaagagtgaagacaccatagactttttggaattcaagtactgtgtcagcctacggacccaaatctgccaggcactgattcacctcttgagcttggccagtgcctcggacctcccttgtatgaaagaaacccttgaactgagtgggaatatggtccagtcctatattctacagtttttaaaatcaggagcagagggagatgacactggagcaccccacagcccacaggaaagagaccagatggtcagaatggcccttaaacacatgggcagcatccaggcaccaactggagacacagccagaagggccatcatgggctttttagaagagatcctggccgtttgttttgactcatctggatcacaaggggcactcccagggttaacaaatcagtgaagatcccaccatactttctagatgtcgaaggcggcagtaggaagacctgagcttgagcataagatctgtgggatttcatcttaggggcagaaacaatccgttcactatttatttagaatgacttagcagccatttaaattttcacagagggctcaaccacctttggagtgactccatagcactggccatggtcagggttgttggaacatctgacctgtgcatccaggagccgaggagtcaggttgtaatacaggccaagcagacgggctttgagggcatttagtctcagaaaaaaaaaatgtagaaggatttcggaattagaattttgtgtattgtatctgtagttttgtaataaactaacgaaaaatagtgtgtccacaatctcctgttgttaccaagttgtatttctagcaagctgcaagcagagctgcagttcagccagtttgtcctggcccagctgcacaggatgcgaggatgctgacagtgcctcacagccgcacaggaccgaggatgctgacggtgcctcacagccacacaggacgcgaggatgctgacggtgcctcacagccacacaggacgcgaggatgctgacagtgcctcacagccacacaggacgcgaggatgctgacggt

SEQ ID NO: 422885 - DNA, 3563 bp, Homo sapiens
  misc_feature (972)..(972): n is a, c, g, or t
cctgtgcttctcgaccaactttgaataaaaagaaaaaatccaaagtaaaaccaaagaaaatccagcaaggagaggaggaggaaaaggaattcagtggtgaaatagaggcagtcccagtcactggcacaggcagagtgaacctgcatgaagggaacacttggtgtcccttcttcctgggtgtccagagtttgcctttagatggaagtggagctgcagaaaaagatggagtctcctcatccttcagttcttccagttggaaaagggtcagcagtagtgagtcagacttttctgatgctgaaggaggcatgcagagtaaaatgaggtcttaccaagctaaagttcgccaaggagccttagtttgttttctttctactataaaatcgatagaaaaaaaagttctttatggctactggtcagcttttattcctgatacgcctgaacttggcagcccacagtcagtgtccttgatgactcttacattgaaagacccttctccaaagacacgtgcctgtgctctgcaagttttatctgccatcttggaaggctcaaagcagtttctttctgttgctgaagataccagtgaccacagaagggcttttacccccttctccgtaatgatcgcttgcagcattagagagttgcacagatgtcttttgttagctttggtggcggagtcatcctcacagaccgttactcagataattaagtgccttgcaaatttagtatcaaatgcaccttatgatcgtctaaaactcagcctgctgaccaaagtctggaaccagataaagccttatattcgccacaaagatgttaatgttcgtgtgtcaagtctcacactcttgggagctatagtgtccacccacgcacctttacctgaagtccaactacttctgcaacagccatgttcttctggactcggtaatagcaattcagcaacccctcacctcagccctcctgattggtggaagaaancccctgcaggaccctctctggaagaaacgtcagttagctcacctaaggggtcttcagagccctgctggctcattcgactctgcatttccattgtcgtactgcccaaggaggattcctgttcaggtagcgatgctggctctgcagcaggaagcacctacgaaccatcccccatgcgactggaggccttacaggtattgactcttctggcaaggggctacttttcaatgactcaagcctacttgatggagcttggagaggtgatttgcaagtgcatgggggaagcagatccatccattcagcttcatggagcaaagcttctggaagaactgggcacaggcttaatacagcagtataaaccagactccactgcagcacctgatcagagagcaccagtcttcttggtggtgatgttctggactatgatgctgaacggtcctttacccagagccctgcagaattcagaacacccaactctccaggcgagcgcctgtgatgccctgtcttccatcttgccagaggccttcagcaatctgccgaatgacaggcagatgctgtgcatcacagtgctgctcgggctgaatgacagcaagaatcgcttagtgaaagctgcaacttcacgggccctgggagtctatgtgctttttccctgtctcagacaggatgtcatatttgttgcagacgcagcaaatgcaatattgatgtcacttgaagacaagtctctgaatgttcgagccaaagcagcctggtccctgggcaacctgacagacactctgattgtcaacatggaaacaccagacccaagtttccaggaagagttctctggtctcctgctcttgaaaatgttacgatcagctatagaagcatccaaggataaagacaaggtaaaaagcaatgcagtccgggcccttggaaatttgcttcattttctgcaaccctctcatatagaaaaacccacatttgcagaaatcattgaggagtctatccaggccctaatttctactgttctaacagaagctgccatgaaagtccgatggaatgcttgttatgcaatgggaaatgtatttaaaaatcctgcccttcctttagggacagccccatggacctcccaggcctacaatgccctgacatcggtcgtgacatcatgcaagaacttcaaagtgcgcatcagatctgcagctgccctttccgtcccggggaagagagagcagtacgggtctgttgaccagtatgctcggatctggaatgcattggtcaccgctttacagaagagtgaagacaccatagactttttggaattcaagtactgtgtcagcctacggacccaaatctgccaggcactgattcacctcttgagcttggccagtgcctcggacctcccttgtatgaaagaaacccttgaactgagtgggaatatggtccagtcctatattctacagtttttaaaatcaggagcagagggagatgacactggagcaccccacagcccacaggaaagagaccagatggtcagaatggcccttaaacacatgggcagcatccaggcaccaactggagacacagccagaagggccatcatgggctttttagaagagatcctggccgtttgttttgactcatctggatcacaaggggcactcccagggttaacaaatcagtgaagatcccaccatactttctagatgtcgaaggcggcagtaggaagacctgagcttgagcataagatctgtgggatttcatcttaggggcagaaacaatccgttcactatttatttagaatgacttagcagccatttaaattttcacagagggctcaaccacctttggagtgactccatagcactggccatggtcagggttgttggaacatctgacctgtgcatccaggagccgaggagtcaggttgtaatacaggccaagcagacgggctttgagggcatttagtctcagaaaaaaaaaatgtagaaggatttcggaattagaattttgtgtattgtatctgtagttttgtaataaactaacgaaaaataaaaaatataaaaaaaaaaaaaaaaaaaaaaaaaaaacaaaaaaagaaaaaacaaaaaaggggggggaccacaacaaagtgaactaccacgaagggggagcaaaaagataagcgcgacaccaccagacatgtacgctgaaaaagacgggaccccacaatagagagcaagcttcgagcacccaacgaccacgtcgccgcgcattaaggaaacagtcagctaagggaaacaccccgccttagctagagagaatactgtgcaacgagaacacttacaacagcggggcagcacacaacggggcaacaccactcctaccaggaggtagacgcccccaccgcggcccacttcacacactgagagcgcataaacagggtgcacacgcgaacgagctaggacaggcagcacgacaatccgggtcaccgggcatggcattaaaattactcggggggaccaaaacccccactctccctgatgagacgcggcagatagtaaaacatacgcgggccggacaaaccggatcacaacacacgacccgtgtagacgcgcagtgctcgcacgaatcaacgt

SEQ ID NO: 422886 - DNA, 3780 bp, Homo sapiens
gctggtctggccggcgacgcgcgtgccctgtggccaaacactgcctggagtgagagcaaactaccagcgcagtggggccggcgcgagtgtgcgtgtgtgtgcgtgtgtgtgtgcgagcgcggtggaggggggggaccaactgcttcacactttcaacactgcactgaagagggagagcgagagagagactggagacgcacagatccccccaaggtctcccaagcctaccgtcccacagattattgtacagagccccaaaaatcgaaacagaggaaacgaacagcagttgaacatggacgaaggaattcctcatttgcaagagagacagttactggaacatagagattttataggactggactattcctctttgtatatgtgtaaacccaaaaggagcatgaaacgagacgacaccaaggatacctacaaattaccgcacagattaatagaaaagaaaagaagagaccgaattaatgaatgcattgctcagctgaaagatttactgcctgaacatctgaaattgacaactctgggacatctggagaaagctgtagtcttggaattaactttgaaacacttaaaagctttaaccgccttaaccgagcaacagcatcagaagataattgctttacagaatggggagcgatctctgaaatcgcccattcagtccgacttggatgcgttccactcgggatttcaaacatgcgccaaagaagtcttgcaatacctctcccggtttgagagctggacacccagggagccgcggtgtgtccagctgatcaaccacttgcacgccgtggccacccagttcttgcccaccccgcagctgttgactcaacaggtccctctgagcaaaggcaccggcgctccctcggccgccgggtccgcggccgccccctgcctggagcgcgcggggcagaagctggagcccctcgcctactgcgtgcccgtcatccagcggactcagcccagcgccgagctcgccgccgagaacgacacggacaccgacagcggctacggcggcgaagccgaggcccggccggaccgcgagaaaggcaaaggcgcgggggcgagccgcgtcaccatcaagcaggagcctcccggggaggactcgccggcgcccaagaggatgaagctggattcccgcggcggcggcagcggcggcggcccggggggcggcgcggcggcggcggcagccgcgcttctggggcccgaccctgccgccgcggccgcgctgctgagacccgacgccgccctgctcagctcgctggtggcgttcggcggaggcggaggcgcgcccttcccgcagcccgcggccgccgcggcccccttctgcctgcccttctgcttcctctcgccttctgcagctgccgcctacgtgcagcccttcctggacaagagcggcctggagaagtatctgtacccggcggcggctgccgccccgttcccgctgctataccccggcatccccgccccggcggcagccgcggcagccgccgccgccgctgccgccgccgccgccgcgttcccctgcctgtcctcggtgttgtcgccccctcccgagaaggcgggcgccgccgccgcgaccctcctgccgcacgaggtggcgccccttggggcgccgcacccccagcacccgcacggccgcacccacctgcccttcgccgggccccgcgagccggggaacccggagagctctgctcaggaagatccctcgcagccaggaaaggaagctccctgaatccttgcgtcccgaaggacggaggttcaagcagagtgagaagttaaaatacccttaaggaggttcaagcagagtgagaagttaaaatacccttaaggtctttaagggaggaagtgtaatagatgcacgacaggcataaacaagaacaacaaaacaggtgttatgtgtacattcggagttcctgttttgctcatcccgcaccaccccaccctccacacactaacatccctttcttccccccaccagctgtaaaagatcctatgcgaaagacactggctcttttttttaatcccccaaataaattttgcccccttttaggccatgttccattatctcttaaaattggaacctaattcgagaggaagtaagaagggtctgttctgtggctgagctaggtgaaccccggggtaggggaaagatgttaacacctttgacgtctttggagttgacatggaacagcaggtagttgttatgtagagctagttctcaaagctgccctgcctgttttaggaggcgttccacaaacagattgaggctcttttagaattgaatttactcttcagtattttctaatgttcagctttctaaaaggcatatatttttcaaagaagtgaggatgcagtttctcacgttgcaacctattctgaagtggtttaaatggtatctcttagtaacttgcactcgttaaagaaacacggagctgggccatcgtcagaactaagtcagggaaggagatggatgagaaggccagaatcattcctagtacatttgctaacactttattgagaaattgaccatgaattaatggactcatcttaatttcttctaagtccatatatagatagatatctatctgtacagatttctatttatccatagataggtatctatacatacacatctcaagtgcatctattcccactctcattaatccatcatgttcctaaatttttgtaatcttactgtaaaaaaaaagtgcactgaacttcaaaacaaaacaaaaaacaacaacaacaaaaaacaagtccaaactgatatatcctatattctgttaaaattcaaaagtgaacgaaagcatttaactggccagttttgattgcaaatgctgtaaagatatagaatgaagtcctgtgaggccttcctatctccaagtctatgtattttctggagaccaaaccagataccagataatcacaaagaaagcttttttaataaggcttaaaccaagaccttgtctagatatttttagtttgttgccaaggtagcactgtgagaaatctcacttggatgttatgtaaggggtgagacacaacagtctgactatgagtgaggaaaatatctgggtcttttcgtcagtttggtgcatttgctgctgctgttgctactgtttgcctcaaacgctgtgtttaaacaacgttaaactcttagcctacaaggtggctcttatgtacatagttgttaatacatccaattaatgatgtctgacatgctatttttgtagggagaaaatatgtgctaatgatattttgagttaaaatatcttttggggaggatttgctgaaaagttgcacttttgttacaatgcttatgcttggtacaagcttatgctgtcttaaattattttaaaaaaataaatactgtctgtgagaaaccagctggtttagaaaagtttagtatgtgacgataaactagaaattacctttatattctagtattttcagcactccataaattctattacctaaatattgccacactattttgtgatttaaaaattcttactaaggaataaaaactttaatatacgatatgatattgtctaataattaaaaaagacataatggatgctcaattagttttaagatatctataactatagggatacaaatcactacagttctcagatttacaccttttttttgtcattggcttgatgtcacacatttccaatctcttgcaagcctccaggctctggctttgtctacctgctcgttcccaatgtatcttaatgaaaagtgcaaaagaaaaacctaccaatt

SEQ ID NO: 422887 - DNA, 4272 bp, Homo sapiens
gctggtctggccggcgacgcgcgtgccctgtggccaaacactgcctggagtgagagcaaactaccagcgcagtggggccggcgcgagtgtgcgtgtgtgtgcgtgtgtgtgtgcgagcgcggtggaggggggggaccaactgcttcacactttcaacactgcactgaagagggagagcgagagagagactggagacgcacagatccccccaaggtctcccaagcctaccgtcccacagattattgtacagagccccaaaaatcgaaacagaggaaacgaacagcagttgaacatggacgaaggaattcctcatttgcaagagagacagttactggaacatagagattttataggactggactattcctctttgtatatgtgtaaacccaaaaggagcatgaaacgagacgacaccaaggatacctacaaattaccgcacagattaatagaaaagaaaagaagagaccgaattaatgaatgcattgctcagctgaaagatttactgcctgaacatctgaaattgacagtaagatgcacattttcattctttgctgctctccaagggcgtgttaatagtctggtgcgactcccagaaaatataagaataaatgtaaatataagttcctgacttaaaacttgtgctataccgtacagagtttcccgcaaactggagtaggtgctcccagctgaaggcaagaaatcatttataacctgtcttgtggaaagctcaagaagtaaaagaacagtacttctttcaaagtgtttgcttaaattgctgtgctgaatggacagccaattaagccaaatgtgtgtttttaagtaaccaagtgcccgtttcttttttgcaccactgcagactctgggacatctggagaaagctgtagtcttggaattaactttgaaacacttaaaagctttaaccgccttaaccgagcaacagcatcagaagataattgctttacagaatggggagcgatctctgaaatcgcccattcagtccgacttggatgcgttccactcgggatttcaaacatgcgccaaagaagtcttgcaatacctctcccggtttgagagctggacacccagggagccgcggtgtgtccagctgatcaaccacttgcacgccgtggccacccagttcttgcccaccccgcagctgttgactcaacaggtccctctgagcaaaggcaccggcgctccctcggccgccgggtccgcggccgccccctgcctggagcgcgcggggcagaagctggagcccctcgcctactgcgtgcccgtcatccagcggactcagcccagcgccgagctcgccgccgagaacgacacggacaccgacagcggctacggcggcgaagccgaggcccggccggaccgcgagaaaggcaaaggcgcgggggcgagccgcgtcaccatcaagcaggagcctcccggggaggactcgccggcgcccaagaggatgaagctggattcccgcggcggcggcagcggcggcggcccggggggcggcgcggcggcggcggcagccgcgcttctggggcccgaccctgccgccgcggccgcgctgctgagacccgacgccgccctgctcagctcgctggtggcgttcggcggaggcggaggcgcgcccttcccgcagcccgcggccgccgcggcccccttctgcctgcccttctgcttcctctcgccttctgcagctgccgcctacgtgcagcccttcctggacaagagcggcctggagaagtatctgtacccggcggcggctgccgccccgttcccgctgctataccccggcatccccgccccggcggcagccgcggcagccgccgccgccgctgccgccgccgccgccgcgttcccctgcctgtcctcggtgttgtcgccccctcccgagaaggcgggcgccgccgccgcgaccctcctgccgcacgaggtggcgccccttggggcgccgcacccccagcacccgcacggccgcacccacctgcccttcgccgggccccgcgagccggggaacccggagagctctgctcaggaagatccctcgcagccaggaaaggaagctccctgaatccttgcgtcccgaaggacggaggttcaagcagagtgagaagttaaaatacccttaaggaggttcaagcagagtgagaagttaaaatacccttaaggtctttaagggaggaagtgtaatagatgcacgacaggcataaacaagaacaacaaaacaggtgttatgtgtacattcggagttcctgttttgctcatcccgcaccaccccaccctccacacactaacatccctttcttccccccaccagctgtaaaagatcctatgcgaaagacactggctcttttttttaatcccccaaataaattttgcccccttttaggccatgttccattatctcttaaaattggaacctaattcgagaggaagtaagaagggtctgttctgtggctgagctaggtgaaccccggggtaggggaaagatgttaacacctttgacgtctttggagttgacatggaacagcaggtagttgttatgtagagctagttctcaaagctgccctgcctgttttaggaggcgttccacaaacagattgaggctcttttagaattgaatttactcttcagtattttctaatgttcagctttctaaaaggcatatatttttcaaagaagtgaggatgcagtttctcacgttgcaacctattctgaagtggtttaaatggtatctcttagtaacttgcactcgttaaagaaacacggagctgggccatcgtcagaactaagtcagggaaggagatggatgagaaggccagaatcattcctagtacatttgctaacactttattgagaaattgaccatgaattaatggactcatcttaatttcttctaagtccatatatagatagatatctatctgtacagatttctatttatccatagataggtatctatacatacacatctcaagtgcatctattcccactctcattaatccatcatgttcctaaatttttgtaatcttactgtaaaaaaaaagtgcactgaacttcaaaacaaaacaaaaaacaacaacaacaaaaaacaagtccaaactgatatatcctatattctgttaaaattcaaaagtgaacgaaagcatttaactggccagttttgattgcaaatgctgtaaagatatagaatgaagtcctgtgaggccttcctatctccaagtctatgtattttctggagaccaaaccagataccagataatcacaaagaaagcttttttaataaggcttaaaccaagaccttgtctagatatttttagtttgttgccaaggtagcactgtgagaaatctcacttggatgttatgtaaggggtgagacacaacagtctgactatgagtgaggaaaatatctgggtcttttcgtcagtttggtgcatttgctgctgctgttgctactgtttgcctcaaacgctgtgtttaaacaacgttaaactcttagcctacaaggtggctcttatgtacatagttgttaatacatccaattaatgatgtctgacatgctatttttgtagggagaaaatatgtgctaatgatattttgagttaaaatatcttttggggaggatttgctgaaaagttgcacttttgttacaatgcttatgcttggtacaagcttatgctgtcttaaattattttaaaaaaataaatactgtctgtgagaaaccagctggtttagaaaagtttagtatgtgacgataaactagaaattacctttatattctagtattttcagcactccataaattctattacctaaatattgccacactattttgtgatttaaaaattcttactaaggaataaaaactttaatatacgatatgatattgtctaataattaaaaaagacataatggatgctcaattagttttaagatatctataactatagggatacaaatcactacagttctcagatttacaccttttttttgtcattggcttgatgtcacacatttccaatctcttgcaagcctccaggctctggctttgtctacctgctcgttcccaatgtatcttaatgaaaagtgcaaaagaaaaacctaccaattaacttgtgtggtttgtttatgttagacccaattttctattgttttaatgattgacaagtttttcagttttcgtctgtgacatcacatagcctctctagtatggtcaggtgttcctctttcactgggtcttgtataaatagatgatcacaaaggggtgcttaa

SEQ ID NO: 422888 - DNA, 3709 bp, Homo sapiens
agcagtgtcaggactccctcacccgcaccccatctctttccgtgggctcatgggttccctctcatttgttaaattgcttatactttcccttcattggaacgagcccatttcccgaagcatcctagaggctttcagcagaactcggaggaatcaggatttaaagtggcggttgcacccgctccactttggttttcagctgggaggagagcgccctctccccgctccgcacctccgccaccccgcttctctcgtcaactggtggattatatcacttgaatactggggaaaaaccgagatcactttagtcgatgcagggcccacgtgataagcagatgttttaacgtgggtatgtttcttcttgcctccactcctccgtcccccacccccatcccttcctcatcctaggggagcgatctctgaaatcgcccattcagtccgacttggatgcgttccactcgggatttcaaacatgcgccaaagaagtcttgcaatacctctcccggtttgagagctggacacccagggagccgcggtgtgtccagctgatcaaccacttgcacgccgtggccacccagttcttgcccaccccgcagctgttgactcaacaggtccctctgagcaaaggcaccggcgctccctcggccgccgggtccgcggccgccccctgcctggagcgcgcggggcagaagctggagcccctcgcctactgcgtgcccgtcatccagcggactcagcccagcgccgagctcgccgccgagaacgacacggacaccgacagcggctacggcggcgaagccgaggcccggccggaccgcgagaaaggcaaaggcgcgggggcgagccgcgtcaccatcaagcaggagcctcccggggaggactcgccggcgcccaagaggatgaagctggattcccgcggcggcggcagcggcggcggcccggggggcggcgcggcggcggcggcagccgcgcttctggggcccgaccctgccgccgcggccgcgctgctgagacccgacgccgccctgctcagctcgctggtggcgttcggcggaggcggaggcgcgcccttcccgcagcccgcggccgccgcggcccccttctgcctgcccttctgcttcctctcgccttctgcagctgccgcctacgtgcagcccttcctggacaagagcggcctggagaagtatctgtacccggcggcggctgccgccccgttcccgctgctataccccggcatccccgccccggcggcagccgcggcagccgccgccgccgctgccgccgccgccgccgcgttcccctgcctgtcctcggtgttgtcgccccctcccgagaaggcgggcgccgccgccgcgaccctcctgccgcacgaggtggcgccccttggggcgccgcacccccagcacccgcacggccgcacccacctgcccttcgccgggccccgcgagccggggaacccggagagctctgctcaggaagatccctcgcagccaggaaaggaagctccctgaatccttgcgtcccgaaggacggaggttcaagcagagtgagaagttaaaatacccttaaggaggttcaagcagagtgagaagttaaaatacccttaaggtctttaagggaggaagtgtaatagatgcacgacaggcataaacaagaacaacaaaacaggtgttatgtgtacattcggagttcctgttttgctcatcccgcaccaccccaccctccacacactaacatccctttcttccccccaccagctgtaaaagatcctatgcgaaagacactggctcttttttttaatcccccaaataaattttgcccccttttaggccatgttccattatctcttaaaattggaacctaattcgagaggaagtaagaagggtctgttctgtggctgagctaggtgaaccccggggtaggggaaagatgttaacacctttgacgtctttggagttgacatggaacagcaggtagttgttatgtagagctagttctcaaagctgccctgcctgttttaggaggcgttccacaaacagattgaggctcttttagaattgaatttactcttcagtattttctaatgttcagctttctaaaaggcatatatttttcaaagaagtgaggatgcagtttctcacgttgcaacctattctgaagtggtttaaatggtatctcttagtaacttgcactcgttaaagaaacacggagctgggccatcgtcagaactaagtcagggaaggagatggatgagaaggccagaatcattcctagtacatttgctaacactttattgagaaattgaccatgaattaatggactcatcttaatttcttctaagtccatatatagatagatatctatctgtacagatttctatttatccatagataggtatctatacatacacatctcaagtgcatctattcccactctcattaatccatcatgttcctaaatttttgtaatcttactgtaaaaaaaaagtgcactgaacttcaaaacaaaacaaaaaacaacaacaacaaaaaacaagtccaaactgatatatcctatattctgttaaaattcaaaagtgaacgaaagcatttaactggccagttttgattgcaaatgctgtaaagatatagaatgaagtcctgtgaggccttcctatctccaagtctatgtattttctggagaccaaaccagataccagataatcacaaagaaagcttttttaataaggcttaaaccaagaccttgtctagatatttttagtttgttgccaaggtagcactgtgagaaatctcacttggatgttatgtaaggggtgagacacaacagtctgactatgagtgaggaaaatatctgggtcttttcgtcagtttggtgcatttgctgctgctgttgctactgtttgcctcaaacgctgtgtttaaacaacgttaaactcttagcctacaaggtggctcttatgtacatagttgttaatacatccaattaatgatgtctgacatgctatttttgtagggagaaaatatgtgctaatgatattttgagttaaaatatcttttggggaggatttgctgaaaagttgcacttttgttacaatgcttatgcttggtacaagcttatgctgtcttaaattattttaaaaaaataaatactgtctgtgagaaaccagctggtttagaaaagtttagtatgtgacgataaactagaaattacctttatattctagtattttcagcactccataaattctattacctaaatattgccacactattttgtgatttaaaaattcttactaaggaataaaaactttaatatacgatatgatattgtctaataattaaaaaagacataatggatgctcaattagttttaagatatctataactatagggatacaaatcactacagttctcagatttacaccttttttttgtcattggcttgatgtcacacatttccaatctcttgcaagcctccaggctctggctttgtctacctgctcgttcccaatgtatcttaatgaaaagtgcaaaagaaaaacctaccaattaacttgtgtggtttgtttatgttagacccaattttctattgttttaatgattgacaagtttttcagttttcgtctgtgacatcacatagcctctctagtatggtcaggtgttcctctttcactgggtcttgtataaatagatgatcacaaaggggtgcttaa

SEQ ID NO: 422889 - DNA, 4407 bp, Homo sapiens
gctggtctggccggcgacgcgcgtgccctgtggccaaacactgcctggagtgagagcaaactaccagcgcagtggggccggcgcgagtgtgcgtgtgtgtgcgtgtgtgtgtgcgagcgcggtggaggggggggaccaactgcttcacactttcaacactgcactgaagagggagagcgagagagagactggagacgcacagatccccccaaggtctcccaagcctaccgtcccacagattattgtacagagccccaaaaatcgaaacagaggaaacgaacagcagttgaacatggacgaaggaattcctcatttgcaagagagacagttactggaacatagagattttatagggtaaggtgcacgcacccttgcgaatatctgtctaggctttggtttgatttttttcttctccagaaagtggtatggagctggcgagggcagagcccctccccgaatgggtgcctgatgctgatttctgttttgcagactggactattcctctttgtatatgtgtaaacccaaaaggagcatgaaacgagacgacaccaaggatacctacaaattaccgcacagattaatagaaaagaaaagaagagaccgaattaatgaatgcattgctcagctgaaagatttactgcctgaacatctgaaattgacagtaagatgcacattttcattctttgctgctctccaagggcgtgttaatagtctggtgcgactcccagaaaatataagaataaatgtaaatataagttcctgacttaaaacttgtgctataccgtacagagtttcccgcaaactggagtaggtgctcccagctgaaggcaagaaatcatttataacctgtcttgtggaaagctcaagaagtaaaagaacagtacttctttcaaagtgtttgcttaaattgctgtgctgaatggacagccaattaagccaaatgtgtgtttttaagtaaccaagtgcccgtttcttttttgcaccactgcagactctgggacatctggagaaagctgtagtcttggaattaactttgaaacacttaaaagctttaaccgccttaaccgagcaacagcatcagaagataattgctttacagaatggggagcgatctctgaaatcgcccattcagtccgacttggatgcgttccactcgggatttcaaacatgcgccaaagaagtcttgcaatacctctcccggtttgagagctggacacccagggagccgcggtgtgtccagctgatcaaccacttgcacgccgtggccacccagttcttgcccaccccgcagctgttgactcaacaggtccctctgagcaaaggcaccggcgctccctcggccgccgggtccgcggccgccccctgcctggagcgcgcggggcagaagctggagcccctcgcctactgcgtgcccgtcatccagcggactcagcccagcgccgagctcgccgccgagaacgacacggacaccgacagcggctacggcggcgaagccgaggcccggccggaccgcgagaaaggcaaaggcgcgggggcgagccgcgtcaccatcaagcaggagcctcccggggaggactcgccggcgcccaagaggatgaagctggattcccgcggcggcggcagcggcggcggcccggggggcggcgcggcggcggcggcagccgcgcttctggggcccgaccctgccgccgcggccgcgctgctgagacccgacgccgccctgctcagctcgctggtggcgttcggcggaggcggaggcgcgcccttcccgcagcccgcggccgccgcggcccccttctgcctgcccttctgcttcctctcgccttctgcagctgccgcctacgtgcagcccttcctggacaagagcggcctggagaagtatctgtacccggcggcggctgccgccccgttcccgctgctataccccggcatccccgccccggcggcagccgcggcagccgccgccgccgctgccgccgccgccgccgcgttcccctgcctgtcctcggtgttgtcgccccctcccgagaaggcgggcgccgccgccgcgaccctcctgccgcacgaggtggcgccccttggggcgccgcacccccagcacccgcacggccgcacccacctgcccttcgccgggccccgcgagccggggaacccggagagctctgctcaggaagatccctcgcagccaggaaaggaagctccctgaatccttgcgtcccgaaggacggaggttcaagcagagtgagaagttaaaatacccttaaggaggttcaagcagagtgagaagttaaaatacccttaaggtctttaagggaggaagtgtaatagatgcacgacaggcataaacaagaacaacaaaacaggtgttatgtgtacattcggagttcctgttttgctcatcccgcaccaccccaccctccacacactaacatccctttcttccccccaccagctgtaaaagatcctatgcgaaagacactggctcttttttttaatcccccaaataaattttgcccccttttaggccatgttccattatctcttaaaattggaacctaattcgagaggaagtaagaagggtctgttctgtggctgagctaggtgaaccccggggtaggggaaagatgttaacacctttgacgtctttggagttgacatggaacagcaggtagttgttatgtagagctagttctcaaagctgccctgcctgttttaggaggcgttccacaaacagattgaggctcttttagaattgaatttactcttcagtattttctaatgttcagctttctaaaaggcatatatttttcaaagaagtgaggatgcagtttctcacgttgcaacctattctgaagtggtttaaatggtatctcttagtaacttgcactcgttaaagaaacacggagctgggccatcgtcagaactaagtcagggaaggagatggatgagaaggccagaatcattcctagtacatttgctaacactttattgagaaattgaccatgaattaatggactcatcttaatttcttctaagtccatatatagatagatatctatctgtacagatttctatttatccatagataggtatctatacatacacatctcaagtgcatctattcccactctcattaatccatcatgttcctaaatttttgtaatcttactgtaaaaaaaaagtgcactgaacttcaaaacaaaacaaaaaacaacaacaacaaaaaacaagtccaaactgatatatcctatattctgttaaaattcaaaagtgaacgaaagcatttaactggccagttttgattgcaaatgctgtaaagatatagaatgaagtcctgtgaggccttcctatctccaagtctatgtattttctggagaccaaaccagataccagataatcacaaagaaagcttttttaataaggcttaaaccaagaccttgtctagatatttttagtttgttgccaaggtagcactgtgagaaatctcacttggatgttatgtaaggggtgagacacaacagtctgactatgagtgaggaaaatatctgggtcttttcgtcagtttggtgcatttgctgctgctgttgctactgtttgcctcaaacgctgtgtttaaacaacgttaaactcttagcctacaaggtggctcttatgtacatagttgttaatacatccaattaatgatgtctgacatgctatttttgtagggagaaaatatgtgctaatgatattttgagttaaaatatcttttggggaggatttgctgaaaagttgcacttttgttacaatgcttatgcttggtacaagcttatgctgtcttaaattattttaaaaaaataaatactgtctgtgagaaaccagctggtttagaaaagtttagtatgtgacgataaactagaaattacctttatattctagtattttcagcactccataaattctattacctaaatattgccacactattttgtgatttaaaaattcttactaaggaataaaaactttaatatacgatatgatattgtctaataattaaaaaagacataatggatgctcaattagttttaagatatctataactatagggatacaaatcactacagttctcagatttacaccttttttttgtcattggcttgatgtcacacatttccaatctcttgcaagcctccaggctctggctttgtctacctgctcgttcccaatgtatcttaatgaaaagtgcaaaagaaaaacctaccaattaacttgtgtggtttgtttatgttagacccaattttctattgttttaatgattgacaagtttttcagttttcgtctgtgacatcacatagcctctctagtatggtcaggtgttcctctttcactgggtcttgtataaatagatgatcacaaaggggtgcttaa

SEQ ID NO: 422890 - DNA, 4232 bp, Homo sapiens
gctggtctggccggcgacgcgcgtgccctgtggccaaacactgcctggagtgagagcaaactaccagcgcagtggggccggcgcgagtgtgcgtgtgtgtgcgtgtgtgtgtgcgagcgcggtggaggggggggaccaactgcttcacactttcaacactgcactgaagagggagagcgagagagagactggagacgcacagatccccccaaggtctcccaagcctaccgtcccacagattattgtacagagccccaaaaatcgaaacagaggaaacgaacagcagttgaacatggacgaaggaattcctcatttgcaagagagacagttactggaacatagagattttataggactggactattcctctttgtatatgtgtaaacccaaaaggagcatgaaacgagacgacaccaaggatacctacaaattaccgcacagattaatagaaaagaaaagaagagaccgaattaatgaatgcattgctcagctgaaagatttactgcctgaacatctgaaattgacagtaagatgcacattttcattctttgctgctctccaagggcgtgttaatagtctggtgcgactcccagaaaatataagaataaatgtaaatataagttcctgacttaaaacttgtgctataccgtacagagtttcccgcaaactggagtaggtgctcccagctgaaggcaagaaatcatttataacctgtcttgtggaaagctcaagaagtaaaagaacagtacttctttcaaagtgtttgcttaaattgctgtgctgaatggacagccaattaagccaaatgtgtgtttttaagtaaccaagtgcccgtttcttttttgcaccactgcagactctgggacatctggagaaagctgtagtcttggaattaactttgaaacacttaaaagctttaaccgccttaaccgagcaacagcatcagaagataattgctttacagaatggggagcgatctctgaaatcgcccattcagtccgacttggatgcgttccactcgggatttcaaacatgcgccaaagaagtcttgcaatacctctcccggtttgagagctggacacccagggagccgcggtgtgtccagctgatcaaccacttgcacgccgtggccacccagttcttgcccaccccgcagctgttgactcaacaggtccctctgagcaaaggcaccggcgctccctcggccgccgggtccgcggccgccccctgcctggagcgcgcggggcagaagctggagcccctcgcctactgcgtgcccgtcatccagcggactcagcccagcgccgagctcgccgccgagaacgacacggacaccgacagcggctacggcggcgaagccgaggcccggccggaccgcgagaaaggcaaaggcgcgggggcgagccgcgtcaccatcaagcaggagcctcccggggaggactcgccggcgcccaagaggatgaagctggattcccgcggcggcggcagcggcggcggcccggggggcggcgcggcggcggcggcagccgcgcttctggggcccgaccctgccgccgcggccgcgctgctgagacccgacgccgccctgctcagctcgctggtggcgttcggcggaggcggaggcgcgcccttcccgcagcccgcggccgccgcggcccccttctgcctgcccttctgcttcctctcgccttctgcagctgccgcctacgtgcagcccttcctggacaagagcggcctggagaagtatctgtacccggcggcggctgccgccccgttcccgctgctataccccggcatcccgccgccgccgccgcgttcccctgcctgtcctcggtgttgtcgccccctcccgagaaggcgggcgccgccgccgcgaccctcctgccgcacgaggtggcgccccttggggcgccgcacccccagcacccgcacggccgcacccacctgcccttcgccgggccccgcgagccggggaacccggagagctctgctcaggaagatccctcgcagccaggaaaggaagctccctgaatccttgcgtcccgaaggacggaggttcaagcagagtgagaagttaaaatacccttaaggaggttcaagcagagtgagaagttaaaatacccttaaggtctttaagggaggaagtgtaatagatgcacgacaggcataaacaagaacaacaaaacaggtgttatgtgtacattcggagttcctgttttgctcatcccgcaccaccccaccctccacacactaacatccctttcttccccccaccagctgtaaaagatcctatgcgaaagacactggctcttttttttaatcccccaaataaattttgcccccttttaggccatgttccattatctcttaaaattggaacctaattcgagaggaagtaagaagggtctgttctgtggctgagctaggtgaaccccggggtaggggaaagatgttaacacctttgacgtctttggagttgacatggaacagcaggtagttgttatgtagagctagttctcaaagctgccctgcctgttttaggaggcgttccacaaacagattgaggctcttttagaattgaatttactcttcagtattttctaatgttcagctttctaaaaggcatatatttttcaaagaagtgaggatgcagtttctcacgttgcaacctattctgaagtggtttaaatggtatctcttagtaacttgcactcgttaaagaaacacggagctgggccatcgtcagaactaagtcagggaaggagatggatgagaaggccagaatcattcctagtacatttgctaacactttattgagaaattgaccatgaattaatggactcatcttaatttcttctaagtccatatatagatagatatctatctgtacagatttctatttatccatagataggtatctatacatacacatctcaagtgcatctattcccactctcattaatccatcatgttcctaaatttttgtaatcttactgtaaaaaaaaagtgcactgaacttcaaaacaaaacaaaaaacaacaacaacaaaaaacaagtccaaactgatatatcctatattctgttaaaattcaaaagtgaacgaaagcatttaactggccagttttgattgcaaatgctgtaaagatatagaatgaagtcctgtgaggccttcctatctccaagtctatgtattttctggagaccaaaccagataccagataatcacaaagaaagcttttttaataaggcttaaaccaagaccttgtctagatatttttagtttgttgccaaggtagcactgtgagaaatctcacttggatgttatgtaaggggtgagacacaacagtctgactatgagtgaggaaaatatctgggtcttttcgtcagtttggtgcatttgctgctgctgttgctactgtttgcctcaaacgctgtgtttaaacaacgttaaactcttagcctacaaggtggctcttatgtacatagttgttaatacatccaattaatgatgtctgacatgctatttttgtagggagaaaatatgtgctaatgatattttgagttaaaatatcttttggggaggatttgctgaaaagttgcacttttgttacaatgcttatgcttggtacaagcttatgctgtcttaaattattttaaaaaaataaatactgtctgtgagaaaccagctggtttagaaaagtttagtatgtgacgataaactagaaattacctttatattctagtattttcagcactccataaattctattacctaaatattgccacactattttgtgatttaaaaattcttactaaggaataaaaactttaatatacgatatgatattgtctaataattaaaaaagacataatggatgctcaattagttttaagatatctataactatagggatacaaatcactacagttctcagatttacaccttttttttgtcattggcttgatgtcacacatttccaatctcttgcaagcctccaggctctggctttgtctacctgctcgttcccaatgtatcttaatgaaaagtgcaaaagaaaaacctaccaattaacttgtgtggtttgtttatgttagacccaattttctattgttttaatgattgacaagtttttcagttttcgtctgtgacatcacatagcctctctagtatggtcaggtgttcctctttcactgggtcttgtataaatagatgatcacaaaggggtgcttaa

SEQ ID NO: 422891 - DNA, 3874 bp, Homo sapiens
gctggtctggccggcgacgcgcgtgccctgtggccaaacactgcctggagtgagagcaaactaccagcgcagtggggccggcgcgagtgtgcgtgtgtgtgcgtgtgtgtgtgcgagcgcggtggaggggggggaccaactgcttcacactttcaacactgcactgaagagggagagcgagagagagactggagacgcacagatccccccaaggtctcccaagcctaccgtcccacagattattgtacagagccccaaaaatcgaaacagaggaaacgaacagcagttgaacatggacgaaggaattcctcatttgcaagagagacagttactggaacatagagattttataggactggactattcctctttgtatatgtgtaaacccaaaaggagcatgaaacgagacgacaccaaggatacctacaaattaccgcacagattaatagaaaagaaaagaagagaccgaattaatgaatgcattgctcagctgaaagatttactgcctgaacatctgaaattgacagtaagatgcacattttcattctttgctgctctccaagggcgtgttaatagtctggtgcgactcccagaaaatataagaataaatgtaaatataagttcctgacttaaaacttgtgctataccgtacagagtttcccgcaaactggagtaggtgctcccagctgaaggcaagaaatcatttataacctgtcttgtggaaagctcaagaagtaaaagaacagtacttctttcaaagtgtttgcttaaattgctgtgctgaatggacagccaattaagccaaatgtgtgtttttaagtaaccaagtgcccgtttcttttttgcaccactgcagactctgggacatctggagaaagctgtagtcttggaattaactttgaaacacttaaaagctttaaccgccttaaccgagcaacagcatcagaagataattgctttacagaatggggagcgatctctgaaatcgcccattcagtccgacttggatgcgttccactcgggatttcaaacatgcgccaaagaagtcttgcaatacctctcccggtttgagagctggacacccagggagccgcggtgtgtccagctgatcaaccacttgcacgccgtggccacccagttcttgcccaccccgcagctgttgactcaacaggtccctctgagcaaaggcaccggcgctccctcggccgccgggtccgcggccgccccctgcctggagcgcgcggggcagaagctggagcccctcgcctactgcgtgcccgtcatccagcggactcagcccagcgccgagctcgccgccgagaacgacacggacaccgacagcggctacggcggcgaagccgaggcccggccggaccgcgagaaaggcaaaggcgcgggggcgagccgcgtcaccatcaagcaggagcctcccggggaggactgccgccgccgccgcgttcccctgcctgtcctcggtgttgtcgccccctcccgagaaggcgggcgccgccgccgcgaccctcctgccgcacgaggtggcgccccttggggcgccgcacccccagcacccgcacggccgcacccacctgcccttcgccgggccccgcgagccggggaacccggagagctctgctcaggaagatccctcgcagccaggaaaggaagctccctgaatccttgcgtcccgaaggacggaggttcaagcagagtgagaagttaaaatacccttaaggaggttcaagcagagtgagaagttaaaatacccttaaggtctttaagggaggaagtgtaatagatgcacgacaggcataaacaagaacaacaaaacaggtgttatgtgtacattcggagttcctgttttgctcatcccgcaccaccccaccctccacacactaacatccctttcttccccccaccagctgtaaaagatcctatgcgaaagacactggctcttttttttaatcccccaaataaattttgcccccttttaggccatgttccattatctcttaaaattggaacctaattcgagaggaagtaagaagggtctgttctgtggctgagctaggtgaaccccggggtaggggaaagatgttaacacctttgacgtctttggagttgacatggaacagcaggtagttgttatgtagagctagttctcaaagctgccctgcctgttttaggaggcgttccacaaacagattgaggctcttttagaattgaatttactcttcagtattttctaatgttcagctttctaaaaggcatatatttttcaaagaagtgaggatgcagtttctcacgttgcaacctattctgaagtggtttaaatggtatctcttagtaacttgcactcgttaaagaaacacggagctgggccatcgtcagaactaagtcagggaaggagatggatgagaaggccagaatcattcctagtacatttgctaacactttattgagaaattgaccatgaattaatggactcatcttaatttcttctaagtccatatatagatagatatctatctgtacagatttctatttatccatagataggtatctatacatacacatctcaagtgcatctattcccactctcattaatccatcatgttcctaaatttttgtaatcttactgtaaaaaaaaagtgcactgaacttcaaaacaaaacaaaaaacaacaacaacaaaaaacaagtccaaactgatatatcctatattctgttaaaattcaaaagtgaacgaaagcatttaactggccagttttgattgcaaatgctgtaaagatatagaatgaagtcctgtgaggccttcctatctccaagtctatgtattttctggagaccaaaccagataccagataatcacaaagaaagcttttttaataaggcttaaaccaagaccttgtctagatatttttagtttgttgccaaggtagcactgtgagaaatctcacttggatgttatgtaaggggtgagacacaacagtctgactatgagtgaggaaaatatctgggtcttttcgtcagtttggtgcatttgctgctgctgttgctactgtttgcctcaaacgctgtgtttaaacaacgttaaactcttagcctacaaggtggctcttatgtacatagttgttaatacatccaattaatgatgtctgacatgctatttttgtagggagaaaatatgtgctaatgatattttgagttaaaatatcttttggggaggatttgctgaaaagttgcacttttgttacaatgcttatgcttggtacaagcttatgctgtcttaaattattttaaaaaaataaatactgtctgtgagaaaccagctggtttagaaaagtttagtatgtgacgataaactagaaattacctttatattctagtattttcagcactccataaattctattacctaaatattgccacactattttgtgatttaaaaattcttactaaggaataaaaactttaatatacgatatgatattgtctaataattaaaaaagacataatggatgctcaattagttttaagatatctataactatagggatacaaatcactacagttctcagatttacaccttttttttgtcattggcttgatgtcacacatttccaatctcttgcaagcctccaggctctggctttgtctacctgctcgttcccaatgtatcttaatgaaaagtgcaaaagaaaaacctaccaattaacttgtgtggtttgtttatgttagacccaattttctattgttttaatgattgacaagtttttcagttttcgtctgtgacatcacatagcctctctagtatggtcaggtgttcctctttcactgggtcttgtataaatagatgatcacaaaggggtgcttaa

SEQ ID NO: 422892 - DNA, 4218 bp, Homo sapiens
gctggtctggccggcgacgcgcgtgccctgtggccaaacactgcctggagtgagagcaaactaccagcgcagtggggccggcgcgagtgtgcgtgtgtgtgcgtgtgtgtgtgcgagcgcggtggaggggggggaccaactgcttcacactttcaacactgcactgaagagggagagcgagagagagactggagacgcacagatccccccaaggtctcccaagcctaccgtcccacagattattgtacagagccccaaaaatcgaaacagaggaaacgaacagcagttgaacatggacgaaggaattcctcatttgcaagagagacagttactggaacatagagattttataggactggactattcctctttgtatatgtgtaaacccaaaaggagcatgaaacgagacgacaccaaggatacctacaaattaccgcacagattaatagaaaagaaaagaagagaccgaattaatgaatgcattgctcagctgaaagatttactgcctgaacatctgaaattgacagtaagatgcacattttcattctttgctgctctccaagggcgtgttaatagtctggtgcgactcccagaaaatataagaataaatgtaaatataagttcctgacttaaaacttgtgctataccgtacagagtttcccgcaaactggagtaggtgctcccagctgaaggcaagaaatcatttataacctgtcttgtggaaagctcaagaagtaaaagaacagtacttctttcaaagtgtttgcttaaattgctgtgctgaatggacagccaattaagccaaatgtgtgtttttaagtaaccaagtgcccgtttcttttttgcaccactgcagactctgggacatctggagaaagctgtagtcttggaattaactttgaaacacttaaaagctttaaccgccttaaccgagcaacagcatcagaagataattgctttacagaatggggagcgatctctgaaatcgcccattcagtccgacttggatgcgttccactcgggatttcaaacatgcgccaaagaagtcttgcaatacctctcccggtttgagagctggacacccagggagccgcggtgtgtccagctgatcaaccacttgcacgccgtggccacccagttcttgcccaccccgcagctgttgactcaacaggtccctctgagcaaaggcaccggcgctccctcggccgccgggtccgcggccgccccctgcctggagcgcgcggggcagaagctggagcccctcgcctactgcgtgcccgtcatccagcggactcagcccagcgccgagctcgccgccgagaacgacacggacaccgacagcggctacggcggcgaagccgaggcccggccggaccgcgagaaaggcaaaggcgcgggggcgagccgcgtcaccatcaagcaggagcctcccggggaggactcgccggcgcccaagaggatgaagctggattcccgcggcggcggcagcggcggcggcccggggggcggcgcggcggcggcggcagccgcgcttctggggcccgaccctgccgccgcggccgcgctgctgagacccgacgccgccctgctcagctcgctggtggcgttcggcggaggcggaggcgcgcccttcccgcagcccgcggccgccgcggcccccttctgcctgcccttctgcttcctctcgccttctgcagctgccgcctacgtgcagcccttcctggacaagagcggcctggagaagtatctgtacccggcggcggctgccgccccgttcccgctgctataccccggcatccccgccccggcggcagccgcggcagccgccgccgccgctgccgccgccgccgccgcgttcccctgcctgtcctcggtgttgtcgccccctcccgagaaggcgggcgccgccgccgcgaccctcctgccgcacgaggtggcgccccttggggcgccgcacccccagcacccgcacggccgcacccacctgcccttcgccgggccccgcgagccggggaacccggagagctctgctcaggaagatccctcgcagccaggaaaggaagctccctgaatccttgcgtcccgaaggacggaggttcaagcagagtgagaagttaaaatacccttaaggaggttcaagcagagtgagaagttaaaatacccttaaggtctttaagggaggaagtgtaatagatgcacgacaggcataaacaagaacaacaaaacaggtgttatgtgtacattcggagttcctgttttgctcatcccgcaccaccccaccctccacacactaacatccctttcttccccccaccagctttttgcccccttttaggccatgttccattatctcttaaaattggaacctaattcgagaggaagtaagaagggtctgttctgtggctgagctaggtgaaccccggggtaggggaaagatgttaacacctttgacgtctttggagttgacatggaacagcaggtagttgttatgtagagctagttctcaaagctgccctgcctgttttaggaggcgttccacaaacagattgaggctcttttagaattgaatttactcttcagtattttctaatgttcagctttctaaaaggcatatatttttcaaagaagtgaggatgcagtttctcacgttgcaacctattctgaagtggtttaaatggtatctcttagtaacttgcactcgttaaagaaacacggagctgggccatcgtcagaactaagtcagggaaggagatggatgagaaggccagaatcattcctagtacatttgctaacactttattgagaaattgaccatgaattaatggactcatcttaatttcttctaagtccatatatagatagatatctatctgtacagatttctatttatccatagataggtatctatacatacacatctcaagtgcatctattcccactctcattaatccatcatgttcctaaatttttgtaatcttactgtaaaaaaaaagtgcactgaacttcaaaacaaaacaaaaaacaacaacaacaaaaaacaagtccaaactgatatatcctatattctgttaaaattcaaaagtgaacgaaagcatttaactggccagttttgattgcaaatgctgtaaagatatagaatgaagtcctgtgaggccttcctatctccaagtctatgtattttctggagaccaaaccagataccagataatcacaaagaaagcttttttaataaggcttaaaccaagaccttgtctagatatttttagtttgttgccaaggtagcactgtgagaaatctcacttggatgttatgtaaggggtgagacacaacagtctgactatgagtgaggaaaatatctgggtcttttcgtcagtttggtgcatttgctgctgctgttgctactgtttgcctcaaacgctgtgtttaaacaacgttaaactcttagcctacaaggtggctcttatgtacatagttgttaatacatccaattaatgatgtctgacatgctatttttgtagggagaaaatatgtgctaatgatattttgagttaaaatatcttttggggaggatttgctgaaaagttgcacttttgttacaatgcttatgcttggtacaagcttatgctgtcttaaattattttaaaaaaataaatactgtctgtgagaaaccagctggtttagaaaagtttagtatgtgacgataaactagaaattacctttatattctagtattttcagcactccataaattctattacctaaatattgccacactattttgtgatttaaaaattcttactaaggaataaaaactttaatatacgatatgatattgtctaataattaaaaaagacataatggatgctcaattagttttaagatatctataactatagggatacaaatcactacagttctcagatttacaccttttttttgtcattggcttgatgtcacacatttccaatctcttgcaagcctccaggctctggctttgtctacctgctcgttcccaatgtatcttaatgaaaagtgcaaaagaaaaacctaccaattaacttgtgtggtttgtttatgttagacccaattttctattgttttaatgattgacaagtttttcagttttcgtctgtgacatcacatagcctctctagtatggtcaggtgttcctctttcactgggtcttgtataaatagatgatcacaaaggggtgcttaa

SEQ ID NO: 422893 - DNA, 4222 bp, Homo sapiens
gctggtctggccggcgacgcgcgtgccctgtggccaaacactgcctggagtgagagcaaactaccagcgcagtggggccggcgcgagtgtgcgtgtgtgtgcgtgtgtgtgtgcgagcgcggtggaggggggggaccaactgcttcacactttcaacactgcactgaagagggagagcgagagagagactggagacgcacagatccccccaaggtctcccaagcctaccgtcccacagattattgtacagagccccaaaaatcgaaacagaggaaacgaacagcagttgaacatggacgaaggaattcctcatttgcaagagagacagttactggaacatagagattttataggactggactattcctctttgtatatgtgtaaacccaaaaggagcatgaaacgagacgacaccaaggatacctacaaattaccgcacagattaatagaaaagaaaagaagagaccgaattaatgaatgcattgctcagctgaaagatttactgcctgaacatctgaaattgacagtaagatgcacattttcattctttgctgctctccaagggcgtgttaatagtctggtgcgactcccagaaaatataagaataaatgtaaatataagttcctgacttaaaacttgtgctataccgtacagagtttcccgcaaactggagtaggtgctcccagctgaaggcaagaaatcatttataacctgtcttgtggaaagctcaagaagtaaaagaacagtacttctttcaaagtgtttgcttaaattgctgtgctgaatggacagccaattaagccaaatgtgtgtttttaagtaaccaagtgcccgtttcttttttgcaccactgcagactctgggacatctggagaaagctgtagtcttggaattaactttgaaacacttaaaagctttaaccgccttaaccgagcaacagcatcagaagataattgctttacagaatggggagcgatctctgaaatcgcccattcagtccgacttggatgcgttccactcgggatttcaaacatgcgccaaagaagtcttgcaatacctctcccggtttgagagctggacacccagggagccgcggtgtgtccagctgatcaaccacttgcacgccgtggccacccagttcttgcccaccccgcagctgttgactcaacaggtccctctgagcaaaggcaccggcgctccctcggccgccgggtccgcggccgccccctgcctggagcgcgcggggcagaagctggagcccctcgcctactgcgtgcccgtcatccagcggactcagcccagcgccgagctcgccgccgagaacgacacggacaccgacagcggctacggcggcgaagccgaggcccggccggaccgcgagaaaggcaaaggcgcgggggcgagccgcgtcaccatcaagcaggagcctcccggggaggactcgccggcgcccaagaggatgaagctggattcccgcggcggcggcagcggcggcggcccggggggcggcgcggcggcggcggcagccgcgcttctggggcccgaccctgccgccgcggccgcgctgctgagacccgacgccgccctgctcagctcgctggtggcgttcggcggaggcggaggcgcgcccttcccgcagcccgcggccgccgcggcccccttctgcctgcccttctgcttcctctcgccttctgcagctgccgcctacgtgcagcccttcctggacaagagcggcctggagaagtatctgtacccggcggcggctgccgccccgttcccgctgctataccccggcatccccgccccggcggcagccgcggcagccgccgccgccgctgccgccgccgccgccgcgttcccctgcctgtcctcggtgttgtcgccccctcccgagaaggcgggcgccgccgccgcgaccctcctgccgcacgaggtggcgccccttggggcgccgcacccccagcacccgcacggccgcacccacctgcccttcgccgggccccgcgagccggggaacccggagagctctgctcaggaagatccctcgcagccaggaaaggaagctccctgaatccttgcgtcccgaaggacggaggttcaagcagagtgagaagttaaaatacccttaaggaggttcaagcagagtgagaagttaaaatacccttaaggtctttaagggaggaagtgtaatagatgcacgacaggcataaacaagaacaacaaaacaggtgttatgtgtacattcggagttcctgttttgctcatcccgcaccaccccaccctccacacactaacatccctttcttccccccaccagctgtaaaagatcctatgcgaaagacactggctcttttttttaatcccccaaataaattttgcccccttttaggccatgttccattatctcttaaaattggaacctaattcgagaggaagtaagaagggtctgttctgtggctgagctaggtgaaccccggggtaggggaaagatgttaacacctttgacgtctttggagttgacatggaacagcaggtagttgttatgtagagctagttctcaaagctgccctgcctgttttaggaggcgttccacaaacagattgaggctcttttagaattgaatttactcttcagtattttctaatgttcagctttctaaaaattctgaagtggtttaaatggtatctcttagtaacttgcactcgttaaagaaacacggagctgggccatcgtcagaactaagtcagggaaggagatggatgagaaggccagaatcattcctagtacatttgctaacactttattgagaaattgaccatgaattaatggactcatcttaatttcttctaagtccatatatagatagatatctatctgtacagatttctatttatccatagataggtatctatacatacacatctcaagtgcatctattcccactctcattaatccatcatgttcctaaatttttgtaatcttactgtaaaaaaaaagtgcactgaacttcaaaacaaaacaaaaaacaacaacaacaaaaaacaagtccaaactgatatatcctatattctgttaaaattcaaaagtgaacgaaagcatttaactggccagttttgattgcaaatgctgtaaagatatagaatgaagtcctgtgaggccttcctatctccaagtctatgtattttctggagaccaaaccagataccagataatcacaaagaaagcttttttaataaggcttaaaccaagaccttgtctagatatttttagtttgttgccaaggtagcactgtgagaaatctcacttggatgttatgtaaggggtgagacacaacagtctgactatgagtgaggaaaatatctgggtcttttcgtcagtttggtgcatttgctgctgctgttgctactgtttgcctcaaacgctgtgtttaaacaacgttaaactcttagcctacaaggtggctcttatgtacatagttgttaatacatccaattaatgatgtctgacatgctatttttgtagggagaaaatatgtgctaatgatattttgagttaaaatatcttttggggaggatttgctgaaaagttgcacttttgttacaatgcttatgcttggtacaagcttatgctgtcttaaattattttaaaaaaataaatactgtctgtgagaaaccagctggtttagaaaagtttagtatgtgacgataaactagaaattacctttatattctagtattttcagcactccataaattctattacctaaatattgccacactattttgtgatttaaaaattcttactaaggaataaaaactttaatatacgatatgatattgtctaataattaaaaaagacataatggatgctcaattagttttaagatatctataactatagggatacaaatcactacagttctcagatttacaccttttttttgtcattggcttgatgtcacacatttccaatctcttgcaagcctccaggctctggctttgtctacctgctcgttcccaatgtatcttaatgaaaagtgcaaaagaaaaacctaccaattaacttgtgtggtttgtttatgttagacccaattttctattgttttaatgattgacaagtttttcagttttcgtctgtgacatcacatagcctctctagtatggtcaggtgttcctctttcactgggtcttgtataaatagatgatcacaaaggggtgcttaa

SEQ ID NO: 422894 - DNA, 1652 bp, Homo sapiens
tgtacttttattattccttatttctctttcatcaaaacaaaacagcagctgtgggaggagaaatgagagggcttaaatgaaatctaaaataagctatattatacaaatactatctctgtatggttctgaccctggtaaatatatttcaaaacttcagatgagaagtttcaatatcagggaaggagatggatgagaaggccagaatcattcctagtacatttgctaacactttattgagaaattgaccatgaattaatggactcatcttaatttcttctaagtccatatatagatagatatctatctgtacagatttctatttatccatagataggtatctatacatacacatctcaagtgcatctattcccactctcattaatccatcatgttcctaaatttttgtaatcttactgtaaaaaaaaagtgcactgaacttcaaaacaaaacaaaaaacaacaacaacaaaaaacaagtccaaactgatatatcctatattctgttaaaattcaaaagtgaacgaaagcatttaactggccagttttgattgcaaatgctgtaaagatatagaatgaagtcctgtgaggccttcctatctccaagtctatgtattttctggagaccaaaccagataccagataatcacaaagaaagcttttttaataaggcttaaaccaagaccttgtctagatatttttagtttgttgccaaggtagcactgtgagaaatctcacttggatgttatgtaaggggtgagacacaacagtctgactatgagtgaggaaaatatctgggtcttttcgtcagtttggtgcatttgctgctgctgttgctactgtttgcctcaaacgctgtgtttaaacaacgttaaactcttagcctacaaggtggctcttatgtacatagttgttaatacatccaattaatgatgtctgacatgctatttttgtagggagaaaatatgtgctaatgatattttgagttaaaatatcttttggggaggatttgctgaaaagttgcacttttgttacaatgcttatgcttggtacaagcttatgctgtcttaaattattttaaaaaaataaatactgtctgtgagaaaccagctggtttagaaaagtttagtatgtgacgataaactagaaattacctttatattctagtattttcagcactccataaattctattacctaaatattgccacactattttgtgatttaaaaattcttactaaggaataaaaactttaatatacgatatgatattgtctaataattaaaaaagacataatggatgctcaattagttttaagatatctataactatagggatacaaatcactacagttctcagatttacaccttttttttgtcattggcttgatgtcacacatttccaatctcttgcaagcctccaggctctggctttgtctacctgctcgttcccaatgtatcttaatgaaaagtgcaaaagaaaaacctaccaattaacttgtgtggtttgtttatgttagacccaattttctattgttttaatgattgacaagtttttcagttttcgtctgtgacatcacatagcctctctagtatggtcaggtgttcctctttcactgggtcttgtataaatagatgatcacaaaggggtgcttaa

SEQ ID NO: 422895 - DNA, 992 bp, Homo sapiens
gctggtctggccggcgacgcgcgtgccctgtggccaaacactgcctggagtgagagcaaactaccagcgcagtggggccggcgcgagtgtgcgtgtgtgtgcgtgtgtgtgtgcgagcgcggtggaggggggggaccaactgcttcacactttcaacactgcactgaagagggagagcgagagagagactggagacgcacagatccccccaaggtctcccaagcctaccgtcccacagattattgtacagagccccaaaaatcgaaacagaggaaacgaacagcagttgaacatggacgaaggaattcctcatttgcaagagagacagttactggaacatagagattttataggactggactattcctctttgtatatgtgtaaacccaaaaggagcatgaaacgagacgacaccaaggatacctacaaattaccgcacagattaatagaaaagaaaagaagagaccgaattaatgaatgcattgctcagctgaaagatttactgcctgaacatctgaaattgacagtaagatgcacattttcattctttgctgctctccaagggcgtgttaatagtctggtgcgactcccagaaaatataagaataaatgtaaatataagttcctgacttaaaacttgtgctataccgtacagagtttcccgcaaactggagtaggtgctcccagctgaaggcaagaaatcatttataacctgtcttgtggaaagctcaagaagtaaaagaacagtacttctttcaaagtgtttgcttaaattgctgtgctgaatggacagccaattaagccaaatgtgtgtttttaagtaaccaagtgcccgtttcttttttgcaccactgcagactctgggacatctggagaaagctgtagtcttggaattaactttgaaacacttaaaagctttaaccgccttaaccgagcaacagcatcagaagataattgctttacagaatggtaagtcagttcagggaggccagc

SEQ ID NO: 422896 - DNA, 392 bp, Homo sapiens
atgaaacgagacgacaccaaggtaagtgtaagttcccgatattcctcataacctgcatgggtagttaattagagccattgatttcacagtgaagctctgcccgcaaatatattccagcccctgagcttccccaactgtgaattttaagtggcttgctgggtactctcagggggatattaaacatcatacctgaatttaaattgcattgcagaacagtccagaggaaagaggtttcttgggtgtagtttatcacatagtatgttttatggtgggggggcggggggggcagacgagggtaatatccaataagtgaatgtttcgcttactgttttctcttttccatgactctcatatattaaggatacctacaaattaccgcacagattaataga

SEQ ID NO: 422897 - DNA, 4758 bp, Homo sapiens
  misc_feature (1995)..(1995): n is a, c, g, or t
  misc_feature (2002)..(2002): n is a, c, g, or t
  misc_feature (2005)..(2005): n is a, c, g, or t
  misc_feature (2022)..(2022): n is a, c, g, or t
  misc_feature (2028)..(2028): n is a, c, g, or t
tcactttttgcttagcctgagccagtggtctgaagggatgggccagtctaagtctcagccacccggagcccatgccaggcccttagcaagactgagcatggcccaaagatgaggctgcacccctgggccacaggaagctttgttcagcacttcccacaatcaacttctgtgaacaaatgtagctaagattgtatattccttccataaggaataaaatgacctttaaagctatttcagagaagttttaaccccccacccccaccccatcctcccccaaatcttgccagcattgtatgagagcataaccagtgggaaccagcagggagcactctttgttggtccaaaatcctgtattcacagtgtagcaagctgtttgtgttcctcctgtggaaattgtagccaaaataaagcctttgtttttgtgattagaaatattttttttgcatataaaacaaacaaattaagaactatttgagcatgttggctctagtgaaggcttttgggggaagaggcagggtggccctctagcactgggaagctgcctcaactctgcttctacggattgggcaagtcactctctttcttggggtttcaatgtattttttaatggtcctttgtaggtctcattcccaatcaattatttcagctctctgatttctacctataaatttcctttatattgagggctgcctaggcaggatcgtccaggtctatcccagtttggggcagttgcttcaggggaatattcttggtttctctgtcataaggatgcacaaggctctggagtcatttccttggctttctgagcacagaagaattgtttgcataaggggaagccacttgctctcctctgtggctgggaatgcctgctctgaagagccctgccctaacctgccgggccaagggatggaggaaaagatggggtcagccagtggaagaagaggggcatcacttgggtccatgcctttatccatctgtccttctttcctctgacacacgtttgtgtggtggccactggtctaggccgggtcataaagctgcagcacacggacacccagtggtctcggggcatactagaggcacattcatcaagaagccacgaagaagggacaggggtccatgtgagctggggtgcgggggagaggatctctgaggtgacgttggagtgggcattagggcagacctagagtgcgtcctagattgcacgtgttctaaagtgacgtatgacagcatgggatattgaagctcacccgtctttcctgtgtggttcccgtcccagccagataccacagttccttggattggcaggcgcgctgtttcctgtcacacttaaagatctgcattgccacatgatctcacttttcacagctgttttatcaagcatgtcctttgtgcttctgatgtgctgagcatgctgcacacattatgtacttatttcatatgtatactagtgaagccctgtggggcgtggggagggttcttttcccattttacagaggagaaaacagaactgagaggggctaagaaatctacttataagatcactcagcttgtttaagtgaaggcaagttagttatataccagttatgtctagttccagaagtctcgattcctatgtctctcatacacggagccaccatcagatgtaagtaagtgagcagagtggattgtgtgtgcagagctgactttttggctcactgtataaccagcaggtataaggcatgagtagcattctagctgtaaattgtgaatgctagtggaaaagtgcttgtgggcatcccagttacggccctaagcaccctttcccaagtctgcttgatacaattttggtcaagccttcccgaataggttatatattcaggttgtaattttggcaggaaggcaaaacctggacactttgttatatactgtcccacctgttattccctcccagttttgagcctaacatttgctttgtgggacatgttcttcaagtggacaccttttttttttttnccagtanttnatttgcaaacctccttncctttncttttttcccccctttcctagtagcagaatcctgtttccaagtgaaatagtatgtggattccaatctgtgggtcacataaaagctttcttgaaggagcggtgaacacatagctcctgaaggctctggaagccacagtttataccccactgacctagtcactccctgtgcttcttggaggccgcggtggggcggttctcccagagcatttgctctgctgctgcccttgctgaatgcctgctcacccggtgatgaagcttagatgcactcactcagatttttctagagcttttgctccattcatttacatatcattttattaaaaacttactaagttcaaaacaatgttaaaataagttgtccctgcccttggggagctcagctaagtaggttttgtttttcatatttctgctgcaagtgcctccgatgcctgtctgttgctccttaggactggccaaccaagcgcaccaggtgacacttcagtgaatggccctgtatgacgggtgacgtctgctgctgctgactgaggactgcagaccgccaccactcaggggctctggaggggtcagctggagcccaccaagctgtcactgctgcactcactctgcaagggatcaggaccagcaacctttatattctagattctaagacattgtacagagaaattcagaagtgtaaaaatattgcacattgacaaataccaagaatttttgcgtatgtttatattgtattgttctaaataatgggtagcctgtgaaataagatcttgccacccatgtaataatagtagtaatactatagttaaaatggctgtaagaatagttttataaaagtgaatacacagatctattgtatttgaaacataactttgacaattattagtgtgaccaaagtattaggcggttttcatacatttttcaccttgtacaaaattatgaattcatttttcctccaggccgacaaggagttgtagaatgaaaatgccctctaagtgttattttggttgttctaacttacaaaagtgattttgaataagaaatatttggtgttctttttataaccagtttttgattggtaattgttttctgtattgtttaaaacggatcaaaaatgtaagtctattggtagagattaagtaaagtatttattgctacatcatagttgataaattgatgttatcgtaaagccatatgttctgttcaagtcttgtttgcttgaaatgattattcctacaagtgaaacactagactatttggagtgtatatggcttgtgttttgggattttttttttttttttttggcttttgtttttgtttgtttttttgtttcatttggtagttcatctgccttttaacccattcaccaaaatttaccttgttaacaagcatcaccaatgaacatttcagagcaatctgcatatttaacagacctaaaataaatcctattaggcaagtcagttgaaaatgctcgtgctgctaatggaattagagtgcgttcattttacaggctagtattttaaaagtagaaatcaaaatctggcaccgaagcatgctaattgtttactgtaccttgtgaggttttcactcataaatttaaaccagtgtatttttttagaactggtttgtgtatatatatagtgattatggatactaattcaatgtaatttataattttctatgtcaatacaaaaatacatcacagccttctcaaacagctcaagcaatatattgtatattgccatatcgtctggtgaaagggttaaattacttcacctcttgcacttttagatgcaaatcagtttttcatttctgtaatagaaaattattcacgtatttttacatcatttgtttttcctgaccagtatttaaaaccaaaaggatattctgaaaaatggccaacaatttttttagaagtagcatcccaagcagcgtgcctaaacattacattgcatatggaaataaaagaatcaaacgtctaatgccttattatttctgatttcctttttcattttaagtggtgtggagattccagcactcccaggacagtggagtcagcagtaagccctgggacaggtggcaagggtgggtcccttgacctttgcacgcctcctcaggaaccccctttcccgggtgagcccctctctgaagagactgtccttgggcctcctctggaagcagcacccccagaggacagggctcctcctgcttgcctcagggctgcctgacttgaatggcgttggacctcggggattactggtagataatatgctctggtctcgcctggtggtgagttttgccagccatggccagggtttggctccactggtggcacacgtggcctccgtggtatggacctggtggcttctccatcccactgtggcctctgtggtatggacctggtggcttctccatcctacccaaggtaacagtgtcttgcttcatcccactgactgctgggagagagcctctgggacttttctttggggcatcattttgttttgtctttcgtagcagggaaaggatatgacaatggggaggacagttcttttggaggttggaggggccaagccaaggacaggagcaagtgtgccctcattttgtttctacttttaatttctgtgtgttggccatactgaattatgagactaacagatgtctacaatacaatacctgtattcaaaataacaaaaataaagcctgattctttgtttctagaaaaaaaaatcttgtacc

SEQ ID NO: 422898 - DNA, 810 bp, Homo sapiens
gaggagtggaataactagaagggagtggcagggcagcagcctggcccgagggaaggaagggtgcccttgacacattgggcgggtttggcagcttaactgtgactgactttcatttttttctgttacacgttgagaaaaaaactaaatgtgatttttccataaaaatgctgatacaaatgtccaaaacttttctatgttaaatagtcttttacatttttatgcatataggttacaacctgccatattcattcatccagtgatgatgaaattgactttaaagaaacgggtttctcacaggattcttctttgcagcaagtgagtcacgcctaaagctttgctttttgtttttattttaaatgcttagtttagttgccttttatgaatcagcttcagagtcagattatgtattagaatgtgatttggggttacttattagttagaccaaagcatttaaaataggaagtgctgggtaaatgaaagatagatttgtattggttatgtttcaagggattgttccatccctgataacagtgatgagtcaagtacattttcagaagatttgaatgaactgaatagttaagaaggcatctcacacatgcttgttacacagacctttacaatagttgagttgttgcttaaagatttgtgtagtagagatctgctggtaaaaataatagaaataagacgtttaaaatgtaagtaaaagtaaactctcacgaatacccctgatgtaagttctattatagttacatctaaagtaaatttttagttgaagtaattcattgcaacccctctctgcctgcccctgaa

SEQ ID NO: 422899 - DNA, 744 bp, Homo sapiens
cttaacccagagacttggtgctaaatattgctcttctcaatctttctgaagcttggaatgaacgtgctcttacagaaaatgtataaattccatccttcttaatctcccagccctctcttcttaagaactaacctacaaacccttttagtcctaaatgtctggaggtgacctcatggctaagaagctgatatatagaattttagtgtgtgggtattgtaatttggggagttgttggtactgttggccattgttaaaacaatatattcactggcattttccttgggggacttttaattttctgtagtgttcaaagtccagagaaacctgtaacattctacttaaaatgtgatggatatttccaagtatgttaatctacattggggcttgaacaagagccactcattgctatgattacttctacaatgtgttttacagtggttaaatgaggagaaaattatccagaggcttgtggaaatagttcatccatcgcaagaagaagatgtaagttcacttgtgtgactgtaaacttgattagaaaaaaaaaacaaaaaactgtttattgggcacagagcatacttatattaaatgtgaacatgatcagagcatacagggagaatagcagcgatctagtgttcttaaagttgatacttttctaaacaatattacattttgccaatactcagaaaatttccagaagtgtacaacagcaggcccttgttatagcaccatctcctttctagagcc

SEQ ID NO: 422900 - DNA, 438 bp, Homo sapiens
tcgaatgtctgtgcgtaatttgtgttcccattgcaacacggtctctcatgagagaccgtgttgctaatggaattagagtgcgttcattttacaggctagtattttaaaagtagaaatcaaaatctggcaccgaagcatgctaattgtttactgtaccttgtgaggttttcactcataaatttaaaccagtgtatttttttagaactggtttgtgtatatatatagtgattatggatactaattcaatgtaatttataattttctatgtcaatacaaaaatacatcacagccttctcaaacagctcaagcaatatattgtatattgccatatcgtctggtgaaagggttaaattacttcacctcttgcacttttagatgcaaatcagtttttcatttctgtaatagcggccaattcacagattgcaagctcacaggtcg

SEQ ID NO: 422901 - DNA, 5520 bp, Homo sapiens
gccataggaaaggatatcttacaatatctttatggatgaatgcacacttcagtttaccttattgcagctaaaagtaagtgtaccccctgtcaagagagcatcccgttttacttggtttggctcattgacaaagtaagcaagctcctggtacaatttgagagccctgaaagcagcaatggggattctactatagctgtctagtgtaggaagattttcttggtcaagtttttgttgggggaaagaacagtccaaacctttgtgagctgtgtgttctcatcccagctacacgcacctgactgtatagaactttttgcagtttggccttctttggagatagcagtgtgtttttacgtgtggactaaagcaaaaatgaaaaactaggcacgtgccagtagaccaaatcagcctcctagcagagcacattgacattgtacaactttacagcctctgtcattggggtctggtttcaatttacttcatttcttaagagtttaaactggtttttataatttttccttatttctttgagtatcttggtttcacttatttgttcttttctatgtcttcttagatctaaaggaatgaagaattttaggatttgaagtgtcttaagtaatcatttagtctaaacctctcatttacagataagaaaacaagctcagagagatgtggtgacttgctcaaatagtgacagaacttcctcggccatatggaggggtcatataatacccttgtgtcttcagtttgaggagagcttgtttcatatccatatcccactgtattcctgctaatctgctaatgcagtaaattggaggaaaactgttaccaggataacctgtaatgggcaaggagccacaaagaagaaaacatttcttttaatttttaaacttggtttgaaagaccagcatgttttggaaatttgatcttcactcatcatcccacatagacacacttctagaaagagaagatgtaacactgaaggagttaatggatgaggaagatgttttacaggaatgtaaagctcagaaccgcaaacttatagagtttctgttaaaagcagaatgtctcgaagatttagtctcattcattatagaagaaccacctcaagacatggatgaaaagatcagatacaagtatccaaatatatcttgtgagttgctcacttctgatgtctcccagatgaatgatagactgggagaagatgaatccttgctaatgaaattatatagcttcctcctaaacgattcccctttgaatccactacttgccagtttcttcagcaaggtgctaagtattcttatcagcagaaaaccagaacagattgtggatttcttaaagaagaagcatgattttgtagaccttattataaagcacataggaacttctgctatcatggatttgttgctcaggctcctgacgtgtatcgaacctccacagcccaggcaagatgtgctgaattggttaaatgaggagaaaattatccagaggcttgtggaaatagttcatccatcgcaagaagaagatcgacattcaaatgcatcacaatcactttgtgaaattgttcgcctgagcagagaccagatgttacaaattcagaacagtacagagcccgaccccctgcttgccactctagaaaagcaagaaattatagagcagcttctatcaaatattttccacaaggagaaaaatgagtcagccatagtcagtgcaatccagatattgctgactttacttgagacacgacgaccaacatttgaaggccatatagagatctgcccaccaggcatgagccattcagcttgttcagtaaacaagagtgttctagaagccatcagaggaagacttggatcttttcatgaactcctgctggagccacccaagaacatgttcttcaagtatacatggaataactttttgcatacacaagtggaaatttgtattgcactgattcttgcaagtccttttgaaaacacagaaaatgccacaattaccgatcaagactccactggtgataatttgttattaaaacatcttttccaaaaatgtcaattaatagaacgaatacttgaagcctgggaaatgaatgagaagaaacaggctgagggaggaagacggcatggttacatgggacacctaacgaggatagctaactgtatcgtgcacagcactgacaagggccccaacagtgcattagtgcagcagcttatcaaagatcttcccgacgaagtcagggaacgatgggagacgttctgcacaagctccttaggagaaactaacaagaggaacacggtagatctagccttttctgattatcagatgcaacaaatgacgtccaattttattgaccagtttggcttcaacgatgagaagtttgcagatcaagatgacattggcaatgtttcttttgatcgagtatcagacatcaactttactctcaatacaaatgaaagtggaaatattgccttgtttgaagcatgttgtaaggaaagaatacaacagtttgatgatggtggctctgatgaggaagatatatgggaggaaaagcacatcgcattcacaccagaatcccaaagacgatccagctcggggagtacagacagtgaggaaagtacagactctgaagaagaagatggagcaaagcaagacttgtttgaacccagcagtgccaacacggaggataaaatggaggtggacctgagtgaaccacccaactggtcagctaactttgatgtcccaatggaaacaacccacggtgctccattggattctgtgggatctgatgtctggagcacagaggagccgatgccaactaaagagacgggctgggcttctttttcagagttcacgtcttccctgagcacaaaagattctttaaggagtaattctccagtggaaatggaaaccagcactgaacccatggaccctctgactcccagtgcggctgccctggcagtgcagccagaagcggcaggcagtgtggccatggaagccagctctgacggagaggaggatgcagaaagtacagacaaggtaactgagacagtgatgaatggcggcatgaaggaaacgctcagcctcactgtagatgccaagacagagactgcggtcttcaaaagtgaggaagggaaactgtctacctctcaagatgctgcttgtaaagacgcagaggagtgtcccgagactgcagaggcgaagtgcgcggcgcccaggcctcccagcagcagtcccgagcagaggactggccaaccaagcgcaccaggtgacacttcagtgaatggccctgtatgacgggtgacgtctgctgctgctgactgaggactgcagaccgccaccactcaggggctctggaggggtcagctggagcccaccaagctgtcactgctgcactcactctgcaagggatcaggaccagcaacctttatattctagattctaagacattgtacagagaaattcagaagtgtaaaaatattgcacattgacaaataccaagaatttttgcgtatgtttatattgtattgttctaaataatgggtagcctgtgaaataagatcttgccacccatgtaataatagtagtaatactatagttaaaatggctgtaagaatagttttataaaagtgaatacacagatctattgtatttgaaacataactttgacaattattagtgtgaccaaagtattaggcggttttcatacatttttcaccttgtacaaaattatgaattcatttttcctccaggccgacaaggagttgtagaatgaaaatgccctctaagtgttattttggttgttctaacttacaaaagtgattttgaataagaaatatttggtgttctttttataaccagtttttgattggtaattgttttctgtattgtttaaaacggatcaaaaatgtaagtctattggtagagattaagtaaagtatttattgctacatcatagttgataaattgatgttatcgtaaagccatatgttctgttcaagtcttgtttgcttgaaatgattattcctacaagtgaaacactagactatttggagtgtatatggcttgtgttttgggattttttttttttttttttggcttttgtttttgtttgtttttttgtttcatttggtagttcatctgccttttaacccattcaccaaaatttaccttgttaacaagcatcaccaatgaacatttcagagcaatctgcatatttaacagacctaaaataaatcctattaggcaagtcagttgaaaatgctcgtgctgctaatggaattagagtgcgttcattttacaggctagtattttaaaagtagaaatcaaaatctggcaccgaagcatgctaattgtttactgtaccttgtgaggttttcactcataaatttaaaccagtgtatttttttagaactggtttgtgtatatatatagtgattatggatactaattcaatgtaatttataattttctatgtcaatacaaaaatacatcacagccttctcaaacagctcaagcaatatattgtatattgccatatcgtctggtgaaagggttaaattacttcacctcttgcacttttagatgcaaatcagtttttcatttctgtaatagaaaattattcacgtatttttacatcatttgtttttcctgaccagtatttaaaaccaaaaggatattctgaaaaatggccaacaatttttttagaagtagcatcccaagcagcgtgcctaaacattacattgcatatggaaataaaagaatcaaacgtctaatgccttattatttctgatttcctttttcattttaagtggtgtggagattccagcactcccaggacagtggagtcagcagtaagccctgggacaggtggcaagggtgggtcccttgacctttgcacgcctcctcaggaaccccctttcccgggtgagcccctctctgaagagactgtccttgggcctcctctggaagcagcacccccagaggacagggctcctcctgcttgcctcagggctgcctgacttgaatggcgttggacctcggggattactggtagataatatgctctggtctcgcctggtggtgagttttgccagccatggccagggtttggctccactggtggcacacgtggcctccgtggtatggacctggtggcttctccatcccactgtggcctctgtggtatggacctggtggcttctccatcctacccaaggtaacagtgtcttgcttcatcccactgactgctgggagagagcctctgggacttttctttggggcatcattttgttttgtctttcgtagcagggaaaggatatgacaatggggaggacagttcttttggaggttggaggggccaagccaaggacaggagcaagtgtgccctcattttgtttctacttttaatttctgtgtgttggccatactgaattatgagactaacagatgtctacaatacaatacctgtattcaaaataacaaaaataaagcctgattctttgtttctagaaaaaaaaatcttgtacc

SEQ ID NO: 422902 - DNA, 5025 bp, Homo sapiens
gcctgcttgatacgtccgccattttgggcgcttcgctgatggtgtcggtgagcgcgtttcccgcctgagcgcaactagcggcgggtcgtgggcacctccaggagagcttgtttcatatccatatcccactgtattcctgctaatctgctaatgcagtaaattggaggaaaactgttaccaggataacctgtaatgggcaaggagccacaaagaagaaaacatttcttttaatttttaaacttggtttgaaagaccagcatgttttggaaatttgatcttcactcatcatcccacatagacacacttctagaaagagaagatgtaacactgaaggagttaatggatgaggaagatgttttacaggaatgtaaagctcagaaccgcaaacttatagagtttctgttaaaagcagaatgtctcgaagatttagtctcattcattatagaagaaccacctcaagacatggatgaaaagatcagatacaagtatccaaatatatcttgtgagttgctcacttctgatgtctcccagatgaatgatagactgggagaagatgaatccttgctaatgaaattatatagcttcctcctaaacgattcccctttgaatccactacttgccagtttcttcagcaaggtgctaagtattcttatcagcagaaaaccagaacagattgtggatttcttaaagaagaagcatgattttgtagaccttattataaagcacataggaacttctgctatcatggatttgttgctcaggctcctgacgtgtatcgaacctccacagcccaggcaagatgtgctgaattggttaaatgaggagaaaattatccagaggcttgtggaaatagttcatccatcgcaagaagaagatcgacattcaaatgcatcacaatcactttgtgaaattgttcgcctgagcagagaccagatgttacaaattcagaacagtacagagcccgaccccctgcttgccactctagaaaagcaagaaattatagagcagcttctatcaaatattttccacaaggagaaaaatgagtcagccatagtcagtgcaatccagatattgctgactttacttgagacacgacgaccaacatttgaaggccatatagagatctgcccaccaggcatgagccattcagcttgttcagtaaacaagagtgttctagaagccatcagaggaagacttggatcttttcatgaactcctgctggagccacccaagaaaagtgtgatgaagaccacatggggtgtgctggatcctcctgtggggaatacccggttgaatgtcattaggttgatatccagcctgcttcaaaccaataccagcagtataaatggggaccttatggagctgaatagcattggagtcatattgaacatgttcttcaagtatacatggaataactttttgcatacacaagtggaaatttgtattgcactgattcttgcaagtccttttgaaaacacagaaaatgccacaattaccgatcaagactccactggtgataatttgttattaaaacatcttttccaaaaatgtcaattaatagaacgaatacttgaagcctgggaaatgaatgagaagaaacaggctgagggaggaagacggcatggttacatgggacacctaacgaggatagctaactgtatcgtgcacagcactgacaagggccccaacagtgcattagtgcagcagcttatcaaagatcttcccgacgaagtcagggaacgatgggagacgttctgcacaagctccttaggagaaactaacaagaggaacacggtagatctagccttttctgattatcagatgcaacaaatgacgtccaattttattgaccagtttggcttcaacgatgagaagtttgcagatcaagatgacattggcaatgtttcttttgatcgagtatcagacatcaactttactctcaatacaaatgaaagtggaaatattgccttgtttgaagcatgttgtaaggaaagaatacaacagtttgatgatggtggctctgatgaggaagatatatgggaggaaaagcacatcgcattcacaccagaatcccaaagacgatccagctcggggagtacagacagtgaggaaagtacagactctgaagaagaagatggagcaaagcaagacttgtttgaacccagcagtgccaacacggaggataaaatggaggtggacctgagtgaaccacccaactggtcagctaactttgatgtcccaatggaaacaacccacggtgctccattggattctgtgggatctgatgtctggagcacagaggagccgatgccaactaaagagacgggctgggcttctttttcagagttcacgtcttccctgagcacaaaagattctttaaggagtaattctccagtggaaatggaaaccagcactgaacccatggaccctctgactcccagtgcggctgccctggcagtgcagccagaagcggcaggcagtgtggccatggaagccagctctgacggagaggaggatgcagaaagtacagacaaggtaactgagacagtgatgaatggcggcatgaaggaaacgctcagcctcactgtagatgccaagacagagactgcggtcttcaaaagtgaggaagggaaactgtctacctctcaagatgctgcttgtaaagacgcagaggagtgtcccgagactgcagaggcgaagtgcgcggcgcccaggcctcccagcagcagtcccgagcagaggactggccaaccaagcgcaccaggtgacacttcagtgaatggccctgtatgacgggtgacgtctgctgctgctgactgaggactgcagaccgccaccactcaggggctctggaggggtcagctggagcccaccaagctgtcactgctgcactcactctgcaagggatcaggaccagcaacctttatattctagattctaagacattgtacagagaaattcagaagtgtaaaaatattgcacattgacaaataccaagaatttttgcgtatgtttatattgtattgttctaaataatgggtagcctgtgaaataagatcttgccacccatgtaataatagtagtaatactatagttaaaatggctgtaagaatagttttataaaagtgaatacacagatctattgtatttgaaacataactttgacaattattagtgtgaccaaagtattaggcggttttcatacatttttcaccttgtacaaaattatgaattcatttttcctccaggccgacaaggagttgtagaatgaaaatgccctctaagtgttattttggttgttctaacttacaaaagtgattttgaataagaaatatttggtgttctttttataaccagtttttgattggtaattgttttctgtattgtttaaaacggatcaaaaatgtaagtctattggtagagattaagtaaagtatttattgctacatcatagttgataaattgatgttatcgtaaagccatatgttctgttcaagtcttgtttgcttgaaatgattattcctacaagtgaaacactagactatttggagtgtatatggcttgtgttttgggattttttttttttttttttggcttttgtttttgtttgtttttttgtttcatttggtagttcatctgccttttaacccattcaccaaaatttaccttgttaacaagcatcaccaatgaacatttcagagcaatctgcatatttaacagacctaaaataaatcctattaggcaagtcagttgaaaatgctcgtgctgctaatggaattagagtgcgttcattttacaggctagtattttaaaagtagaaatcaaaatctggcaccgaagcatgctaattgtttactgtaccttgtgaggttttcactcataaatttaaaccagtgtatttttttagaactggtttgtgtatatatatagtgattatggatactaattcaatgtaatttataattttctatgtcaatacaaaaatacatcacagccttctcaaacagctcaagcaatatattgtatattgccatatcgtctggtgaaagggttaaattacttcacctcttgcacttttagatgcaaatcagtttttcatttctgtaatagaaaattattcacgtatttttacatcatttgtttttcctgaccagtatttaaaaccaaaaggatattctgaaaaatggccaacaatttttttagaagtagcatcccaagcagcgtgcctaaacattacattgcatatggaaataaaagaatcaaacgtctaatgccttattatttctgatttcctttttcattttaagtggtgtggagattccagcactcccaggacagtggagtcagcagtaagccctgggacaggtggcaagggtgggtcccttgacctttgcacgcctcctcaggaaccccctttcccgggtgagcccctctctgaagagactgtccttgggcctcctctggaagcagcacccccagaggacagggctcctcctgcttgcctcagggctgcctgacttgaatggcgttggacctcggggattactggtagataatatgctctggtctcgcctggtggtgagttttgccagccatggccagggtttggctccactggtggcacacgtggcctccgtggtatggacctggtggcttctccatcccactgtggcctctgtggtatggacctggtggcttctccatcctacccaaggtaacagtgtcttgcttcatcccactgactgctgggagagagcctctgggacttttctttggggcatcattttgttttgtctttcgtagcagggaaaggatatgacaatggggaggacagttcttttggaggttggaggggccaagccaaggacaggagcaagtgtgccctcattttgtttctacttttaatttctgtgtgttggccatactgaattatgagactaacagatgtctacaatacaatacctgtattcaaaataacaaaaataaagcctgattctttgtttctagaaaaaaaaatcttgtacc

SEQ ID NO: 422903 - DNA, 4974 bp, Homo sapiens
gcctgcttgatacgtccgccattttgggcgcttcgctgatggtgtcggtgagcgcgtttcccgcctgagcgcaactagcggcgggtcgtgggcacctccaggagagcttgtttcatatccatatcccactgtattcctgctaatctgctaatgcagtaaattggaggaaaactgttaccaggataacctgtaatgggcaaggagccacaaagaagaaaacatttcttttaatttttaaacttggtttgaaagaccagcatgttttggaaatttgatcttcactcatcatcccacatagacacacttctagaaagagaagatgtaacactgaaggagttaatggatgaggaagatgttttacaggaatgtaaagctcagaaccgcaaacttatagagtttctgttaaaagcagaatgtctcgaagatttagtctcattcattatagaagaaccacctcaagacatggatgaaaagatcagatacaagtatccaaatatatcttgtgagttgctcacttctgatgtctcccagatgaatgatagactgggagaagatgaatccttgctaatgaaattatatagcttcctcctaaacgattcccctttgaatccactacttgccagtttcttcagcaaggtgctaagtattcttatcagcagaaaaccagaacagattgtggatttcttaaagaagaagcatgattttgtagaccttattataaagcacataggaacttctgctatcatggatttgttgctcaggctcctgacgtgtatcgaacctccacagcccaggcaagatgtgctgaattggttaaatgaggagaaaattatccagaggcttgtggaaatagttcatccatcgcaagaagaagatcgacattcaaatgcatcacaatcactttgtgaaattgttcgcctgagcagagaccagatgttacaaattcagaacagtacagagcccgaccccctgcttgccactctagaaaagcaagaaattatagagcagcttctatcaaatattttccacaaggagaaaaatgagtcagccatagtcagtgcaatccagatattgctgactttacttgagacacgacgaccaacatttgaaggccatatagagatctgcccaccaggcatgagccattcagcttgttcagtaaacaagagtgttctagaagccatcagaggaagacttggatcttttcatgaactcctgctggagccacccaagaaaagtgtgatgaagaccacatggggtgtgctggatcctcctgtggggaatacccggttgaatgtcattaggttgatatccagcctgcttcaaaccaataccagcagtataaatggggaccttatggagctgaatagcattggagtcatattgaacatgttcttcaagtatacatggaataactttttgcatacacaagtggaaatttgtattgcactgattcttgcaagtccttttgaaaacacagaaaatgccacaattaccgatcaagactccactggtgataatttgttattaaaacatcttttccaaaaatgtcaattaatagaacgaatacttgaagcctgggaaatgaatgagaagaaacaggctgagggaggaagacggcatggttacatgggacacctaacgaggatagctaactgtatcgtgcacagcactgacaagggccccaacagtgcattagtgcagcagcttatcaaagatcttcccgacgaagtcagggaacgatgggagacgttctgcacaagctccttaggagaaactaacaagaggaacacggtagatctatttggcttcaacgatgagaagtttgcagatcaagatgacattggcaatgtttcttttgatcgagtatcagacatcaactttactctcaatacaaatgaaagtggaaatattgccttgtttgaagcatgttgtaaggaaagaatacaacagtttgatgatggtggctctgatgaggaagatatatgggaggaaaagcacatcgcattcacaccagaatcccaaagacgatccagctcggggagtacagacagtgaggaaagtacagactctgaagaagaagatggagcaaagcaagacttgtttgaacccagcagtgccaacacggaggataaaatggaggtggacctgagtgaaccacccaactggtcagctaactttgatgtcccaatggaaacaacccacggtgctccattggattctgtgggatctgatgtctggagcacagaggagccgatgccaactaaagagacgggctgggcttctttttcagagttcacgtcttccctgagcacaaaagattctttaaggagtaattctccagtggaaatggaaaccagcactgaacccatggaccctctgactcccagtgcggctgccctggcagtgcagccagaagcggcaggcagtgtggccatggaagccagctctgacggagaggaggatgcagaaagtacagacaaggtaactgagacagtgatgaatggcggcatgaaggaaacgctcagcctcactgtagatgccaagacagagactgcggtcttcaaaagtgaggaagggaaactgtctacctctcaagatgctgcttgtaaagacgcagaggagtgtcccgagactgcagaggcgaagtgcgcggcgcccaggcctcccagcagcagtcccgagcagaggactggccaaccaagcgcaccaggtgacacttcagtgaatggccctgtatgacgggtgacgtctgctgctgctgactgaggactgcagaccgccaccactcaggggctctggaggggtcagctggagcccaccaagctgtcactgctgcactcactctgcaagggatcaggaccagcaacctttatattctagattctaagacattgtacagagaaattcagaagtgtaaaaatattgcacattgacaaataccaagaatttttgcgtatgtttatattgtattgttctaaataatgggtagcctgtgaaataagatcttgccacccatgtaataatagtagtaatactatagttaaaatggctgtaagaatagttttataaaagtgaatacacagatctattgtatttgaaacataactttgacaattattagtgtgaccaaagtattaggcggttttcatacatttttcaccttgtacaaaattatgaattcatttttcctccaggccgacaaggagttgtagaatgaaaatgccctctaagtgttattttggttgttctaacttacaaaagtgattttgaataagaaatatttggtgttctttttataaccagtttttgattggtaattgttttctgtattgtttaaaacggatcaaaaatgtaagtctattggtagagattaagtaaagtatttattgctacatcatagttgataaattgatgttatcgtaaagccatatgttctgttcaagtcttgtttgcttgaaatgattattcctacaagtgaaacactagactatttggagtgtatatggcttgtgttttgggattttttttttttttttttggcttttgtttttgtttgtttttttgtttcatttggtagttcatctgccttttaacccattcaccaaaatttaccttgttaacaagcatcaccaatgaacatttcagagcaatctgcatatttaacagacctaaaataaatcctattaggcaagtcagttgaaaatgctcgtgctgctaatggaattagagtgcgttcattttacaggctagtattttaaaagtagaaatcaaaatctggcaccgaagcatgctaattgtttactgtaccttgtgaggttttcactcataaatttaaaccagtgtatttttttagaactggtttgtgtatatatatagtgattatggatactaattcaatgtaatttataattttctatgtcaatacaaaaatacatcacagccttctcaaacagctcaagcaatatattgtatattgccatatcgtctggtgaaagggttaaattacttcacctcttgcacttttagatgcaaatcagtttttcatttctgtaatagaaaattattcacgtatttttacatcatttgtttttcctgaccagtatttaaaaccaaaaggatattctgaaaaatggccaacaatttttttagaagtagcatcccaagcagcgtgcctaaacattacattgcatatggaaataaaagaatcaaacgtctaatgccttattatttctgatttcctttttcattttaagtggtgtggagattccagcactcccaggacagtggagtcagcagtaagccctgggacaggtggcaagggtgggtcccttgacctttgcacgcctcctcaggaaccccctttcccgggtgagcccctctctgaagagactgtccttgggcctcctctggaagcagcacccccagaggacagggctcctcctgcttgcctcagggctgcctgacttgaatggcgttggacctcggggattactggtagataatatgctctggtctcgcctggtggtgagttttgccagccatggccagggtttggctccactggtggcacacgtggcctccgtggtatggacctggtggcttctccatcccactgtggcctctgtggtatggacctggtggcttctccatcctacccaaggtaacagtgtcttgcttcatcccactgactgctgggagagagcctctgggacttttctttggggcatcattttgttttgtctttcgtagcagggaaaggatatgacaatggggaggacagttcttttggaggttggaggggccaagccaaggacaggagcaagtgtgccctcattttgtttctacttttaatttctgtgtgttggccatactgaattatgagactaacagatgtctacaatacaatacctgtattcaaaataacaaaaataaagcctgattctttgtttctagaaaaaaaaatcttgtacc

SEQ ID NO: 422904 - DNA, 5152 bp, Homo sapiens
gcctgcttgatacgtccgccattttgggcgcttcgctgatggtgtcggtgagcgcgtttcccgcctgagcgcaactagcggcgggtcgtgggcacctccagataagaaaacaagctcagagagatgtggtgacttgctcaaatagtgacagaacttcctcggccatatggaggggtcatataatacccttgtgtcttcagtttgaggtacctcccataattttaaggggagagcttgtttcatatccatatcccactgtattcctgctaatctgctaatgcagtaaattggaggaaaactgttaccaggataacctgtaatgggcaaggagccacaaagaagaaaacatttcttttaatttttaaacttggtttgaaagaccagcatgttttggaaatttgatcttcactcatcatcccacatagacacacttctagaaagagaagatgtaacactgaaggagttaatggatgaggaagatgttttacaggaatgtaaagctcagaaccgcaaacttatagagtttctgttaaaagcagaatgtctcgaagatttagtctcattcattatagaagaaccacctcaagacatggatgaaaagatcagatacaagtatccaaatatatcttgtgagttgctcacttctgatgtctcccagatgaatgatagactgggagaagatgaatccttgctaatgaaattatatagcttcctcctaaacgattcccctttgaatccactacttgccagtttcttcagcaaggtgctaagtattcttatcagcagaaaaccagaacagattgtggatttcttaaagaagaagcatgattttgtagaccttattataaagcacataggaacttctgctatcatggatttgttgctcaggctcctgacgtgtatcgaacctccacagcccaggcaagatgtgctgaattggttaaatgaggagaaaattatccagaggcttgtggaaatagttcatccatcgcaagaagaagatcgacattcaaatgcatcacaatcactttgtgaaattgttcgcctgagcagagaccagatgttacaaattcagaacagtacagagcccgaccccctgcttgccactctagaaaagcaagaaattatagagcagcttctatcaaatattttccacaaggagaaaaatgagtcagccatagtcagtgcaatccagatattgctgactttacttgagacacgacgaccaacatttgaaggccatatagagatctgcccaccaggcatgagccattcagcttgttcagtaaacaagagtgttctagaagccatcagaggaagacttggatcttttcatgaactcctgctggagccacccaagaaaagtgtgatgaagaccacatggggtgtgctggatcctcctgtggggaatacccggttgaatgtcattaggttgatatccagcctgcttcaaaccaataccagcagtataaatggggaccttatggagctgaatagcattggagtcatattgaacatgttcttcaagtatacatggaataactttttgcatacacaagtggaaatttgtattgcactgattcttgcaagtccttttgaaaacacagaaaatgccacaattaccgatcaagactccactggtgataatttgttattaaaacatcttttccaaaaatgtcaattaatagaacgaatacttgaagcctgggaaatgaatgagaagaaacaggctgagggaggaagacggcatggttacatgggacacctaacgaggatagctaactgtatcgtgcacagcactgacaagggccccaacagtgcattagtgcagcagcttatcaaagatcttcccgacgaagtcagggaacgatgggagacgttctgcacaagctccttaggagaaactaacaagaggaacacggtagatctagccttttctgattatcagatgcaacaaatgacgtccaattttattgaccagtttggcttcaacgatgagaagtttgcagatcaagatgacattggcaatgtttcttttgatcgagtatcagacatcaactttactctcaatacaaatgaaagtggaaatattgccttgtttgaagcatgttgtaaggaaagaatacaacagtttgatgatggtggctctgatgaggaagatatatgggaggaaaagcacatcgcattcacaccagaatcccaaagacgatccagctcggggagtacagacagtgaggaaagtacagactctgaagaagaagatggagcaaagcaagacttgtttgaacccagcagtgccaacacggaggataaaatggaggtggacctgagtgaaccacccaactggtcagctaactttgatgtcccaatggaaacaacccacggtgctccattggattctgtgggatctgatgtctggagcacagaggagccgatgccaactaaagagacgggctgggcttctttttcagagttcacgtcttccctgagcacaaaagattctttaaggagtaattctccagtggaaatggaaaccagcactgaacccatggaccctctgactcccagtgcggctgccctggcagtgcagccagaagcggcaggcagtgtggccatggaagccagctctgacggagaggaggatgcagaaagtacagacaaggtaactgagacagtgatgaatggcggcatgaaggaaacgctcagcctcactgtagatgccaagacagagactgcggtcttcaaaagtgaggaagggaaactgtctacctctcaagatgctgcttgtaaagacgcagaggagtgtcccgagactgcagaggcgaagtgcgcggcgcccaggcctcccagcagcagtcccgagcagaggactggccaaccaagcgcaccaggtgacacttcagtgaatggccctgtatgacgggtgacgtctgctgctgctgactgaggactgcagaccgccaccactcaggggctctggaggggtcagctggagcccaccaagctgtcactgctgcactcactctgcaagggatcaggaccagcaacctttatattctagattctaagacattgtacagagaaattcagaagtgtaaaaatattgcacattgacaaataccaagaatttttgcgtatgtttatattgtattgttctaaataatgggtagcctgtgaaataagatcttgccacccatgtaataatagtagtaatactatagttaaaatggctgtaagaatagttttataaaagtgaatacacagatctattgtatttgaaacataactttgacaattattagtgtgaccaaagtattaggcggttttcatacatttttcaccttgtacaaaattatgaattcatttttcctccaggccgacaaggagttgtagaatgaaaatgccctctaagtgttattttggttgttctaacttacaaaagtgattttgaataagaaatatttggtgttctttttataaccagtttttgattggtaattgttttctgtattgtttaaaacggatcaaaaatgtaagtctattggtagagattaagtaaagtatttattgctacatcatagttgataaattgatgttatcgtaaagccatatgttctgttcaagtcttgtttgcttgaaatgattattcctacaagtgaaacactagactatttggagtgtatatggcttgtgttttgggattttttttttttttttttggcttttgtttttgtttgtttttttgtttcatttggtagttcatctgccttttaacccattcaccaaaatttaccttgttaacaagcatcaccaatgaacatttcagagcaatctgcatatttaacagacctaaaataaatcctattaggcaagtcagttgaaaatgctcgtgctgctaatggaattagagtgcgttcattttacaggctagtattttaaaagtagaaatcaaaatctggcaccgaagcatgctaattgtttactgtaccttgtgaggttttcactcataaatttaaaccagtgtatttttttagaactggtttgtgtatatatatagtgattatggatactaattcaatgtaatttataattttctatgtcaatacaaaaatacatcacagccttctcaaacagctcaagcaatatattgtatattgccatatcgtctggtgaaagggttaaattacttcacctcttgcacttttagatgcaaatcagtttttcatttctgtaatagaaaattattcacgtatttttacatcatttgtttttcctgaccagtatttaaaaccaaaaggatattctgaaaaatggccaacaatttttttagaagtagcatcccaagcagcgtgcctaaacattacattgcatatggaaataaaagaatcaaacgtctaatgccttattatttctgatttcctttttcattttaagtggtgtggagattccagcactcccaggacagtggagtcagcagtaagccctgggacaggtggcaagggtgggtcccttgacctttgcacgcctcctcaggaaccccctttcccgggtgagcccctctctgaagagactgtccttgggcctcctctggaagcagcacccccagaggacagggctcctcctgcttgcctcagggctgcctgacttgaatggcgttggacctcggggattactggtagataatatgctctggtctcgcctggtggtgagttttgccagccatggccagggtttggctccactggtggcacacgtggcctccgtggtatggacctggtggcttctccatcccactgtggcctctgtggtatggacctggtggcttctccatcctacccaaggtaacagtgtcttgcttcatcccactgactgctgggagagagcctctgggacttttctttggggcatcattttgttttgtctttcgtagcagggaaaggatatgacaatggggaggacagttcttttggaggttggaggggccaagccaaggacaggagcaagtgtgccctcattttgtttctacttttaatttctgtgtgttggccatactgaattatgagactaacagatgtctacaatacaatacctgtattcaaaataacaaaaataaagcctgattctttgtttctagaaaaaaaaatcttgtacc

SEQ ID NO: 422905 - DNA, 4650 bp, Homo sapiens
cttaacccagagacttggtgctaaatattgctcttctcaatctttctgaagcttggaatgaacgtgctcttacagaaaatgtataaattccatccttcttaatctcccagccctctcttcttaagaactaacctacaaacccttttagtcctaaatgtctggaggtgacctcatggctaagaagctgatatatagaattttagtgtgtgggtattgtaatttggggagttgttggtactgttggccattgttaaaacaatatattcactggcattttccttgggggacttttaattttctgtagtgttcaaagtccagagaaacctgtaacattctacttaaaatgtgatggatatttccaagtatgttaatctacattggggcttgaacaagagccactcattgctatgattacttctacaatgtgttttacagtggttaaatgaggagaaaattatccagaggcttgtggaaatagttcatccatcgcaagaagaagatcgacattcaaatgcatcacaatcactttgtgaaattgttcgcctgagcagagaccagatgttacaaattcagaacagtacagagcccgaccccctgcttgccactctagaaaagcaagaaattatagagcagcttctatcaaatattttccacaaggagaaaaatgagtcagccatagtcagtgcaatccagatattgctgactttacttgagacacgacgaccaacatttgaaggccatatagagatctgcccaccaggcatgagccattcagcttgttcagtaaacaagagtgttctagaagccatcagaggaagacttggatcttttcatgaactcctgctggagccacccaagaaaagtgtgatgaagaccacatggggtgtgctggatcctcctgtggggaatacccggttgaatgtcattaggttgatatccagcctgcttcaaaccaataccagcagtataaatggggaccttatggagctgaatagcattggagtcatattgaacatgttcttcaagtatacatggaataactttttgcatacacaagtggaaatttgtattgcactgattcttgcaagtccttttgaaaacacagaaaatgccacaattaccgatcaagactccactggtgataatttgttattaaaacatcttttccaaaaatgtcaattaatagaacgaatacttgaagcctgggaaatgaatgagaagaaacaggctgagggaggaagacggcatggttacatgggacacctaacgaggatagctaactgtatcgtgcacagcactgacaagggccccaacagtgcattagtgcagcagcttatcaaagatcttcccgacgaagtcagggaacgatgggagacgttctgcacaagctccttaggagaaactaacaagaggaacacggtagatctagccttttctgattatcagatgcaacaaatgacgtccaattttattgaccagtttggcttcaacgatgagaagtttgcagatcaagatgacattggcaatgtttcttttgatcgagtatcagacatcaactttactctcaatacaaatgaaagtggaaatattgccttgtttgaagcatgttgtaaggaaagaatacaacagtttgatgatggtggctctgatgaggaagatatatgggaggaaaagcacatcgcattcacaccagaatcccaaagacgatccagctcggggagtacagacagtgaggaaagtacagactctgaagaagaagatggagcaaagcaagacttgtttgaacccagcagtgccaacacggaggataaaatggaggtggacctgagtgaaccacccaactggtcagctaactttgatgtcccaatggaaacaacccacggtgctccattggattctgtgggatctgatgtctggagcacagaggagccgatgccaactaaagagacgggctgggcttctttttcagagttcacgtcttccctgagcacaaaagattctttaaggagtaattctccagtggaaatggaaaccagcactgaacccatggaccctctgactcccagtgcggctgccctggcagtgcagccagaagcggcaggcagtgtggccatggaagccagctctgacggagaggaggatgcagaaagtacagacaaggtaactgagacagtgatgaatggcggcatgaaggaaacgctcagcctcactgtagatgccaagacagagactgcggtcttcaaaagtgaggaagggaaactgtctacctctcaagatgctgcttgtaaagacgcagaggagtgtcccgagactgcagaggcgaagtgcgcggcgcccaggcctcccagcagcagtcccgagcagaggactggccaaccaagcgcaccaggtgacacttcagtgaatggccctgtatgacgggtgacgtctgctgctgctgactgaggactgcagaccgccaccactcaggggctctggaggggtcagctggagcccaccaagctgtcactgctgcactcactctgcaagggatcaggaccagcaacctttatattctagattctaagacattgtacagagaaattcagaagtgtaaaaatattgcacattgacaaataccaagaatttttgcgtatgtttatattgtattgttctaaataatgggtagcctgtgaaataagatcttgccacccatgtaataatagtagtaatactatagttaaaatggctgtaagaatagttttataaaagtgaatacacagatctattgtatttgaaacataactttgacaattattagtgtgaccaaagtattaggcggttttcatacatttttcaccttgtacaaaattatgaattcatttttcctccaggccgacaaggagttgtagaatgaaaatgccctctaagtgttattttggttgttctaacttacaaaagtgattttgaataagaaatatttggtgttctttttataaccagtttttgattggtaattgttttctgtattgtttaaaacggatcaaaaatgtaagtctattggtagagattaagtaaagtatttattgctacatcatagttgataaattgatgttatcgtaaagccatatgttctgttcaagtcttgtttgcttgaaatgattattcctacaagtgaaacactagactatttggagtgtatatggcttgtgttttgggattttttttttttttttttggcttttgtttttgtttgtttttttgtttcatttggtagttcatctgccttttaacccattcaccaaaatttaccttgttaacaagcatcaccaatgaacatttcagagcaatctgcatatttaacagacctaaaataaatcctattaggcaagtcagttgaaaatgctcgtgctgctaatggaattagagtgcgttcattttacaggctagtattttaaaagtagaaatcaaaatctggcaccgaagcatgctaattgtttactgtaccttgtgaggttttcactcataaatttaaaccagtgtatttttttagaactggtttgtgtatatatatagtgattatggatactaattcaatgtaatttataattttctatgtcaatacaaaaatacatcacagccttctcaaacagctcaagcaatatattgtatattgccatatcgtctggtgaaagggttaaattacttcacctcttgcacttttagatgcaaatcagtttttcatttctgtaatagaaaattattcacgtatttttacatcatttgtttttcctgaccagtatttaaaaccaaaaggatattctgaaaaatggccaacaatttttttagaagtagcatcccaagcagcgtgcctaaacattacattgcatatggaaataaaagaatcaaacgtctaatgccttattatttctgatttcctttttcattttaagtggtgtggagattccagcactcccaggacagtggagtcagcagtaagccctgggacaggtggcaagggtgggtcccttgacctttgcacgcctcctcaggaaccccctttcccgggtgagcccctctctgaagagactgtccttgggcctcctctggaagcagcacccccagaggacagggctcctcctgcttgcctcagggctgcctgacttgaatggcgttggacctcggggattactggtagataatatgctctggtctcgcctggtggtgagttttgccagccatggccagggtttggctccactggtggcacacgtggcctccgtggtatggacctggtggcttctccatcccactgtggcctctgtggtatggacctggtggcttctccatcctacccaaggtaacagtgtcttgcttcatcccactgactgctgggagagagcctctgggacttttctttggggcatcattttgttttgtctttcgtagcagggaaaggatatgacaatggggaggacagttcttttggaggttggaggggccaagccaaggacaggagcaagtgtgccctcattttgtttctacttttaatttctgtgtgttggccatactgaattatgagactaacagatgtctacaatacaatacctgtattcaaaataacaaaaataaagcctgattctttgtttctagaaaaaaaaatcttgtacc

SEQ ID NO: 422906 - DNA, 4387 bp, Homo sapiens
agcggggtcatctgtgccacaggtccctgttgacagtgctgtactgtccaccacactagctgggatttattcctttgggctccaggtttggtgtttctggcactgaattacggaatacttgggacacatgtgacttttttcgtcctttctcctctactgtccttttaaaaacttgtgggatccaattattgtggatttcttaaagaagaagcatgattttgtagaccttattataaagcacataggaacttctgctatcatggatttgttgctcaggctcctgacgtgtatcgaacctccacagcccaggcaagatgtgctgaattggttaaatgaggagaaaattatccagaggcttgtggaaatagttcatccatcgcaagaagaagatcgacattcaaatgcatcacaatcactttgtgaaattgttcgcctgagcagagaccagatgttacaaattcagaacagtacagagcccgaccccctgcttgccactctagaaaagcaagaaattatagagcagcttctatcaaatattttccacaaggagaaaaatgagtcagccatagtcagtgcaatccagatattgctgactttacttgagacacgacgaccaacatttgaaggccatatagagatctgcccaccaggcatgagccattcagcttgttcagtaaacaagagtgttctagaagccatcagaggaagacttggatcttttcatgaactcctgctggagccacccaagaacatgttcttcaagtatacatggaataactttttgcatacacaagtggaaatttgtattgcactgattcttgcaagtccttttgaaaacacagaaaatgccacaattaccgatcaagactccactggtgataatttgttattaaaacatcttttccaaaaatgtcaattaatagaacgaatacttgaagcctgggaaatgaatgagaagaaacaggctgagggaggaagacggcatggttacatgggacacctaacgaggatagctaactgtatcgtgcacagcactgacaagggccccaacagtgcattagtgcagcagcttatcaaagatcttcccgacgaagtcagggaacgatgggagacgttctgcacaagctccttaggagaaactaacaagaggaacacggtagatctagccttttctgattatcagatgcaacaaatgacgtccaattttattgaccagtttggcttcaacgatgagaagtttgcagatcaagatgacattggcaatgtttcttttgatcgagtatcagacatcaactttactctcaatacaaatgaaagtggaaatattgccttgtttgaagcatgttgtaaggaaagaatacaacagtttgatgatggtggctctgatgaggaagatatatgggaggaaaagcacatcgcattcacaccagaatcccaaagacgatccagctcggggagtacagacagtgaggaaagtacagactctgaagaagaagatggagcaaagcaagacttgtttgaacccagcagtgccaacacggaggataaaatggaggtggacctgagtgaaccacccaactggtcagctaactttgatgtcccaatggaaacaacccacggtgctccattggattctgtgggatctgatgtctggagcacagaggagccgatgccaactaaagagacgggctgggcttctttttcagagttcacgtcttccctgagcacaaaagattctttaaggagtaattctccagtggaaatggaaaccagcactgaacccatggaccctctgactcccagtgcggctgccctggcagtgcagccagaagcggcaggcagtgtggccatggaagccagctctgacggagaggaggatgcagaaagtacagacaaggtaactgagacagtgatgaatggcggcatgaaggaaacgctcagcctcactgtagatgccaagacagagactgcggtcttcaaaagtgaggaagggaaactgtctacctctcaagatgctgcttgtaaagacgcagaggagtgtcccgagactgcagaggcgaagtgcgcggcgcccaggcctcccagcagcagtcccgagcagaggactggccaaccaagcgcaccaggtgacacttcagtgaatggccctgtatgacgggtgacgtctgctgctgctgactgaggactgcagaccgccaccactcaggggctctggaggggtcagctggagcccaccaagctgtcactgctgcactcactctgcaagggatcaggaccagcaacctttatattctagattctaagacattgtacagagaaattcagaagtgtaaaaatattgcacattgacaaataccaagaatttttgcgtatgtttatattgtattgttctaaataatgggtagcctgtgaaataagatcttgccacccatgtaataatagtagtaatactatagttaaaatggctgtaagaatagttttataaaagtgaatacacagatctattgtatttgaaacataactttgacaattattagtgtgaccaaagtattaggcggttttcatacatttttcaccttgtacaaaattatgaattcatttttcctccaggccgacaaggagttgtagaatgaaaatgccctctaagtgttattttggttgttctaacttacaaaagtgattttgaataagaaatatttggtgttctttttataaccagtttttgattggtaattgttttctgtattgtttaaaacggatcaaaaatgtaagtctattggtagagattaagtaaagtatttattgctacatcatagttgataaattgatgttatcgtaaagccatatgttctgttcaagtcttgtttgcttgaaatgattattcctacaagtgaaacactagactatttggagtgtatatggcttgtgttttgggattttttttttttttttttggcttttgtttttgtttgtttttttgtttcatttggtagttcatctgccttttaacccattcaccaaaatttaccttgttaacaagcatcaccaatgaacatttcagagcaatctgcatatttaacagacctaaaataaatcctattaggcaagtcagttgaaaatgctcgtgctgctaatggaattagagtgcgttcattttacaggctagtattttaaaagtagaaatcaaaatctggcaccgaagcatgctaattgtttactgtaccttgtgaggttttcactcataaatttaaaccagtgtatttttttagaactggtttgtgtatatatatagtgattatggatactaattcaatgtaatttataattttctatgtcaatacaaaaatacatcacagccttctcaaacagctcaagcaatatattgtatattgccatatcgtctggtgaaagggttaaattacttcacctcttgcacttttagatgcaaatcagtttttcatttctgtaatagaaaattattcacgtatttttacatcatttgtttttcctgaccagtatttaaaaccaaaaggatattctgaaaaatggccaacaatttttttagaagtagcatcccaagcagcgtgcctaaacattacattgcatatggaaataaaagaatcaaacgtctaatgccttattatttctgatttcctttttcattttaagtggtgtggagattccagcactcccaggacagtggagtcagcagtaagccctgggacaggtggcaagggtgggtcccttgacctttgcacgcctcctcaggaaccccctttcccgggtgagcccctctctgaagagactgtccttgggcctcctctggaagcagcacccccagaggacagggctcctcctgcttgcctcagggctgcctgacttgaatggcgttggacctcggggattactggtagataatatgctctggtctcgcctggtggtgagttttgccagccatggccagggtttggctccactggtggcacacgtggcctccgtggtatggacctggtggcttctccatcccactgtggcctctgtggtatggacctggtggcttctccatcctacccaaggtaacagtgtcttgcttcatcccactgactgctgggagagagcctctgggacttttctttggggcatcattttgttttgtctttcgtagcagggaaaggatatgacaatggggaggacagttcttttggaggttggaggggccaagccaaggacaggagcaagtgtgccctcattttgtttctacttttaatttctgtgtgttggccatactgaattatgagactaacagatgtctacaatacaatacctgtattcaaaataacaaaaataaagcctgattctttgtttctagaaaaaaaaatcttgtacc

SEQ ID NO: 422907 - DNA, 3789 bp, Homo sapiens
  misc_feature (17)..(17): n is a, c, g, or t
  misc_feature (23)..(23): n is a, c, g, or t
  misc_feature (49)..(49): n is a, c, g, or t
  misc_feature (62)..(62): n is a, c, g, or t
  misc_feature (65)..(65): n is a, c, g, or t
  misc_feature (68)..(68): n is a, c, g, or t
ttggttaaatcccagcnggtttnaaccaaatccccccgttaaaaagggncctttaggacctnaanaancttggagtcaattaacatgttcttcaagtatacatggaataactttttgcatacacaagtggaaatttgtattgcactgattcttgcaagtccttttgaaaacacagaaaatgccacaattaccgatcaagactccactggtgataatttgttattaaaacatcttttccaaaaatgtcaattaatagaacgaatacttgaagcctgggaaatgaatgagaagaaacaggctgagggaggaagacggcatggttacatgggacacctaacgaggatagctaactgtatcgtgcacagcactgacaagggccccaacagtgcattagtgcagcagcttatcaaagatcttcccgacgaagtcagggaacgatgggagacgttctgcacaagctccttaggagaaactaacaagaggaacacggtagatctagttacaacctgccatattcattcatccagtgatgatgaaattgactttaaagaaacgggtttctcacaggattcttctttgcagcaaatgcaacaaatgacgtccaattttattgaccagtttggcttcaacgatgagaagtttgcagatcaagatgacattggcaatgtttcttttgatcgagtatcagacatcaactttactctcaatacaaatgaaagtggaaatattgccttgtttgaagcatgttgtaaggaaagaatacaacagtttgatgatggtggctctgatgaggaagatatatgggaggaaaagcacatcgcattcacaccagaatcccaaagacgatccagctcggggagtacagacagtgaggaaagtacagactctgaagaagaagatggagcaaagcaagacttgtttgaacccagcagtgccaacacggaggataaaatggaggtggacctgagtgaaccacccaactggtcagctaactttgatgtcccaatggaaacaacccacggtgctccattggattctgtgggatctgatgtctggagcacagaggagccgatgccaactaaagagacgggctgggcttctttttcagagttcacgtcttccctgagcacaaaagattctttaaggagtaattctccagtggaaatggaaaccagcactgaacccatggaccctctgactcccagtgcggctgccctggcagtgcagccagaagcggcaggcagtgtggccatggaagccagctctgacggagaggaggatgcagaaagtacagacaaggtaactgagacagtgatgaatggcggcatgaaggaaacgctcagcctcactgtagatgccaagacagagactgcggtcttcaaaagtgaggaagggaaactgtctacctctcaagatgctgcttgtaaagacgcagaggagtgtcccgagactgcagaggcgaagtgcgcggcgcccaggcctcccagcagcagtcccgagcagaggactggccaaccaagcgcaccaggtgacacttcagtgaatggccctgtatgacgggtgacgtctgctgctgctgactgaggactgcagaccgccaccactcaggggctctggaggggtcagctggagcccaccaagctgtcactgctgcactcactctgcaagggatcaggaccagcaacctttatattctagattctaagacattgtacagagaaattcagaagtgtaaaaatattgcacattgacaaataccaagaatttttgcgtatgtttatattgtattgttctaaataatgggtagcctgtgaaataagatcttgccacccatgtaataatagtagtaatactatagttaaaatggctgtaagaatagttttataaaagtgaatacacagatctattgtatttgaaacataactttgacaattattagtgtgaccaaagtattaggcggttttcatacatttttcaccttgtacaaaattatgaattcatttttcctccaggccgacaaggagttgtagaatgaaaatgccctctaagtgttattttggttgttctaacttacaaaagtgattttgaataagaaatatttggtgttctttttataaccagtttttgattggtaattgttttctgtattgtttaaaacggatcaaaaatgtaagtctattggtagagattaagtaaagtatttattgctacatcatagttgataaattgatgttatcgtaaagccatatgttctgttcaagtcttgtttgcttgaaatgattattcctacaagtgaaacactagactatttggagtgtatatggcttgtgttttgggattttttttttttttttttggcttttgtttttgtttgtttttttgtttcatttggtagttcatctgccttttaacccattcaccaaaatttaccttgttaacaagcatcaccaatgaacatttcagagcaatctgcatatttaacagacctaaaataaatcctattaggcaagtcagttgaaaatgctcgtgctgctaatggaattagagtgcgttcattttacaggctagtattttaaaagtagaaatcaaaatctggcaccgaagcatgctaattgtttactgtaccttgtgaggttttcactcataaatttaaaccagtgtatttttttagaactggtttgtgtatatatatagtgattatggatactaattcaatgtaatttataattttctatgtcaatacaaaaatacatcacagccttctcaaacagctcaagcaatatattgtatattgccatatcgtctggtgaaagggttaaattacttcacctcttgcacttttagatgcaaatcagtttttcatttctgtaatagaaaattattcacgtatttttacatcatttgtttttcctgaccagtatttaaaaccaaaaggatattctgaaaaatggccaacaatttttttagaagtagcatcccaagcagcgtgcctaaacattacattgcatatggaaataaaagaatcaaacgtctaatgccttattatttctgatttcctttttcattttaagtggtgtggagattccagcactcccaggacagtggagtcagcagtaagccctgggacaggtggcaagggtgggtcccttgacctttgcacgcctcctcaggaaccccctttcccgggtgagcccctctctgaagagactgtccttgggcctcctctggaagcagcacccccagaggacagggctcctcctgcttgcctcagggctgcctgacttgaatggcgttggacctcggggattactggtagataatatgctctggtctcgcctggtggtgagttttgccagccatggccagggtttggctccactggtggcacacgtggcctccgtggtatggacctggtggcttctccatcccactgtggcctctgtggtatggacctggtggcttctccatcctacccaaggtaacagtgtcttgcttcatcccactgactgctgggagagagcctctgggacttttctttggggcatcattttgttttgtctttcgtagcagggaaaggatatgacaatggggaggacagttcttttggaggttggaggggccaagccaaggacaggagcaagtgtgccctcattttgtttctacttttaatttctgtgtgttggccatactgaattatgagactaacagatgtctacaatacaatacctgtattcaaaataacaaaaataaagcctgattctttgtttctagaaaaaaaaatcttgtacc

SEQ ID NO: 422908 - DNA, 4864 bp, Homo sapiens
gcctgcttgatacgtccgccattttgggcgcttcgctgatggtgtcggtgagcgcgtttcccgcctgagcgcaactagcggcgggtcgtgggcacctccaggagagcttgtttcatatccatatcccactgtattcctgctaatctgctaatgcagtaaattggaggaaaactgttaccaggataacctgtaatgggcaaggagccacaaagaagaaaacatttcttttaatttttaaacttggtttgaaagaccagcatgttttggaaatttgatcttcactcatcatcccacatagacacacttctagaaagagaagatgtaacactgaaggagttaatggatgaggaagatgttttacaggaatgtaaagctcagaaccgcaaacttatagagtttctgttaaaagcagaatgtctcgaagatttagtctcattcattatagaagaaccacctcaagacatggatgaaaagatcagatacaagtatccaaatatatcttgtgagttgctcacttctgatgtctcccagatgaatgatagactgggagaagatgaatccttgctaatgaaattatatagcttcctcctaaacgattcccctttgaatccactacttgccagtttcttcagcaaggtgctaagtattcttatcagcagaaaaccagaacagattgtggatttcttaaagaagaagcatgattttgtagaccttattataaagcacataggaacttctgctatcatggatttgttgctcaggctcctgacgtgtatcgaacctccacagcccaggcaagatgtgctgaattggttaaatgaggagaaaattatccagaggcttgtggaaatagttcatccatcgcaagaagaagatcgacattcaaatgcatcacaatcactttgtgaaattgttcgcctgagcagagaccagatgttacaaattcagaacagtacagagcccgaccccctgcttgccactctagaaaagcaagaaattatagagcagcttctatcaaatattttccacaaggagaaaaatgagtcagccatagtcagtgcaatccagatattgctgactttacttgagacacgacgaccaacatttgaaggccatatagagatctgcccaccaggcatgagccattcagcttgttcagtaaacaagagtgttctagaagccatcagaggaagacttggatcttttcatgaactcctgctggagccacccaagaaaagtgtgatgaagaccacatggggtgtgctggatcctcctgtggggaatacccggttgaatgtcattaggttgatatccagcctgcttcaaaccaataccagcagtataaatggggaccttatggagctgaatagcattggagtcatattgaacatgttcttcaagtatacatggaataactttttgcatacacaagtggaaatttgtattgcactgattcttgcaagtccttttgaaaacacagaaaatgccacaattaccgatcaagactccactggtgataatttgttattaaaacatcttttccaaaaatgtcaattaatagaacgaatacttgaagcctgggaaatgaatgagaagaaacaggctgagggaggaagacggcatggttacatgggacacctaacgaggatagctaactgtatcgtgcacagcactgacaagggccccaacagtgcattagtgcagcagcttatcaaagatcttcccgacgaagtcagggaacgatgggagacgttctgcacaagctccttaggagaaactaacaagaggaacacggtagatctagccttttctgattatcagatgcaacaaatgacgtccaattttattgaccagtttggcttcaacgatgagaagtttgcagatcaagatgacattggcaatgtttcttttgatcgagtatcagacatcaactttactctcaatacaaatgaaagtggaaatattgccttgtttgaagcatgttgtaaggaaagaatacaacagtttgatgatggtggctctgatgaggaagatatatgggaggaaaagcacatcgcattcacaccagaatcccaaagacgatccagctcggggagtacagacagtgaggaaagtacagactctgaagaagaagatggagcaaagcaagacttgtttgaacccagcagtgccaacacggaggataaaatggaggtggacctgagtgaaccacccaactggtcagctaactttgatgtcccaatggaaacaacccacggtgctccattggattctgtgggatctgatgtctggagcacagaggagccgatgccaactaaagagacgggctgggcttctttttcagagttcacgtcttccctgagcacaaaagattctttaaggagtaattctccagtggaaatggaaaccagcactgaacccatggaccctctgactcccagtgcggctgccctggcagtgcagccagaagcggcaggcagtgtggccatggaagccagctctgacggagaggaggatgcagaaagtacagacaaggtaactgagacagtgatgaatggcggcatgaaggaaacgctcagcctcactgtagatgccaagacagagactgcggtcttcaaaagtgaggaagggaaactgtctacctctcaagatgctgcttgtaaagacgcagaggagtgtcccgagactgcagaggcgaagtgcgcggcgcccaggcctcccagcagcagtcccgagcagaggactggccaaccaagcgcaccaggtgacacttcagtgaatggccctgtatgacgggtgacgtctgctgctgctgactgaggactgcagaccgccaccactcaggggctctggaggggtcagctggagcccaccaagctgtcactgctgcactcactctgcaagggatcaggaccagcaacctttatattctagattctaagacattgtacagagaaattcagaagtgtaaaaatattgcacattgacaaataccaagaatttttgcgtatgtttatattgtattgttctaaataatgggtagcctgtgaaataagatcttgccacccatgtaataatagtagtaatactatagttaaaatggctgtaagaatagttttataaaagtgaatacacagatctattgtatttgaaacataactttgacaattattagtgtgaccaaagtattaggcggttttcatacatttttcaccttgtacaaaattatgaattcatttttcctccaggccgacaaggagttgtagaatgaaaatgccctctaagtgttattttggttgttctaacttacaaaagtgattttgaataagaaatatttggtgttctttttataaccagtttttgattggtaattgttttctgtattgtttaaaacggatcaaaaatgtaagtctattggtagagattaagtaaagtatttattgctacatcatagttgataaattgatgttatcgtaaagccatatgttctgttcaagtcttgtttgcttgaaatgattattcctacaagtgaaacactagactatttggagtgtatatggcttgtgttttgggattttttttttttttttttggcttttgtttttgtttgtttttttgtttcatttggtagttcatctgccttttaacccattcaccaaaatttaccttgttaacaagcatcaccaatgaacatttcagagcaatctgcatatttaacagacctaaaataaatcctattaggcaagtcagttgaaaatgctcgtgctgctaatggaattagagtgcgttcattttacaggctagtattttaaaagtagaaatcaaaatctggcaccgaagcatgctaattgtttactgtaccttgtgaggttttcactcataaatttaaaccagtgtatttttttagaactggtttgtgtatatatatagtgattatggatactaattcaatgtaatttataattttctatgtcaatacaaaaatacatcacagccttctcaaacagctcaagcaatatattgtatattgccatatcgtctggtgaaagggttaaattacttcacctcttgcacttttagatgcaaatcagtttttcatttctgtaatagaaaattattcacgtatttttacatcatttgtttttcctgaccagtatttaaaaccaaaaggatattctgaaaaatggccaacaatttttttagaagtagcatcccaagcagcgtgcctaaacattacattgcatatggaaataaaagaatcaaacgtctaatgccttattatttctgatttcctttttcattttaagtggtgtggagattccagcactcccaggacagtggagtcaggctgcctgacttgaatggcgttggacctcggggattactggtagataatatgctctggtctcgcctggtggtgagttttgccagccatggccagggtttggctccactggtggcacacgtggcctccgtggtatggacctggtggcttctccatcccactgtggcctctgtggtatggacctggtggcttctccatcctacccaaggtaacagtgtcttgcttcatcccactgactgctgggagagagcctctgggacttttctttggggcatcattttgttttgtctttcgtagcagggaaaggatatgacaatggggaggacagttcttttggaggttggaggggccaagccaaggacaggagcaagtgtgccctcattttgtttctacttttaatttctgtgtgttggccatactgaattatgagactaacagatgtctacaatacaatacctgtattcaaaataacaaaaataaagcctgattctttgtttctagaaaaaaaaatcttgtacc

SEQ ID NO: 422909 - DNA, 3128 bp, Homo sapiens
gatgaggaaactcaggttatagatgaggttccttgtccaagtagtctacagctaggaagtggtgatgtcgatgtttgaatccaggaagcctcacctcagccaggctcatcacctatgttggcttcccattagagaacaaagaaacgatccaccagcaacaccacaagaaagtaatttttaaaacaaagcaaagcaaatagagcccaactgaggaaaacaagtgagtagagggtagagtgtgtaactgcctgctctgccccacactggaacagttaggagcacaagtgtctgctgggagaagctgggtatggaggtggacgctgagctgggagggatgtaggcgacttgctagtctctagtaaagaaaacccatgaaacccctctttagtgggcatctttaagaagtctctccccatcaagaatgtggcccagacaacagcaggcagaagccatctcactcttttttttcttcaagcagtagatgtcacgttgggtagatgggtttgtacagtggtggggtgccagttccttttcgggcttgctgtgtgtgaccatcagctgtgttcttttcagcggcaggcagtgtggccatggaagccagctctgacggagaggaggatgcagaaagtacagacaaggtaactgagacagtgatgaatggcggcatgaaggaaacgctcagcctcactgtagatgccaagacagagactgcggtcttcaaaagtgaggaagggaaactgtctacctctcaagatgctgcttgtaaagacgcagaggagtgtcccgagactgcagaggcgaagtgcgcggcgcccaggcctcccagcagcagtcccgagcagaggactggccaaccaagcgcaccaggtgacacttcagtgaatggccctgtatgacgggtgacgtctgctgctgctgactgaggactgcagaccgccaccactcaggggctctggaggggtcagctggagcccaccaagctgtcactgctgcactcactctgcaagggatcaggaccagcaacctttatattctagattctaagacattgtacagagaaattcagaagtgtaaaaatattgcacattgacaaataccaagaatttttgcgtatgtttatattgtattgttctaaataatgggtagcctgtgaaataagatcttgccacccatgtaataatagtagtaatactatagttaaaatggctgtaagaatagttttataaaagtgaatacacagatctattgtatttgaaacataactttgacaattattagtgtgaccaaagtattaggcggttttcatacatttttcaccttgtacaaaattatgaattcatttttcctccaggccgacaaggagttgtagaatgaaaatgccctctaagtgttattttggttgttctaacttacaaaagtgattttgaataagaaatatttggtgttctttttataaccagtttttgattggtaattgttttctgtattgtttaaaacggatcaaaaatgtaagtctattggtagagattaagtaaagtatttattgctacatcatagttgataaattgatgttatcgtaaagccatatgttctgttcaagtcttgtttgcttgaaatgattattcctacaagtgaaacactagactatttggagtgtatatggcttgtgttttgggattttttttttttttttttggcttttgtttttgtttgtttttttgtttcatttggtagttcatctgccttttaacccattcaccaaaatttaccttgttaacaagcatcaccaatgaacatttcagagcaatctgcatatttaacagacctaaaataaatcctattaggcaagtcagttgaaaatgctcgtgctgctaatggaattagagtgcgttcattttacaggctagtattttaaaagtagaaatcaaaatctggcaccgaagcatgctaattgtttactgtaccttgtgaggttttcactcataaatttaaaccagtgtatttttttagaactggtttgtgtatatatatagtgattatggatactaattcaatgtaatttataattttctatgtcaatacaaaaatacatcacagccttctcaaacagctcaagcaatatattgtatattgccatatcgtctggtgaaagggttaaattacttcacctcttgcacttttagatgcaaatcagtttttcatttctgtaatagaaaattattcacgtatttttacatcatttgtttttcctgaccagtatttaaaaccaaaaggatattctgaaaaatggccaacaatttttttagaagtagcatcccaagcagcgtgcctaaacattacattgcatatggaaataaaagaatcaaacgtctaatgccttattatttctgatttcctttttcattttaagtggtgtggagattccagcactcccaggacagtggagtcagcagtaagccctgggacaggtggcaagggtgggtcccttgacctttgcacgcctcctcaggaaccccctttcccgggtgagcccctctctgaagagactgtccttgggcctcctctggaagcagcacccccagaggacagggctcctcctgcttgcctcagggctgcctgacttgaatggcgttggacctcggggattactggtagataatatgctctggtctcgcctggtggtgagttttgccagccatggccagggtttggctccactggtggcacacgtggcctccgtggtatggacctggtggcttctccatcccactgtggcctctgtggtatggacctggtggcttctccatcctacccaaggtaacagtgtcttgcttcatcccactgactgctgggagagagcctctgggacttttctttggggcatcattttgttttgtctttcgtagcagggaaaggatatgacaatggggaggacagttcttttggaggttggaggggccaagccaaggacaggagcaagtgtgccctcattttgtttctacttttaatttctgtgtgttggccatactgaattatgagactaacagatgtctacaatacaatacctgtattcaaaataacaaaaataaagcctgattctttgtttctagaaaaaaaaatcttgtacc

SEQ ID NO: 422910 - DNA, 3954 bp, Homo sapiens
gccataggaaaggatatcttacaatatctttatggatgaatgcacacttcagtttaccttattgcagctaaaagtaagtgtaccccctgtcaagagagcatcccgttttacttggtttggctcattgacaaagtaagcaagctcctggtacaatttgagagccctgaaagcagcaatggggattctactatagctgtctagtgtaggaagattttcttggtcaagtttttgttgggggaaagaacagtccaaacctttgtgagctgtgtgttctcatcccagctacacgcacctgactgtatagaactttttgcagtttggccttctttggagatagcagtgtgtttttacgtgtggactaaagcaaaaatgaaaaactaggcacgtgccagtagaccaaatcagcctcctagcagagcacattgacattgtacaactttacagcctctgtcattggggtctggtttcaatttacttcatttcttaagagtttaaactggtttttataatttttccttatttctttgagtatcttggtttcacttatttgttcttttctatgtcttcttagatctaaaggaatgaagaattttaggatttgaagtgtcttaagtaatcatttagtctaaacctctcatttacagataagaaaacaagctcagagagatgtggtgacttgctcaaatagtgacagaacttcctcggccatatggaggggtcatataatacccttgtgtcttcagtttgaggagagcttgtttcatatccatatcccactgtattcctgctaatctgctaatgcagtaaattggaggaaaactgttaccaggataacctgtaatgggcaaggagccacaaagaagaaaacatttcttttaatttttaaacttggtttgaaagaccagcatgttttggaaatttgatcttcactcatcatcccacatagacacacttctagaaagagaagatgtaacactgaaggagttaatggatgaggaagatgttttacaggaatgtaaagctcagaaccgcaaacttatagagtttctgttaaaagcagaatgtctcgaagatttagtctcattcattatagaagaaccacctcaagacatggatgaaaagatcagatacaagtatccaaatatatcttgtgagttgctcacttctgatgtctcccagatgaatgatagactgggagaagatgaatccttgctaatgaaattatatagcttcctcctaaacgattcccctttgaatccactacttgccagtttcttcagcaaggtgctaagtattcttatcagcagaaaaccagaacagattgtggatttcttaaagaagaagcatgattttgtagaccttattataaagcacataggaacttctgctatcatggatttgttgctcaggctcctgacgtgtatcgaacctccacagcccaggcaagatgtgctgaattggttaaatgaggagaaaattatccagaggcttgtggaaatagttcatccatcgcaagaagaagatcgacattcaaatgcatcacaatcactttgtgaaattgttcgcctgagcagagaccagatgttacaaattcagaacagtacagagcccgaccccctgcttgccactctagaaaagcaagaaattatagagcagcttctatcaaatattttccacaaggagaaaaatgagtcagccatagtcagtgcaatccagatattgctgactttacttgagacacgacgaccaacatttgaaggccatatagagatctgcccaccaggcatgagccattcagcttgttcagtaaacaagagtgttctagaagccatcagaggaagacttggatcttttcatgaactcctgctggagccacccaagaacatgttcttcaagtatacatggaataactttttgcatacacaagtggaaatttgtattgcactgattcttgcaagtccttttgaaaacacagaaaatgccacaattaccgatcaagactccactggtgataatttgttattaaaacatcttttccaaaaatgtcaattaatagaacgaatacttgaagcctgggaaatgaatgagaagaaacaggctgagggaggaagacggcatggttacatgggacacctaacgaggatagctaactgtatcgtgcacagcactgacaagggccccaacagtgcattagtgcagcagcttatcaaagatcttcccgacgaagtcagggaacgatgggagacgttctgcacaagctccttaggagaaactaacaagaggaacacggtagatctagccttttctgattatcagatgcaacaaatgacgtccaattttattgaccagtttggcttcaacgatgagaagtttgcagatcaagatgacattggcaatgtttcttttgatcgagtatcagacatcaactttactctcaatacaaatgaaagtggaaatattgccttgtttgaagcatgttgtaaggaaagaatacaacagtttgatgatggtggctctgatgaggaagatatatgggaggaaaagcacatcgcattcacaccagaatcccaaagacgatccagctcggggagtacagacagtgaggaaagtacagactctgaagaagaagatggagcaaagcaagacttgtttgaacccagcagtgccaacacggaggataaaatggaggtggacctgagtgaaccacccaactggtcagctaactttgatgtcccaatggaaacaacccacggtgctccattggattctgtgggatctgatgtctggagcacagaggagccgatgccaactaaagagacgggctgggcttctttttcagagttcacgtcttccctgagcacaaaagattctttaaggagtaattctccagtggaaatggaaaccagcactgaacccatggaccctctgactcccagtgcggctgccctggcagtgcagccagaagcggcaggcagtgtggccatggaagccagctctgacggagaggaggatgcagaaagtacagacaaggtaactgagacagtgatgaatggcggcatgaaggaaacgctcagcctcactgtagatgccaagacagagactgcggtcttcaaaagtgaggaagggaaactgtctacctctcaagatgctgcttgtaaagacgcagaggagtgtcccgagactgcagaggcgaagtgcgcggcgcccaggcctcccagcagcagtcccgagcagagtggtgtggagattccagcactcccaggacagtggagtcagcagtaagccctgggacaggtggcaagggtgggtcccttgacctttgcacgcctcctcaggaaccccctttcccgggtgagcccctctctgaagagactgtccttgggcctcctctggaagcagcacccccagaggacagggctcctcctgcttgcctcagggctgcctgacttgaatggcgttggacctcggggattactggtagataatatgctctggtctcgcctggtggtgagttttgccagccatggccagggtttggctccactggtggcacacgtggcctccgtggtatggacctggtggcttctccatcccactgtggcctctgtggtatggacctggtggcttctccatcctacccaaggtaacagtgtcttgcttcatcccactgactgctgggagagagcctctgggacttttctttggggcatcattttgttttgtctttcgtagcagggaaaggatatgacaatggggaggacagttcttttggaggttggaggggccaagccaaggacaggagcaagtgtgccctcattttgtttctacttttaatttctgtgtgttggccatactgaattatgagactaacagatgtctacaatacaatacctgtattcaaaataacaaaaataaagcctgattctttgtttctagaaaaaaaaatcttgtacc

SEQ ID NO: 422911 - DNA, 7202 bp, Homo sapiens
  misc_feature (3882)..(3882): n is a, c, g, or t
  misc_feature (4313)..(4313): n is a, c, g, or t
  misc_feature (4666)..(4666): n is a, c, g, or t
  misc_feature (5878)..(5878): n is a, c, g, or t
  misc_feature (6815)..(6815): n is a, c, g, or t
gcctgcttgatacgtccgccattttgggcgcttcgctgatggtgtcggtgagcgcgtttcccgcctgagcgcaactagcggcgggtcgtgggcacctccaggagagcttgtttcatatccatatcccactgtattcctgctaatctgctaatgcagtaaattggaggaaaactgttaccaggataacctgtaatgggcaaggagccacaaagaagaaaacatttcttttaatttttaaacttggtttgaaagaccagcatgttttggaaatttgatcttcactcatcatcccacatagacacacttctagaaagagaagatgtaacactgaaggagttaatggatgaggaagatgttttacaggaatgtaaagctcagaaccgcaaacttatagagtttctgttaaaagcagaatgtctcgaagatttagtctcattcattatagaagaaccacctcaagacatggatgaaaagatcagatacaagtatccaaatatatcttgtgagttgctcacttctgatgtctcccagatgaatgatagactgggagaagatgaatccttgctaatgaaattatatagcttcctcctaaacgattcccctttgaatccactacttgccagtttcttcagcaaggtgctaagtattcttatcagcagaaaaccagaacagattgtggatttcttaaagaagaagcatgattttgtagaccttattataaagcacataggaacttctgctatcatggatttgttgctcaggctcctgacgtgtatcgaacctccacagcccaggcaagatgtgctgaattggttaaatgaggagaaaattatccagaggcttgtggaaatagttcatccatcgcaagaagaagatcgacattcaaatgcatcacaatcactttgtgaaattgttcgcctgagcagagaccagatgttacaaattcagaacagtacagagcccgaccccctgcttgccactctagaaaagcaagaaattatagagcagcttctatcaaatattttccacaaggagaaaaatgagtcagccatagtcagtgcaatccagatattgctgactttacttgagacacgacgaccaacatttgaaggccatatagagatctgcccaccaggcatgagccattcagcttgttcagtaaacaagagtgttctagaagccatcagaggaagacttggatcttttcatgaactcctgctggagccacccaagaaaagtgtgatgaagaccacatggggtgtgctggatcctcctgtggggaatacccggttgaatgtcattaggttgatatccagcctgcttcaaaccaataccagcagtataaatggggaccttatggagctgaatagcattggagtcatattgaacatgttcttcaagtatacatggaataactttttgcatacacaagtggaaatttgtattgcactgattcttgcaagtccttttgaaaacacagaaaatgccacaattaccgatcaagactccactggtgataatttgttattaaaacatcttttccaaaaatgtcaattaatagaacgaatacttgaagcctgggaaatgaatgagaagaaacaggctgagggaggaagacggcatggttacatgggacacctaacgaggatagctaactgtatcgtgcacagcactgacaagggccccaacagtgcattagtgcagcagcttatcaaagatcttcccgacgaagtcagggaacgatgggagacgttctgcacaagctccttaggagaaactaacaagaggaacacggtagatctagttacaacctgccatattcattcatccagtgatgatgaaattgactttaaagaaacgggtttctcacaggattcttctttgcagcaatttggcttcaacgatgagaagtttgcagatcaagatgacattggcaatgtttcttttgatcgagtatcagacatcaactttactctcaatacaaatgaaagtggaaatattgccttgtttgaagcatgttgtaaggaaagaatacaacagtttgatgatggtggctctgatgaggaagatatatgggaggaaaagcacatcgcattcacaccagaatcccaaagacgatccagctcggggagtacagacagtgaggaaagtacagactctgaagaagaagatggagcaaagcaagacttgtttgaacccagcagtgccaacacggaggataaaatggaggtggacctgagtgaaccacccaactggtcagctaactttgatgtcccaatggaaacaacccacggtgctccattggattctgtgggatctgatgtctggagcacagaggagccgatgccaactaaagagacgggctgggcttctttttcagagttcacgtcttccctgagcacaaaagattctttaaggagtaattctccagtggaaatggaaaccagcactgaacccatggaccctctgactcccagtgcggctgccctggcagtgcagccagaagcggcaggcagtgtggccatggaagccagctctgacggagaggaggatgcagaaagtacagacaaggtaactgagacagtgatgaatggcggcatgaaggaaacgctcagcctcactgtagatgccaagacagagactgcggtcttcaaaaggtaaccaggggtgagatcctgctggtagcttcaggttattgggaggatggtggggcagaaacctcaaacattaaaatttttaatttgattcaaatgaatgttcagatactagcttgatgtctttctgttgtctccattaaacacaataaatcttaatgaagagatggagagtttaggcccctaagtgccttttcccccataaatgtgttcagaagactgtattttacatctagcagtttgatagaactatgagaattgataaatctttaatcacaatagaaattggcttgtgtaacaggctacagagcatggcccatgaaaaccggtttcaggtcgactggttttacaaaaacctttacttattttcagtaacatacagatgattatctcaggacataatgcagtcatgaaaattcagtagcaaaatgatagctttaaaagaacgtgacccttagaaattcacttctaaactcaaaaaaggaattgtaatgtatattaaaaacctaaaactgagagaataatgggaaaaatgtctgtcaaaacttaaggactgaagctaagcctgtgcttagagctttagtcttagagaccattccagccattacaagaaggaatgcctccctgcttattgcgaggtcactacaaaacaaggagtgaaagaagaaaactgattgtagactgatttcatacatgagcaattattctcaaaacttaagttaaagctagcaaaccaaatgtagcaatgtattttaaagtcatgaccaaggatatgtgctccagtgacacaatgtaaacaccagtgtgtacatggtaaaaattattcagagtaattcccagacaaaaggagaaaagcatttgattacaaattaaagctgttcatgattttctttgcagcctaggaatagaaagtaaataggtgaaactggtaagtatctctagaaaatctagagtagacttgattcttcagtgaggcattagaagtattccctttaaagacaagaaccagaaagtgggacctacagttgctatttgtcttcagcactgtgctggtggccttagcaaatgcagcattccaaataaataaatagtcgctgttgataggctatgatttatacataaaaattccaatggaatctgtagataaggattaatagaaaagtttagcaggtttactggagacatacaaaatcacttgcatcctataaatcaatataagatattccanatgtgcctgtttttaataaaaatgtaaaaccttatctataactaggaatatgacctttatgggaaaacagtttaaaatctcatggaatatattgaagacctgaatataaataccaagatttgccatgtttatcaatgtgaagatatttttagcatttctgaacaagttagtctatgaaattaatgaaatttccatcaaaatcccaatagagattttcatggaaattgagaaactgattgtaatagtcataagaccaaagagagccaggaatagccaaaaacattttaaagaaaaaagtgaggggcttcaccatattagatatcaagacttagtaaagctggccgagtgtggtggcttgcacctgtaatcccagcactttgggaggattaggcagacagattgcttgagcccaggagtttgagaccagcctnggcaacgtggcaaaatcctgtctctgcaaaaaatacaaaaattagctgagtgtggtggtgtgtgcctgtggtcccagctacttgggggtgctgaagtcgaggctgcagtgagctgtgtcccccactgcactccagcctgggggacaaaatgagaccctgtctcaaacaaaagcgaaaacaaaacttagtaaagctactgagatggtgtggctttggcaaagaattatacaaagagaccccctccactacatgaacttgttacatgttagaatgccattataattcaatgaggaaagagtggactagtaaatagtgattatccacatagtagaaaaataaaattagatattttntctcaacataaatatgaaaagcatgaactgtacagcttttagaagacaacaaaagagagtatctttacagtttgggtgtaaggcatttttttaaccataaaaagccaaaccataaaggaaaatcttggtaagtttgactttaatttctaatatcccagaagacataaaatgaaaagacaagccacaaccagtaaagaaccagtagccaggatattagaaataaccttatatcaatgagagatagtctaatttttttaaatggacaaaggatgcaaacaagcaactgtctgtggaggaaaacaaggagcaaaccaaatccagagtaaatgggacctgtcagttacagtagtaagtaaatgctatttcgtgctcaccagtctactaattcctatcttaagttgttagagaagatagaaaaagtacaaaacctgcccagctctttttatgagggcagtgaaatttgaattccaaaaccagataaagataattacagaaaatgatcagttcatgccacttacaggctactgaatgcaaaaatcctgtgtaaggtatttgctgactggatccaacagtgtattaaaaataatttataatgattagttagggtttatcctggaaggcaaggatggctcaaagtcagagaaatctgtcagtttaatctccatatatggtgttagacagaaagtcagtcatttgattttttttataaggttccatagctatatatgattaaaactctgagaaaaccagtaacagaagtgaatttatttttcttctttcctcctcttcctcctccctccttcctccttctttcttcttctttcttctttcttcttcaagatgagtgcagtgatgtggatctcggctcactgcaatctctgtctcctgggcttaagccatcctcccacctcaacctcccaagtaactgggactaggactacaggcacacgccaccatgctcagcaaatttatgtagtttttttttttttttttgtagtgatggggtttcaccatgttgcccaggctggtctcaaactcctgagctcaagcaatccacctgcctccacctcccaaagtgctgggattacagatgtgagccaccgcgcctggcaatgaatttcattaacttggtataagttaaataccaataccaaaatgctacagcaaaactaacacctaatgaggaaagtttagatgcattcactttaagangaagccttaaaggatgtccattttcattgccagtgttaggcagtcctggaaggaaaaggaaatagagttataggtaaagatcaggaggaagtgataaaactgttgttctttgcaggtggtaatgattacctacaaccaagtcagtagcaaacttgtaactaataagaattcagtaaagctattgagtaagaaatcagtttaaaaaatcagtagtctttttcttcatcagtagtaagcaaccagaacataaaaagcaaggtattattccaaaatacatcaaaatataaattattcaggaatgatcttaacccaagtctctatagagaaatctggacaagtggagaccatggcatagcttagtgctgcagagacatctgccatcctgaagttagtgtttaacgcagtctcaatccaaatttcagttggatttttagaagtaacttaatactctaaaatttatatggaaaaatgaaggttcccaaattgcttagaggtaaccaaaagggaagattgaaaaagggacttgccctgccagatagtcacgctgcaaagtcacagtgattggaacagttttgatattagtgtccaaacaggtacaggtgtcagtgtgatgaaatagagggattaataatggggaagggagaggaagggctggttcaccaaaaggaaaagtcaggcaagatcctccctaatctacattctaaaacaactccagctggattaaaagacaataagaaaaacatgtgcagtgctttctgtggaccaggccctgctctctacactctccatgtgtggtagctcatggattattcttaggaaccctataagataggtactgggattattatccctgcttttcaggtgaggaaactgaggcactagagttaagtgatgaggccggaggccagagtctcatgatggttaataaaagaaatanagaatgtctttttaacctgtgtgcagaaagggacttctgtatctatctcatctgtctgtcatctatctatctatctgtctgtctgcctatctaatctatcatctgtcagtctatatctaatctagatttttttttttttaacacgaggtctcgctctgttgcccaggctggaatgcagtggcacaatcatagctcactgtaacttccaactcctgagctccagcagtcctcccacctcagtatcccaagtagctggaactacagttgtgtgccaccactcctggcttaatttttttgtttgtttacttttttatttttgtggcccaggctgatctcaaactcctggcttcaagtgagcctccttcctcggcaggacttctttaaaaa

SEQ ID NO: 422912 - DNA, 4575 bp, Homo sapiens
gcctgcttgatacgtccgccattttgggcgcttcgctgatggtgtcggtgagcgcgtttcccgcctgagcgcaactagcggcgggtcgtgggcacctccaggagagcttgtttcatatccatatcccactgtattcctgctaatctgctaatgcagtaaattggaggaaaactgttaccaggataacctgtaatgggcaaggagccacaaagaagaaaacatttcttttaatttttaaacttggtttgaaagaccagcatgttttggaaatttgatcttcactcatcatcccacatagacacacttctagaaagagaagatgtaacactgaaggagttaatggatgaggaagatgttttacaggaatgtaaagctcagaaccgcaaacttatagagtttctgttaaaagcagaatgtctcgaagatttagtctcattcattatagaagaaccacctcaagacatggatgaaaagatcagatacaagtatccaaatatatcttgtgagttgctcacttctgatgtctcccagatgaatgatagactgggagaagatgaatccttgctaatgaaattatatagcttcctcctaaacgattcccctttgaatccactacttgccagtttcttcagcaaggtgctaagtattcttatcagcagaaaaccagaacagattgtggatttcttaaagaagaagcatgattttgtagaccttattataaagcacataggaacttctgctatcatggatttgttgctcaggctcctgacgtgtatcgaacctccacagcccaggcaagatgtgctgaattggttaaatgaggagaaaattatccagaggcttgtggaaatagttcatccatcgcaagaagaagatcgacattcaaatgcatcacaatcactttgtgaaattgttcgcctgagcagagaccagatgttacaaattcagaacagtacagagcccgaccccctgcttgccactctagaaaagcaagaaattatagagcagcttctatcaaatattttccacaaggagaaaaatgagtcagccatagtcagtgcaatccagatattgctgactttacttgagacacgacgaccaacatttgaaggccatatagagatctgcccaccaggcatgagccattcagcttgttcagtaaacaagagtgttctagaagccatcagaggaagacttggatcttttcatgaactcctgctggagccacccaagaaaagtgtgatgaagaccacatggggtgtgctggatcctcctgtggggaatacccggttgaatgtcattaggttgatatccagcctgcttcaaaccaataccagcagtataaatggggaccttatggagctgaatagcattggagtcatattgaacatgttcttcaagtatacatggaataactttttgcatacacaagtggaaatttgtattgcactgattcttgcaagtccttttgaaaacacagaaaatgccacaattaccgatcaagactccactggtgataatttgttattaaaacatcttttccaaaaatgtcaattaatagaacgaatacttgaagcctgggaaatgaatgagaagaaacaggctgagggaggaagacggcatggttacatgggacacctaacgaggatagctaactgtatcgtgcacagcactgacaagggccccaacagtgcattagtgcagcagcttatcaaagatcttcccgacgaagtcagggaacgatgggagacgttctgcacaagctccttaggagaaactaacaagaggaacacggtagatctagccttttctgattatcagatgcaacaaatgacgtccaattttattgaccagtttggcttcaacgatgagaagtttgcagatcaagatgacattggcaatgtttcttttgatcgagtatcagacatcaactttactctcaatacaaatgaaagtggaaatattgccttgtttgaagcatgttgtaaggaaagaatacaacagtttgatgatggtggctctgatgaggaagatatatgggaggaaaagcacatcgcattcacaccagaatcccaaagacgatccagctcggggagtacagacagtgaggaaagtacagactctgaagaagaagatggagcaaagcaagacttgtttgaacccagcagtgccaacacggaggataaaatggaggtggacctgagtgaaccacccaactggtcagctaactttgatgtcccaatggaaacaacccacggtgctccattggattctgtgggatctgatgtctggagcacagaggagccgatgccaactaaagagacgggctgggcttctttttcagagttcacgtcttccctgagcacaaaagattctttaaggagtaattctccagtggaaatggaaaccagcactgaacccatggaccctctgactcccagtgcggctgccctggcagtgcagccagaagcggcaggcagtgtggccatggaagccagctctgacggagaggaggatgcagaaagtacagacaaggtaactgagacagtgatgaatggcggcatgaaggaaacgctcagcctcactgtagatgccaagacagagactgcggtcttcaaaagtgaggaagggaaactgtctacctctcaagatgctgcttgtaaagacgcagaggagtgtcccgagactgcagaggcgaagtgcgcggcgcccaggcctcccagcagcagtcccgagcagaggactggccaaccaagcgcaccaggtgacacttcagtgaatggccctgtatgacgggtgacgtctgctgctgctgactgaggactgcagaccgccaccactcaggggctctggaggggtcagctggagcccaccaagctgtcactgctgcactcactctgcaagggatcaggaccagcaacctttatattctagattctaagacattgtacagagaaattcagaagtgtaaaaatattgcacattgacaaataccaagaatttttgcgtatgtttatattgtattgttctaaataatgggtagcctgtgaaataagatcttgccacccatgtaataatagtagtaatactatagttaaaatggctgtaagaatagttttataaaagtgaatacacagatctattgtatttgaaacataactttgacaattattagtgtgaccaaagtattaggcggttttcatacatttttcaccttgtacaaaattatgaattcatttttcctccaggccgacaaggagttgtagaatgaaaatgccctctaagtgttattttggttgttctaacttacaaaagtgattttgaataagaaatatttggtgttctttttataaccagtttttgattggtaattgttttctgtattgtttaaaacggatcaaaaatgtaagtctattggtagagattaagtaaagtatttattgctacatcatagttgataaattgatgttatcgtaaagccatatgttctgttcaagtcttgtttgcttgaaatgattattcctacaagtgaaacactagactatttggagtgtatatggcttgtgttttgggattttttttttttttttttggcttttgtttttgtttgtttttttgtttcatttggtagttcatctgccttttaacccattcaccaaaatttaccttgttaacaagcatcaccaatgaacatttcagagcaatctgcatatttaacagacctaaaataaatcctattaggcaagtcagttgaaaatgctcgtgctgctaatggaattagagtgcgttcattttacaggctagtattttaaaagtagaaatcaaaatctggcaccgaagcatgctaattgtttactgtaccttgtgaggttttcactcataaatttaaaccagtgtatttttttagaactggtttgtgtatatatatagtgattatggatactaattcaatgtaatttataattttctatgtcaatacaaaaatacatcacagccttctcaaacagctcaagcaatatattgtatattgccatatcgtctggtgaaagggttaaattacttcacctcttgcacttttagatgcaaatcagtttttcatttctgtaatagaaaattattcacgtatttttacatcatttgtttttcctgaccagtatttaaaaccaaaaggatattctgaaaaatggccaacaatttttttagaagtagcatcccaatgtggcctctgtggtatggacctggtggcttctccatcctacccaaggtaacagtgtcttgcttcatcccactgactgctgggagagagcctctgggacttttctttggggcatcattttgttttgtctttcgtagcagggaaaggatatgacaatggggaggacagttcttttggaggttggaggggccaagccaaggacaggagcaagtgtgccctcattttgtttctacttttaatttctgtgtgttggccatactgaattatgagactaacagatgtctacaatacaatacctgtattcaaaataacaaaaataaagcctgattctttgtttctagaaaaaaaaatcttgtacc

SEQ ID NO: 422913 - DNA, 680 bp, Homo sapiens
ctgttctagaggatcacctgactgtgaaagaatccgcttgacgctttgcacgcctcctcaggaaccccctttcccgggtgagcccctctctgaagagactgtccttgggcctcctctggaagcagcacccccagaggacagggctcctcctgcttgcctcagggctgcctgacttgaatggcgttggacctcggggattactggtagataatatgctctggtctcgcctggtggtgagttttgccagccatggccagggtttggctccactggtggcacacgtggcctccgtggtatggacctggtggcttctccatcccactgtggcctctgtggtatggacctggtggcttctccatcctacccaaggtaacagtgtcttgcttcatcccactgactgctgggagagagcctctgggacttttctttggggcatcattttgttttgtctttcgtagcagggaaaggatatgacaatggggaggacagttcttttggaggttggaggggccaagccaaggacaggagcaagtgtgccctcattttgtttctacttttaatttctgtgtgttggccatactgaattatgagactaacagatgtctacaatacaatacctgtattcaaaataacaaaaataaagcctgattctttgtttctagaaaaaaaaatcttgtacc

SEQ ID NO: 422914 - DNA, 568 bp, Homo sapiens
gtagatctagaggatcccttgctctgtggtactcctcctgcttgcctcagggctgcctgacttgaatggcgttggacctcggggattactggtagataatatgctctggtctcgcctggtggtgagttttgccagccatggccagggtttggctccactggtggcacacgtggcctccgtggtatggacctggtggcttctccatcccactgtggcctctgtggtatggacctggtggcttctccatcctacccaaggtaacagtgtcttgcttcatcccactgactgctgggagagagcctctgggacttttctttggggcatcattttgttttgtctttcgtagcagggaaaggatatgacaatggggaggacagttcttttggaggttggaggggccaagccaaggacaggagcaagtgtgccctcattttgtttctacttttaatttctgtgtgttggccatactgaattatgagactaacagatgtctacaatacaatacctgtattcaaaataacaaaaataaagcctgattctttgtttctagaaaaaaaaatcttgtacc

SEQ ID NO: 422915 - DNA, 3684 bp, Homo sapiens
  misc_feature (3625)..(3625): n is a, c, g, or t
  misc_feature (3628)..(3628): n is a, c, g, or t
  misc_feature (3645)..(3645): n is a, c, g, or t
  misc_feature (3648)..(3648): n is a, c, g, or t
  misc_feature (3652)..(3652): n is a, c, g, or t
gcctgcttgatacgtccgccattttgggcgcttcgctgatggtgtcggtgagcgcgtttcccgcctgagcgcaactagcggcgggtcgtgggcacctccaggagagcttgtttcatatccatatcccactgtattcctgctaatctgctaatgcagtaaattggaggaaaactgttaccaggataacctgtaatgggcaaggagccacaaagaagaaaacatttcttttaatttttaaacttggtttgaaagaccagcatgttttggaaatttgatcttcactcatcatcccacatagacacacttctagaaagagaagatgtaacactgaaggagttaatggatgaggaagatgttttacaggaatgtaaagctcagaaccgcaaacttatagagtttctgttaaaagcagaatgtctcgaagatttagtctcattcattatagaagaaccacctcaagacatggatgaaaagatcagatacaagtatccaaatatatcttgtgagttgctcacttctgatgtctcccagatgaatgatagactgggagaagatgaatccttgctaatgaaattatatagcttcctcctaaacgattcccctttgaatccactacttgccagtttcttcagcaaggtgctaagtattcttatcagcagaaaaccagaacagattgtggatttcttaaagaagaagcatgattttgtagaccttattataaagcacataggaacttctgctatcatggatttgttgctcaggctcctgacgtgtatcgaacctccacagcccaggcaagatgtgctgaattggttaaatgaggagaaaattatccagaggcttgtggaaatagttcatccatcgcaagaagaagatcgacattcaaatgcatcacaatcactttgtgaaattgttcgcctgagcagagaccagatgttacaaattcagaacagtacagagcccgaccccctgcttgccactctagaaaagcaagaaattatagagcagcttctatcaaatattttccacaaggagaaaaatgagtcagccatagtcagtgcaatccagatattgctgactttacttgagacacgacgaccaacatttgaaggccatatagagatctgcccaccaggcatgagccattcagcttgttcagtaaacaagagtgttctagaagccatcagaggaagacttggatcttttcatgaactcctgctggagccacccaagaaaagtgtgatgaagaccacatggggtgtgctggatcctcctgtggggaatacccggttgaatgtcattaggttgatatccagcctgcttcaaaccaataccagcagtataaatggggaccttatggagctgaatagcattggagtcatattgaacatgttcttcaagtatacatggaataactttttgcatacacaagtggaaatttgtattgcactgattcttgcaagtccttttgaaaacacagaaaatgccacaattaccgatcaagactccactggtgataatttgttattaaaacatcttttccaaaaatgtcaattaatagaacgaatacttgaagcctgggaaatgaatgagaagaaacaggctgagggaggaagacggcatggttacatgggacacctaacgaggatagctaactgtatcgtgcacagcactgacaagggccccaacagtgcattagtgcagcagcttatcaaagatcttcccgacgaagtcagggaacgatgggagacgttctgcacaagctccttaggagaaactaacaagaggaacacggtagatctagccttttctgattatcagatgcaacaaatgacgtccaattttattgaccagtttggcttcaacgatgagaagtttgcagatcaagatgacattggcaatgtttcttttgatcgagtatcagacatcaactttactctcaatacaaatgaaagtggaaatattgccttgtttgaagcatgttgtaaggaaagaatacaacagtttgatgatggtggctctgatgaggaagatatatgggaggaaaagcacatcgcattcacaccagaatcccaaagacgatccagctcggggagtacagacagtgaggaaagtacagactctgaagaagaagatggagcaaagcaagacttgtttgaacccagcagtgccaacacggaggataaaatggaggtggacctgagtgaaccacccaactggtcagctaactttgatgtcccaatggaaacaacccacggtgctccattggattctgtgggatctgatgtctggagcacagaggagccgatgccaactaaagagacgggctgggcttctttttcagagttcacgtcttccctgagcacaaaagattctttaaggagtaattctccagtggaaatggaaaccagcactgaacccatggaccctctgactcccagtgcggctgccctggcagtgcagccagaagcggcaggcagtgtggccatggaagccagctctgacggagaggaggatgcagaaagtacagacaaggtaactgagacagtgatgaatggcggcatgaaggaaacgctcagcctcactgtagatgccaagacagagactgcggtcttcaaaagtgaggaagggaaactgtctacctctcaagatgctgcttgtaaagacgcagaggagtgtcccgagactgcagaggcgaagtgcgcggcgcccaggcctcccagcagcagtcccgagcagaggactggccaaccaagcgcaccaggtgacacttcagtgaatggccctgtatgacgggtgacgtctgctgctgctgactgaggactgcagaccgccaccactcaggggctctggaggggtcagctggagcccaccaagctgtcactgctgcactcactctgcaagggatcaggaccagcaacctttatattctagattctaagacattgtacagagaaattcagaagtgtaaaaatattgcacattgacaaataccaagaatttttgcgtatgtttatattgtattgttctaaataatgggtagcctgtgaaataagatcttgccacccatgtaataatagtagtaatactatagttaaaatggctgtaagaatagttttataaaagtgaatacacagatctattgtatttgaaacataactttgacaattattagtgtgaccaaagtattaggcggttttcatacatttttcaccttgtacaaaattatgaattcatttttcctccaggccgacaaggagttgtagaatgaaaatgccctctaagtgttattttggttgttctaacttacaaaagtgattttgaataagaaatatttggtgttctttttataaccagtttttgattggtaattgttttctgtattgtttaaaacggatcaaaaatgtaagtctattggtagagattaagtaaagtatttattgctacatcatagttgataaattgatgttatcgtaaagccatatgttctgttcaagtcttgtttgcttgaaatgattattcctacaagtgaaacactagactatttggagtgtatatggcttgtgttttgggattttttttttttttttttggcttttgtttttgtttgtttttttgtttcatngantgcttaccatttagganctngaanggggtcttagagactgaacccggctccctttg

SEQ ID NO: 422916 - DNA, 7097 bp, Homo sapiens
  misc_feature (3846)..(3846): n is a, c, g, or t
  misc_feature (4277)..(4277): n is a, c, g, or t
  misc_feature (4630)..(4630): n is a, c, g, or t
  misc_feature (5842)..(5842): n is a, c, g, or t
  misc_feature (6779)..(6779): n is a, c, g, or t
gcctgcttgatacgtccgccattttgggcgcttcgctgatggtgtcggtgagcgcgtttcccgcctgagcgcaactagcggcgggtcgtgggcacctccaggagagcttgtttcatatccatatcccactgtattcctgctaatctgctaatgcagtaaattggaggaaaactgttaccaggataacctgtaatgggcaaggagccacaaagaagaaaacatttcttttaatttttaaacttggtttgaaagaccagcatgttttggaaatttgatcttcactcatcatcccacatagacacacttctagaaagagaagatgtaacactgaaggagttaatggatgaggaagatgttttacaggaatgtaaagctcagaaccgcaaacttatagagtttctgttaaaagcagaatgtctcgaagatttagtctcattcattatagaagaaccacctcaagacatggatgaaaagatcagatacaagtatccaaatatatcttgtgagttgctcacttctgatgtctcccagatgaatgatagactgggagaagatgaatccttgctaatgaaattatatagcttcctcctaaacgattcccctttgaatccactacttgccagtttcttcagcaaggtgctaagtattcttatcagcagaaaaccagaacagattgtggatttcttaaagaagaagcatgattttgtagaccttattataaagcacataggaacttctgctatcatggatttgttgctcaggctcctgacgtgtatcgaacctccacagcccaggcaagatgtgctgaattggttaaatgaggagaaaattatccagaggcttgtggaaatagttcatccatcgcaagaagaagatcgacattcaaatgcatcacaatcactttgtgaaattgttcgcctgagcagagaccagatgttacaaattcagaacagtacagagcccgaccccctgcttgccactctagaaaagcaagaaattatagagcagcttctatcaaatattttccacaaggagaaaaatgagtcagccatagtcagtgcaatccagatattgctgactttacttgagacacgacgaccaacatttgaaggccatatagagatctgcccaccaggcatgagccattcagcttgttcagtaaacaagagtgttctagaagccatcagaggaagacttggatcttttcatgaactcctgctggagccacccaagaaaagtgtgatgaagaccacatggggtgtgctggatcctcctgtggggaatacccggttgaatgtcattaggttgatatccagcctgcttcaaaccaataccagcagtataaatggggaccttatggagctgaatagcattggagtcatattgaacatgttcttcaagtatacatggaataactttttgcatacacaagtggaaatttgtattgcactgattcttgcaagtccttttgaaaacacagaaaatgccacaattaccgatcaagactccactggtgataatttgttattaaaacatcttttccaaaaatgtcaattaatagaacgaatacttgaagcctgggaaatgaatgagaagaaacaggctgagggaggaagacggcatggttacatgggacacctaacgaggatagctaactgtatcgtgcacagcactgacaagggccccaacagtgcattagtgcagcagcttatcaaagatcttcccgacgaagtcagggaacgatgggagacgttctgcacaagctccttaggagaaactaacaagaggaacacggtagatctagccttttctgattatcagatgcaacaaatgacgtccaattttattgaccagtttggcttcaacgatgagaagtttgcagatcaagatgacattggcaatgtttcttttgatcgagtatcagacatcaactttactctcaatacaaatgaaagtggaaatattgccttgtttgaagcatgttgtaaggaaagaatacaacagtttgatgatggtggctctgatgaggaagatatatgggaggaaaagcacatcgcattcacaccagaatcccaaagacgatccagctcggggagtacagacagtgaggaaagtacagactctgaagaagaagatggagcaaagcaagacttgtttgaacccagcagtgccaacacggaggataaaatggaggtggacctgagtgaaccacccaactggtcagctaactttgatgtcccaatggaaacaacccacggtgctccattggattctgtgggatctgatgtctggagcacagaggagccgatgccaactaaagagacgggctgggcttctttttcagagttcacgtcttccctgagcacaaaagattctttaaggagtaattctccagtggaaatggaaaccagcactgaacccatggaccctctgactcccagtgcggctgccctggcagtgcagccagaagcggcaggcagtgtggccatggaagccagctctgacggagaggaggatgcagaaagtacagacaaggtaactgagacagtgatgaatggcggcatgaaggaaacgctcagcctcactgtagatgccaagacagagactgcggtcttcaaaaggtaaccaggggtgagatcctgctggtagcttcaggttattgggaggatggtggggcagaaacctcaaacattaaaatttttaatttgattcaaatgaatgttcagatactagcttgatgtctttctgttgtctccattaaacacaataaatcttaatgaagagatggagagtttaggcccctaagtgccttttcccccataaatgtgttcagaagactgtattttacatctagcagtttgatagaactatgagaattgataaatctttaatcacaatagaaattggcttgtgtaacaggctacagagcatggcccatgaaaaccggtttcaggtcgactggttttacaaaaacctttacttattttcagtaacatacagatgattatctcaggacataatgcagtcatgaaaattcagtagcaaaatgatagctttaaaagaacgtgacccttagaaattcacttctaaactcaaaaaaggaattgtaatgtatattaaaaacctaaaactgagagaataatgggaaaaatgtctgtcaaaacttaaggactgaagctaagcctgtgcttagagctttagtcttagagaccattccagccattacaagaaggaatgcctccctgcttattgcgaggtcactacaaaacaaggagtgaaagaagaaaactgattgtagactgatttcatacatgagcaattattctcaaaacttaagttaaagctagcaaaccaaatgtagcaatgtattttaaagtcatgaccaaggatatgtgctccagtgacacaatgtaaacaccagtgtgtacatggtaaaaattattcagagtaattcccagacaaaaggagaaaagcatttgattacaaattaaagctgttcatgattttctttgcagcctaggaatagaaagtaaataggtgaaactggtaagtatctctagaaaatctagagtagacttgattcttcagtgaggcattagaagtattccctttaaagacaagaaccagaaagtgggacctacagttgctatttgtcttcagcactgtgctggtggccttagcaaatgcagcattccaaataaataaatagtcgctgttgataggctatgatttatacataaaaattccaatggaatctgtagataaggattaatagaaaagtttagcaggtttactggagacatacaaaatcacttgcatcctataaatcaatataagatattccanatgtgcctgtttttaataaaaatgtaaaaccttatctataactaggaatatgacctttatgggaaaacagtttaaaatctcatggaatatattgaagacctgaatataaataccaagatttgccatgtttatcaatgtgaagatatttttagcatttctgaacaagttagtctatgaaattaatgaaatttccatcaaaatcccaatagagattttcatggaaattgagaaactgattgtaatagtcataagaccaaagagagccaggaatagccaaaaacattttaaagaaaaaagtgaggggcttcaccatattagatatcaagacttagtaaagctggccgagtgtggtggcttgcacctgtaatcccagcactttgggaggattaggcagacagattgcttgagcccaggagtttgagaccagcctnggcaacgtggcaaaatcctgtctctgcaaaaaatacaaaaattagctgagtgtggtggtgtgtgcctgtggtcccagctacttgggggtgctgaagtcgaggctgcagtgagctgtgtcccccactgcactccagcctgggggacaaaatgagaccctgtctcaaacaaaagcgaaaacaaaacttagtaaagctactgagatggtgtggctttggcaaagaattatacaaagagaccccctccactacatgaacttgttacatgttagaatgccattataattcaatgaggaaagagtggactagtaaatagtgattatccacatagtagaaaaataaaattagatattttntctcaacataaatatgaaaagcatgaactgtacagcttttagaagacaacaaaagagagtatctttacagtttgggtgtaaggcatttttttaaccataaaaagccaaaccataaaggaaaatcttggtaagtttgactttaatttctaatatcccagaagacataaaatgaaaagacaagccacaaccagtaaagaaccagtagccaggatattagaaataaccttatatcaatgagagatagtctaatttttttaaatggacaaaggatgcaaacaagcaactgtctgtggaggaaaacaaggagcaaaccaaatccagagtaaatgggacctgtcagttacagtagtaagtaaatgctatttcgtgctcaccagtctactaattcctatcttaagttgttagagaagatagaaaaagtacaaaacctgcccagctctttttatgagggcagtgaaatttgaattccaaaaccagataaagataattacagaaaatgatcagttcatgccacttacaggctactgaatgcaaaaatcctgtgtaaggtatttgctgactggatccaacagtgtattaaaaataatttataatgattagttagggtttatcctggaaggcaaggatggctcaaagtcagagaaatctgtcagtttaatctccatatatggtgttagacagaaagtcagtcatttgattttttttataaggttccatagctatatatgattaaaactctgagaaaaccagtaacagaagtgaatttatttttcttctttcctcctcttcctcctccctccttcctccttctttcttcttctttcttctttcttcttcaagatgagtgcagtgatgtggatctcggctcactgcaatctctgtctcctgggcttaagccatcctcccacctcaacctcccaagtaactgggactaggactacaggcacacgccaccatgctcagcaaatttatgtagtttttttttttttttttgtagtgatggggtttcaccatgttgcccaggctggtctcaaactcctgagctcaagcaatccacctgcctccacctcccaaagtgctgggattacagatgtgagccaccgcgcctggcaatgaatttcattaacttggtataagttaaataccaataccaaaatgctacagcaaaactaacacctaatgaggaaagtttagatgcattcactttaagangaagccttaaaggatgtccattttcattgccagtgttaggcagtcctggaaggaaaaggaaatagagttataggtaaagatcaggaggaagtgataaaactgttgttctttgcaggtggtaatgattacctacaaccaagtcagtagcaaacttgtaactaataagaattcagtaaagctattgagtaagaaatcagtttaaaaaatcagtagtctttttcttcatcagtagtaagcaaccagaacataaaaagcaaggtattattccaaaatacatcaaaatataaattattcaggaatgatcttaacccaagtctctatagagaaatctggacaagtggagaccatggcatagcttagtgctgcagagacatctgccatcctgaagttagtgtttaacgcagtctcaatccaaatttcagttggatttttagaagtaacttaatactctaaaatttatatggaaaaatgaaggttcccaaattgcttagaggtaaccaaaagggaagattgaaaaagggacttgccctgccagatagtcacgctgcaaagtcacagtgattggaacagttttgatattagtgtccaaacaggtacaggtgtcagtgtgatgaaatagagggattaataatggggaagggagaggaagggctggttcaccaaaaggaaaagtcaggcaagatcctccctaatctacattctaaaacaactccagctggattaaaagacaataagaaaaacatgtgcagtgctttctgtggaccaggccctgctctctacactctccatgtgtggtagctcatggattattcttaggaaccctataagataggtactgggattattatccctgcttttcaggtgaggaaactgaggcactagagttaagtgatgaggccggaggccagagtctcatgatggttaataaaagaaatanagaatgtctttttaacctgtgtgcagaaagggacttctgtatctatctcatctgtctgtcatctatctatctatctgtctgtctgcctatctaatctatcatctgtcagtctatatctaatctagatttttttttttttaacacgaggtctcgctctgttgcccaggctggaatgcagtggcacaatcatagctcactgtaacttccaatcctggcttaatttttttgtttgtttacttttttatttttgtggcccaggctgatctcaaactcctggcttcaagtgagcctccttcctcggcaggacttctttaaaaa

SEQ ID NO: 422917 - DNA, 3302 bp, Homo sapiens
gcctgcttgatacgtccgccattttgggcgcttcgctgatggtgtcggtgagcgcgtttcccgcctgagcgcaactagcggcgggtcgtgggcacctccaggagagcttgtttcatatccatatcccactgtattcctgctaatctgctaatgcagtaaattggaggaaaactgttaccaggataacctgtaatgggcaaggagccacaaagaagaaaacatttcttttaatttttaaacttggtttgaaagaccagcatgttttggaaatttgatcttcactcatcatcccacatagacacacttctagaaagagaagatgtaacactgaaggagttaatggatgaggaagatgttttacaggaatgtaaagctcagaaccgcaaacttatagagtttctgttaaaagcagaatgtctcgaagatttagtctcattcattatagaagaaccacctcaagacatggatgaaaagatcagatacaagtatccaaatatatcttgtgagttgctcacttctgatgtctcccagatgaatgatagactgggagaagatgaatccttgctaatgaaattatatagcttcctcctaaacgattcccctttgaatccactacttgccagtttcttcagcaaggtgctaagtattcttatcagcagaaaaccagaacagattgtggatttcttaaagaagaagcatgattttgtagaccttattataaagcacataggaacttctgctatcatggatttgttgctcaggctcctgacgtgtatcgaacctccacagcccaggcaagatgtgctgaattggttaaatgaggagaaaattatccagaggcttgtggaaatagttcatccatcgcaagaagaagatcgacattcaaatgcatcacaatcactttgtgaaattgttcgcctgagcagagaccagatgttacaaattcagaacagtacagagcccgaccccctgcttgccactctagaaaagcaagaaattatagagcagcttctatcaaatattttccacaaggagaaaaatgagtcagccatagtcagtgcaatccagatattgctgactttacttgagacacgacgaccaacatttgaaggccatatagagatctgcccaccaggcatgagccattcagcttgttcagtaaacaagagtgttctagaagccatcagaggaagacttggatcttttcatgaactcctgctggagccacccaagaaaagtgtgatgaagaccacatggggtgtgctggatcctcctgtggggaatacccggttgaatgtcattaggttgatatccagcctgcttcaaaccaataccagcagtataaatggggaccttatggagctgaatagcattggagtcatattgaacatgttcttcaagtatacatggaataactttttgcatacacaagtggaaatttgtattgcactgattcttgcaagtccttttgaaaacacagaaaatgccacaattaccgatcaagactccactggtgataatttgttattaaaacatcttttccaaaaatgtcaattaatagaacgaatacttgaagcctgggaaatgaatgagaagaaacaggctgagggaggaagacggcatggttacatgggacacctaacgaggatagctaactgtatcgtgcacagcactgacaagggccccaacagtgcattagtgcagcagcttatcaaagatcttcccgacgaagtcagggaacgatgggagacgttctgcacaagctccttaggagaaactaacaagaggaacacggtagatctagccttttctgattatcagatgcaacaaatgacgtccaattttattgaccagtttggcttcaacgatgagaagtttgcagatcaagatgacattggcaatgtttcttttgatcgagtatcagacatcaactttactctcaatacaaatgaaagtggaaatattgccttgtttgaagcatgttgtaaggaaagaatacaacagtttgatgatggtggctctgatgaggaagatatatgggaggaaaagcacatcgcattcacaccagaatcccaaagacgatccagctcggggagtacagacagtgaggaaagtacagactctgaagaagaagatggagcaaagcaagacttgtttgaacccagcagtgccaacacggaggataaaatggaggtggacctgagtgaaccacccaactggtcagctaactttgatgtcccaatggaaacaacccacggtgctccattggattctgtgggatctgatgtctggagcacagaggagccgatgccaactaaagagacgggctgggcttctttttcagagttcacgtcttccctgagcacaaaagattctttaaggagtaattctccagtggaaatggaaaccagcactgaacccatggaccctctgactcccagtgcggctgccctggcagtgcagccagaagcggcaggcagtgtggccatggaagccagctctgacggagaggaggatgcagaaagtacagacaaggtaactgagacagtgatgaatggcggcatgaaggaaacgctcagcctcactgtagatgccaagacagagactgcggtcttcaaaagtgaggaagggaaactgtctacctctcaagatgctgcttgtaaagacgcagaggagtgtcccgagactgcagaggcgaagtgcgcggcgcccaggcctcccagcagcagtcccgagcagagtggtgtggagattccagcactcccaggacagtggagtcagcagtaagccctgggacaggtggcaagggtgggtcccttgacctttgcacgcctcctcaggaaccccctttcccgggtgagcccctctctgaagagactgtccttgggcctcctctggaagcagcacccccagaggacagggctcctcctgcttgcctcagggctgcctgacttgaatggcgttggacctcggggattactggtagataatatgctctggtctcgcctggtggtgagttttgccagccatggccagggtttggctccactggtggcacacgtggcctccgtggtatggacctggtggcttctccatcccactgtggcctctgtggtatggacctggtggcttctccatcctacccaaggtaacagtgtcttgcttcatcccactgactgctgggagagagcctctgggacttttctttggggcatcattttgttttgtctttcgtagcagggaaaggatatgacaatggggaggacagttcttttccctgctacgaaagacaaaaaaaaaaa

SEQ ID NO: 422918 - DNA, 5269 bp, Homo sapiens
  misc_feature (1949)..(1949): n is a, c, g, or t
  misc_feature (2380)..(2380): n is a, c, g, or t
  misc_feature (2733)..(2733): n is a, c, g, or t
  misc_feature (3945)..(3945): n is a, c, g, or t
  misc_feature (4882)..(4882): n is a, c, g, or t
gatgaggaaactcaggttatagatgaggttccttgtccaagtagtctacagctaggaagtggtgatgtcgatgtttgaatccaggaagcctcacctcagccaggctcatcacctatgttggcttcccattagagaacaaagaaacgatccaccagcaacaccacaagaaagtaatttttaaaacaaagcaaagcaaatagagcccaactgaggaaaacaagtgagtagagggtagagtgtgtaactgcctgctctgccccacactggaacagttaggagcacaagtgtctgctgggagaagctgggtatggaggtggacgctgagctgggagggatgtaggcgacttgctagtctctagtaaagaaaacccatgaaacccctctttagtgggcatctttaagaagtctctccccatcaagaatgtggcccagacaacagcaggcagaagccatctcactcttttttttcttcaagcagtagatgtcacgttgggtagatgggtttgtacagtggtggggtgccagttccttttcgggcttgctgtgtgtgaccatcagctgtgttcttttcagcggcaggcagtgtggccatggaagccagctctgacggagaggaggatgcagaaagtacagacaaggtaactgagacagtgatgaatggcggcatgaaggaaacgctcagcctcactgtagatgccaagacagagactgcggtcttcaaaaggtaaccaggggtgagatcctgctggtagcttcaggttattgggaggatggtggggcagaaacctcaaacattaaaatttttaatttgattcaaatgaatgttcagatactagcttgatgtctttctgttgtctccattaaacacaataaatcttaatgaagagatggagagtttaggcccctaagtgccttttcccccataaatgtgttcagaagactgtattttacatctagcagtttgatagaactatgagaattgataaatctttaatcacaatagaaattggcttgtgtaacaggctacagagcatggcccatgaaaaccggtttcaggtcgactggttttacaaaaacctttacttattttcagtaacatacagatgattatctcaggacataatgcagtcatgaaaattcagtagcaaaatgatagctttaaaagaacgtgacccttagaaattcacttctaaactcaaaaaaggaattgtaatgtatattaaaaacctaaaactgagagaataatgggaaaaatgtctgtcaaaacttaaggactgaagctaagcctgtgcttagagctttagtcttagagaccattccagccattacaagaaggaatgcctccctgcttattgcgaggtcactacaaaacaaggagtgaaagaagaaaactgattgtagactgatttcatacatgagcaattattctcaaaacttaagttaaagctagcaaaccaaatgtagcaatgtattttaaagtcatgaccaaggatatgtgctccagtgacacaatgtaaacaccagtgtgtacatggtaaaaattattcagagtaattcccagacaaaaggagaaaagcatttgattacaaattaaagctgttcatgattttctttgcagcctaggaatagaaagtaaataggtgaaactggtaagtatctctagaaaatctagagtagacttgattcttcagtgaggcattagaagtattccctttaaagacaagaaccagaaagtgggacctacagttgctatttgtcttcagcactgtgctggtggccttagcaaatgcagcattccaaataaataaatagtcgctgttgataggctatgatttatacataaaaattccaatggaatctgtagataaggattaatagaaaagtttagcaggtttactggagacatacaaaatcacttgcatcctataaatcaatataagatattccanatgtgcctgtttttaataaaaatgtaaaaccttatctataactaggaatatgacctttatgggaaaacagtttaaaatctcatggaatatattgaagacctgaatataaataccaagatttgccatgtttatcaatgtgaagatatttttagcatttctgaacaagttagtctatgaaattaatgaaatttccatcaaaatcccaatagagattttcatggaaattgagaaactgattgtaatagtcataagaccaaagagagccaggaatagccaaaaacattttaaagaaaaaagtgaggggcttcaccatattagatatcaagacttagtaaagctggccgagtgtggtggcttgcacctgtaatcccagcactttgggaggattaggcagacagattgcttgagcccaggagtttgagaccagcctnggcaacgtggcaaaatcctgtctctgcaaaaaatacaaaaattagctgagtgtggtggtgtgtgcctgtggtcccagctacttgggggtgctgaagtcgaggctgcagtgagctgtgtcccccactgcactccagcctgggggacaaaatgagaccctgtctcaaacaaaagcgaaaacaaaacttagtaaagctactgagatggtgtggctttggcaaagaattatacaaagagaccccctccactacatgaacttgttacatgttagaatgccattataattcaatgaggaaagagtggactagtaaatagtgattatccacatagtagaaaaataaaattagatattttntctcaacataaatatgaaaagcatgaactgtacagcttttagaagacaacaaaagagagtatctttacagtttgggtgtaaggcatttttttaaccataaaaagccaaaccataaaggaaaatcttggtaagtttgactttaatttctaatatcccagaagacataaaatgaaaagacaagccacaaccagtaaagaaccagtagccaggatattagaaataaccttatatcaatgagagatagtctaatttttttaaatggacaaaggatgcaaacaagcaactgtctgtggaggaaaacaaggagcaaaccaaatccagagtaaatgggacctgtcagttacagtagtaagtaaatgctatttcgtgctcaccagtctactaattcctatcttaagttgttagagaagatagaaaaagtacaaaacctgcccagctctttttatgagggcagtgaaatttgaattccaaaaccagataaagataattacagaaaatgatcagttcatgccacttacaggctactgaatgcaaaaatcctgtgtaaggtatttgctgactggatccaacagtgtattaaaaataatttataatgattagttagggtttatcctggaaggcaaggatggctcaaagtcagagaaatctgtcagtttaatctccatatatggtgttagacagaaagtcagtcatttgattttttttataaggttccatagctatatatgattaaaactctgagaaaaccagtaacagaagtgaatttatttttcttctttcctcctcttcctcctccctccttcctccttctttcttcttctttcttctttcttcttcaagatgagtgcagtgatgtggatctcggctcactgcaatctctgtctcctgggcttaagccatcctcccacctcaacctcccaagtaactgggactaggactacaggcacacgccaccatgctcagcaaatttatgtagtttttttttttttttttgtagtgatggggtttcaccatgttgcccaggctggtctcaaactcctgagctcaagcaatccacctgcctccacctcccaaagtgctgggattacagatgtgagccaccgcgcctggcaatgaatttcattaacttggtataagttaaataccaataccaaaatgctacagcaaaactaacacctaatgaggaaagtttagatgcattcactttaagangaagccttaaaggatgtccattttcattgccagtgttaggcagtcctggaaggaaaaggaaatagagttataggtaaagatcaggaggaagtgataaaactgttgttctttgcaggtggtaatgattacctacaaccaagtcagtagcaaacttgtaactaataagaattcagtaaagctattgagtaagaaatcagtttaaaaaatcagtagtctttttcttcatcagtagtaagcaaccagaacataaaaagcaaggtattattccaaaatacatcaaaatataaattattcaggaatgatcttaacccaagtctctatagagaaatctggacaagtggagaccatggcatagcttagtgctgcagagacatctgccatcctgaagttagtgtttaacgcagtctcaatccaaatttcagttggatttttagaagtaacttaatactctaaaatttatatggaaaaatgaaggttcccaaattgcttagaggtaaccaaaagggaagattgaaaaagggacttgccctgccagatagtcacgctgcaaagtcacagtgattggaacagttttgatattagtgtccaaacaggtacaggtgtcagtgtgatgaaatagagggattaataatggggaagggagaggaagggctggttcaccaaaaggaaaagtcaggcaagatcctccctaatctacattctaaaacaactccagctggattaaaagacaataagaaaaacatgtgcagtgctttctgtggaccaggccctgctctctacactctccatgtgtggtagctcatggattattcttaggaaccctataagataggtactgggattattatccctgcttttcaggtgaggaaactgaggcactagagttaagtgatgaggccggaggccagagtctcatgatggttaataaaagaaatanagaatgtctttttaacctgtgtgcagaaagggacttctgtatctatctcatctgtctgtcatctatctatctatctgtctgtctgcctatctaatctatcatctgtcagtctatatctaatctagatttttttttttttaacacgaggtctcgctctgttgcccaggctggaatgcagtggcacaatcatagctcactgtaacttccaactcctgagctccagcagtcctcccacctcagtatcccaagtagctggaactacagttgtgtgccaccactcctggcttaatttttttgtttgtttacttttttatttttgtggcccaggctgatctcaaactcctggcttcaagtgagcctccttcctcggcaggacttctttaaaaa

SEQ ID NO: 422919 - DNA, 1920 bp, Homo sapiens
gccataggaaaggatatcttacaatatctttatggatgaatgcacacttcagtttaccttattgcagctaaaagtaagtgtaccccctgtcaagagagcatcccgttttacttggtttggctcattgacaaagtaagcaagctcctggtacaatttgagagccctgaaagcagcaatggggattctactatagctgtctagtgtaggaagattttcttggtcaagtttttgttgggggaaagaacagtccaaacctttgtgagctgtgtgttctcatcccagctacacgcacctgactgtatagaactttttgcagtttggccttctttggagatagcagtgtgtttttacgtgtggactaaagcaaaaatgaaaaactaggcacgtgccagtagaccaaatcagcctcctagcagagcacattgacattgtacaactttacagcctctgtcattggggtctggtttcaatttacttcatttcttaagagtttaaactggtttttataatttttccttatttctttgagtatcttggtttcacttatttgttcttttctatgtcttcttagatctaaaggaatgaagaattttaggatttgaagtgtcttaagtaatcatttagtctaaacctctcatttacagataagaaaacaagctcagagagatgtggtgacttgctcaaatagtgacagaacttcctcggccatatggaggggtcatataatacccttgtgtcttcagtttgaggtacctcccataattttaaggggagagcttgtttcatatccatatcccactgtattcctgctaatctgctaatgcagtaaattggaggaaaactgttaccaggataacctgtaatgggcaaggagccacaaagaagaaaacatttcttttaatttttaaacttggtttgaaagaccagcatgttttggaaatttgatcttcactcatcatcccacatagacacacttctagaaagagaagatgtaacactgaaggagttaatggatgaggaagatgttttacaggaatgtaaagctcagaaccgcaaacttatagagtttctgttaaaagcagaatgtctcgaagatttagtctcattcattatagaagaaccacctcaagacatggatgaaaagatcagatacaagtatccaaatatatcttgtgagttgctcacttctgatgtctcccagatgaatgatagactgggagaagatgaatccttgctaatgaaattatatagcttcctcctaaacgattcccctttgaatccactacttgccagtttcttcagcaaggtgctaagtattcttatcagcagaaaaccagaacagattgtggatttcttaaagaagaagcatgattttgtagaccttattataaagcacataggaacttctgctatcatggatttgttgctcaggctcctgacgtgtatcgaacctccacagcccaggcaagatgtgctgaattgttcaaagtccagagaaacctgtaacattctacttaaaatgtgatggatatttccaagtatgttaatctacattggggcttgaacaagagccactcattgctatgattacttctacaatgtgttttacagtggttaaatgaggagaaaattatccagaggcttgtggaaatagttcatccatcgcaagaagaagatgtaagttcacttgtgtgactgtaaacttgattagaaaaaaaaaacaaaaaactgtttattgggcacagagcatacttatattaaatgtgaacatgatcagagcatacagggagaatagcagcgatctagtgttcttaaagttgatacttttctaaacaatattacattttgccaatactcagaaaatttccagaagtgtacaacagcaggcccttgttatagcaccatctcctttctagagcc

SEQ ID NO: 422920 - DNA, 1119 bp, Homo sapiens
gcctgcttgatacgtccgccattttgggcgcttcgctgatggtgtcggtgagcgcgtttcccgcctgagcgcaactagcggcgggtcgtgggcacctccaggagagcttgtttcatatccatatcccactgtattcctgctaatctgctaatgcagtaaattggaggaaaactgttaccaggataacctgtaatgggcaaggagccacaaagaagaaaacatttcttttaatttttaaacttggtttgaaagaccagcatgttttggaaatttgatcttcactcatcatcccacatagacacacttctagaaagagaagatgtaacactgaaggagttaatggatgaggaagatgttttacaggaatgtaaagctcagaaccgcaaacttatagagtttctgttaaaagcagaatgtctcgaagatttagtctcattcattatagaagaaccacctcaagacatggatgaaaagatcagatacaagtatccaaatatatcttgtgagttgctcacttctgatgtctcccagatgaatgatagactgggagaagatgaatccttgctaatgaaattatatagcttcctcctaaacgattcccctttgaatccactacttgccagtttcttcagcaaggtgctaagtattcttatcagcagaaaaccagaacagattgtggatttcttaaagaagaagcatgattttgtagaccttattataaagcacataggaacttctgctatcatggatttgttgctcaggctcctgacgtgtatcgaacctccacagcccaggcaagatgtgctgaattggttaaatgaggagaaaattatccagaggcttgtggaaatagttcatccatcgcaagaagaagatgtaagttcacttgtgtgactgtaaacttgattagaaaaaaaaaacaaaaaactgtttattgggcacagagcatacttatattaaatgtgaacatgatcagagcatacagggagaatagcagcgatctagtgttcttaaagttgatacttttctaaacaatattacattttgccaatactcagaaaatttccagaagtgtacaacagcaggcccttgttatagcaccatctcctttctagagcc

SEQ ID NO: 422921 - DNA, 1556 bp, Homo sapiens
gccataggaaaggatatcttacaatatctttatggatgaatgcacacttcagtttaccttattgcagctaaaagtaagtgtaccccctgtcaagagagcatcccgttttacttggtttggctcattgacaaagtaagcaagctcctggtacaatttgagagccctgaaagcagcaatggggattctactatagctgtctagtgtaggaagattttcttggtcaagtttttgttgggggaaagaacagtccaaacctttgtgagctgtgtgttctcatcccagctacacgcacctgactgtatagaactttttgcagtttggccttctttggagatagcagtgtgtttttacgtgtggactaaagcaaaaatgaaaaactaggcacgtgccagtagaccaaatcagcctcctagcagagcacattgacattgtacaactttacagcctctgtcattggggtctggtttcaatttacttcatttcttaagagtttaaactggtttttataatttttccttatttctttgagtatcttggtttcacttatttgttcttttctatgtcttcttagatctaaaggaatgaagaattttaggatttgaagtgtcttaagtaatcatttagtctaaacctctcatttacagataagaaaacaagctcagagagatgtggtgacttgctcaaatagtgacagaacttcctcggccatatggaggggtcatataatacccttgtgtcttcagtttgaggtacctcccataattttaaggggagagcttgtttcatatccatatcccactgtattcctgctaatctgctaatgcagtaaattggaggaaaactgttaccaggataacctgtaatgggcaaggagccacaaagaagaaaacatttcttttaatttttaaacttggtttgaaaggtatccaaatatatcttgtgagttgctcacttctgatgtctcccagatgaatgatagactgggagaagatgaatccttgctaatgaaattatatagcttcctcctaaacgattcccctttgaatccactacttgccagtttcttcagcaaggtgctaagtattcttatcagcagaaaaccagaacagattgtggatttcttaaagaagaagcatgattttgtagaccttattataaagcacataggaacttctgctatcatggatttgttgctcaggctcctgacgtgtatcgaacctccacagcccaggcaagatgtgctgaattggttaaatgaggagaaaattatccagaggcttgtggaaatagttcatccatcgcaagaagaagatgtaagttcacttgtgtgactgtaaacttgattagaaaaaaaaaacaaaaaactgtttattgggcacagagcatacttatattaaatgtgaacatgatcagagcatacagggagaatagcagcgatctagtgttcttaaagttgatacttttctaaacaatattacattttgccaatactcagaaaatttccagaagtgtacaacagcaggcccttgttatagcaccatctcctttctagagcc

SEQ ID NO: 422922 - DNA, 296 bp, Homo sapiens
ccttatttctttgagtatcttggtttcacttatttgttcttttctatgtcttcttagatctaaaggaatgaagaattttaggatttgaagtgtcttaagtaatcatttagtctaaacctctcatttacagataagaaaacaagctcagagagatgtggtgacttgctcaaatagtgacagaacttcctcggccatatggaggggtcatataatacccttgtgtcttcagtttgaggtacctcccataattttaaggggtatgtggctttaattacattactactgtttgaatgaag

SEQ ID NO: 422923 - DNA, 453 bp, Homo sapiens
tctgtttgttttttatttatagagattttgatgatagtgtaaatatcttaaatttggaaactttcataaatacggtttctgtgagctgatagtaattaatgcttcctacacttttattttgtttttttacagtgtttcttttgatcgagtatcagacatcaactttactctcaatacaaatgaaagtgtaagtataaactctgttgtgagcagtgtggcacatgagaggttaaaaattgggtgagtccctgtgtggatgccacatgctgggacccctgtgctctagagccctaatcctaaattggtgttacatacttcactctgtcccacggcctacctggcacccgtgggcatgtgatttttgcagccctggtttatgacttggtggagctaataagaccagggtcacttgtgattgcagcgtagacacttgacttcaaagagaaggctgca

SEQ ID NO: 422924 - DNA, 2385 bp, Homo sapiens
gcctgcttgatacgtccgccattttgggcgcttcgctgatggtgtcggtgagcgcgtttcccgcctgagcgcaactagcggcgggtcgtgggcacctccaggagagcttgtttcatatccatatcccactgtattcctgctaatctgctaatgcagtaaattggaggaaaactgttaccaggataacctgtaatgggcaaggagccacaaagaagaaaacatttcttttaatttttaaacttggtttgaaagaccagcatgttttggaaatttgatcttcactcatcatcccacatagacacacttctagaaagagaagatgtaacactgaaggagttaatggatgaggaagatgttttacaggaatgtaaagctcagaaccgcaaacttatagagtttctgttaaaagcagaatgtctcgaagatttagtctcattcattatagaagaaccacctcaagacatggatgaaaagatcagatacaagtatccaaatatatcttgtgagttgctcacttctgatgtctcccagatgaatgatagactgggagaagatgaatccttgctaatgaaattatatagcttcctcctaaacgattcccctttgaatccactacttgccagtttcttcagcaaggtgctaagtattcttatcagcagaaaaccagaacagattgtggatttcttaaagaagaagcatgattttgtagaccttattataaagcacataggaacttctgctatcatggatttgttgctcaggctcctgacgtgtatcgaacctccacagcccaggcaagatgtgctgaattggttaaatgaggagaaaattatccagaggcttgtggaaatagttcatccatcgcaagaagaagatcgacattcaaatgcatcacaatcactttgtgaaattgttcgcctgagcagagaccagatgttacaaattcagaacagtacagagcccgaccccctgcttgccactctagaaaagcaagaaattatagagcagcttctatcaaatattttccacaaggagaaaaatgagtcagccatagtcagtgcaatccagatattgctgactttacttgagacacgacgaccaacatttgaaggccatatagagatctgcccaccaggcatgagccattcagcttgttcagtaaacaagagtgttctagaagccatcagaggaagacttggatcttttcatgaactcctgctggagccacccaagaaaagtgtgatgaagaccacatggggtgtgctggatcctcctgtggggaatacccggttgaatgtcattaggttgatatccagcctgcttcaaaccaataccagcagtataaatggggaccttatggagctgaatagcattggagtcatattgaacatgttcttcaagtatacatggaataactttttgcatacacaagtggaaatttgtattgcactgattcttgcaagtccttttgaaaacacagaaaatgccacaattaccgatcaagactccactggtgataatttgttattaaaacatcttttccaaaaatgtcaattaatagaacgaatacttgaagcctgggaaatgaatgagaagaaacaggctgagggaggaagacggcatggttacatgggacacctaacgaggatagctaactgtatcgtgcacagcactgacaagggccccaacagtgcattagtgcagcagcttatcaaagatcttcccgacgaagtcagggaacgatgggagacgttctgcacaagctccttaggagaaactaacaagaggaacacggtagatctagttacaacctgccatattcattcatccagtgatgatgaaattgactttaaagaaacgggtttctcacaggattcttctttgcagcaagtgagtcacgcctaaagctttgctttttgtttttattttaaatgcttagtttagttgccttttatgaatcagcttcagagtcagattatgtattagaatgtgatttggggttacttattagttagaccaaagcatttaaaataggaagtgctgggtaaatgaaagatagatttgtattggttatgtttcaagggattgttccatccctgataacagtgatgagtcaagtacattttcagaagatttgaatgaactgaatagttaagaaggcatctcacacatgcttgttacacagacctttacaatagttgagttgttgcttaaagatttgtgtagtagagatctgctggtaaaaataatagaaataagacgtttaaaatgtaagtaaaagtaaactctcacgaatacccctgatgtaagttctattatagttacatctaaagtaaatttttagttgaagtaattcattgcaacccctctctgcctgcccctgaa

SEQ ID NO: 422925 - DNA, 3788 bp, Homo sapiens
tcctccctctctctcacacacacccccgcttgggcctcctctctctctccggctccattttctccgccgccgggggccggggtctcctgtggggggcccagccggtatcccaggtctcccttcagtgccggggtgaacccccgggggagccgggagccgggggcagacgggcgggggttggggcggagggagcagcggccccagcgagtttggggggagaagtaaccaggcggggggaggggcggagcagggagggggcctcagggcccccccccagctatggacgaacggctactggggccgccccctccaggcgggggccgggggggcctgggattggtgagtggggagcctgggggccctggcgagcctcccggtggcggagaccccggtgggggtagcgggggggtcccgggaggccgagggaagcaagacatcggggacattctgcagcagataatgaccatcaccgaccagagcctggacgaggcccaggccaagaaacacgccctaaactgccaccgaatgaagcctgctctctttagcgtcctgtgtgaaatcaaggagaaaactggcctcagcattcggagctcccaggaggaggagccggtggacccacagctgatgcgcttggacaacatgcttctggcagagggtgtggctgggcccgagaaagggggcggctcagcagcagcagctgcagccgctgcagcctctggtggtggtgtgtcccctgacaactccatcgaacactcggactatcgcagcaaacttgcccagatccgtcacatataccactcggagctggagaagtatgagcaggcatgtaatgagttcacgacccatgtcatgaacctgctgagggagcagagccgcaccaggcccgtggcccccaaagagatggaacgcatggtgagcatcatccatcgaaagttcagcgccatccagatgcagctgaagcagagcacctgcgaggctgtgatgatcctgcgctcccgtttcctggatgccagacgaaagcgccgtaacttcagcaaacaggccactgaggtcctaaatgagtatttctactcccacctgagtaacccatatcctagtgaggaggccaaggaggagcttgccaagaagtgtggcatcaccgtgtctcaggtctccaactggtttggcaacaagaggattcgctataagaaaaacatcggaaagttccaagaggaggcaaacatctatgctgtcaagaccgccgtgtcagtcacccaggggggccacagccgcaccagctccccgacacccccttcctctgcaggctctggcggctctttcaatctctcaggatctggagacatgtttctggggatgcctgggctcaacggagattcctattctgcttcccaggtggaatcactccgacactcgatggggccagggggctatggggataacctcgggggaggccagatgtacagcccacgggaaatgagggcaaatggcagctggcaagaggctgtgaccccctcttcagtgacatccccaacggagggaccagggagtgttcactctgatacctccaactgatcttgcccctcagggtcacaggggtgggggctctcacaaggcgacttgaagaggacgcaggcttccagaggacaaaccccaatacaggagaagcacaagacagagaagggccaatggggtcatcccctccctaacgagactctctgtgctgggggtgctaattacatggcaggaagaatggggcctctaaggggagtgtggggtctgtctctcccttttttccatctttttcctctctcgctttctttcttacacagaaacatacacataccgagaaacctatttctcagacccctttttctcctctgtctttctctctccctctcccacacctcacacacacatactcccacttgcaactattctgtttctctcctgggctcccccactttcccttccccaccccacttgtatgctctggaatctgtggagacgccagccctgcccaatcagagatgccaaaaatggggacatgacttctggacagaggacatgggccacgcccccatgcatccccacccccgcccctccggacggcttacttacctcatacgcagctcatcttaaaccaatagaatcgctcggtggacgagagtgtctgactcagatatctacctcggagggagtttctgctactttagggaattattgactgggctttggggttgaacttttttttttttaaagaaagaaaaagaaaccctgggatccatctgttttttttgttgttgttgttgtttttgttgttgttggtggtggtggtggtggtggttcttaatttttaatttagtttggggaagtagcttgtttttttttttataaatatgttgatttcttgtcttttttttttatttcttactttcccatattaggggtgatagccaaaggggttctggtaagagaaagggggacaaacagaactggtaaagaggcccccctggctccaggcctgtccatcaggaagtaaattttacagggcaccaagctttgccccctaaaatcccttaggtgttctttgttcatgcaggcaggtttctgccgcatttgatgtggaggcagtgaagggcttgccctgctggcctctcatcccccttcttcccacaacccttgggcagggctggactcagtaattttgaggaaattgaagatgccatcttcccctgtgagtgacatgtctttaattttttaaaaaactactatttgaaaattggagggggaagaatgggaagggagttattgccaaatatgttaaatatgggttggggtgcttgtatatgtatcttcctcaatttccccataaatgaggtatctttttgtcacaccaaaatcaaggggtagggagagggaggaggttgcaaaaagccagatgtgggggaaaagtaacatcaacactgtcccatcctcagccctgaactagctaccatctgatcccctcagacattctcaggattttacaagactgtcagagtggggaacccctcccattaaagatccgggcaggactggggacaggttggaagtgtgatgggtgggggggtgggaggcatgggccgggggcagttctctcctcacttgtaaacttgtgtagtttcacagaaaaaaaacaaaatgcagttttaaataaagaaatttcttttttccctgggtttagttgagaatttttttcaaaaaacatgagaaaccccagaaaaaaaatgattttctttcacgaagttccaaacaggtttctctcctgttccccagccttgccttcatgatgcaggcccaattgcacccttgcagacaacagtctggcctgaaccctattgatgcaactttgcgcaatcaagatggggctccagtgggtcaccaggcagccctgatggactgatggaataaataggatcgggggctctgagggaatgagaccctagagggtacactccccatcccccagggaagtgactgtacccagaggctggtagtacccaggggtggggtgataattatttctctagtacctgaaggactcttgtcccaaaggcatgaattcctagcattccctgtgacaagacgactgaaagatgggggctggagagagggtgcaggccccacctagggcggaggccacagcagggagaggggcagacagagccaggaccctggaaggaagcaggatggcagccggaacagcagttggagcctgggtgctggtcctcagtctgtggggtgagcca

SEQ ID NO: 422926 - DNA, 3154 bp, Homo sapiens
  misc_feature (3080)..(3080): n is a, c, g, or t
  misc_feature (3088)..(3088): n is a, c, g, or t
  misc_feature (3146)..(3146): n is a, c, g, or t
tcctccctctctctcacacacacccccgcttgggcctcctctctctctccggctccattttctccgccgccgggggccggggtctcctgtggggggcccagccggtatcccaggtctcccttcagtgccggggtgaacccccgggggagccgggagccgggggcagacgggcgggggttggggcggagggagcagcggccccagcgagtttggggggagaagtaaccaggcggggggaggggcggagcagggagggggcctcagggcccccccccagctatggacgaacggctactggggccgccccctccaggcgggggccgggggggcctgggattggtgagtggggagcctgggggccctggcgagcctcccggtggcggagaccccggtgggggtagcgggggggtcccgggaggccgagggaagcaagacatcggggacattctgcagcagataatgaccatcaccgaccagagcctggacgaggcccaggccaagaaacacgccctaaactgccaccgaatgaagcctgctctctttagcgtcctgtgtgaaatcaaggagaaaactggcctcagcattcggagctcccaggaggaggagccggtggacccacagctgatgcgcttggacaacatgcttctggcagagggtgtggctgggcccgagaaagggggcggctcagcagcagcagctgcagccgctgcagcctctggtggtggtgtgtcccctgacaactccatcgaacactcggactatcgcagcaaacttgcccagatccgtcacatataccactcggagctggagaagtatgagcaggcatgtaatgagttcacgacccatgtcatgaacctgctgagggagcagagccgcaccaggcccgtggcccccaaagagatggaacgcatggtgagcatcatccatcgaaagttcagcgccatccagatgcagctgaagcagagcacctgcgaggctgtgatgatcctgcgctcccgtttcctggatgccagacgaaagcgccgtaacttcagcaaacaggccactgaggtcctaaatgagtatttctactcccacctgagtaacccatatcctagtgaggaggccaaggaggagcttgccaagaagtgtggcatcaccgtgtctcaggtctccaactggtttggcaacaagaggattcgctataagaaaaacatcggaaagttccaagaggaggcaaacatctatgctgtcaagaccgccgtgtcagtcacccaggggggccacagccgcaccagctccccgacacccccttcctctgcaggctctggcggctctttcaatctctcaggatctggagacatgtttctggggatgcctgggctcaacggagattcctattctgcttcccaggtggaatcactccgacactcgatggggccagggggctatggggataacctcgggggaggccagatgtacagcccacgggaaatgagggcaaatggcagctggcaagaggctgtgaccccctcttcagtgacatccccaacggagggaccagggagtgttcactctgatacctccaactgatcttgcccctcagggtcacaggggtgggggctctcacaaggcgacttgaagaggacgcaggcttccagaggacaaaccccaatacaggagaagcacaagacagagaagggccaatggggtcatcccctccctaacgagactctctgtgctgggggtgctaattacatggcaggaagaatggggcctctaaggggagtgtggggtctgtctctcccttttttccatctttttcctctctcgctttctttcttacacagaaacatacacataccgagaaacctatttctcagacccctttttctcctctgtctttctctctccctctcccacacctcacacacacatactcccacttgcaactattctgtttctctcctgggctcccccactttcccttccccaccccacttgtatgctctggaatctgtggagacgccagccctgcccaatcagagatgccaaaaatggggacatgacttctggacagaggacatgggccacgcccccatgcatccccacccccgcccctccggacggcttacttacctcatacgcagctcatcttaaaccaatagaatcgctcggtggacgagagtgtctgactcagatatctacctcggagggagtttctgctactttagggaattattgactgggctttggggttgaacttttttttttttaaagaaagaaaaagaaaccctgggatccatctgttttttttgttgttgttgttgtttttgttgttgttggtggtggtggtggtggtggttcttaatttttaatttagtttggggaagtagcttgtttttttttttataaatatgttgatttcttgtcttttttttttatttcttactttcccatattaggggtgatagccaaaggggttctggtaagagaaagggggacaaacagaactggtaaagaggcccccctggctccaggcctgtccatcaggaagtaaattttacagggcaccaagctttgccccctaaaatcccttaggtgttctttgttcatgcaggcaggtttctgccgcatttgatgtggaggcagtgaagggcttgccctgctggcctctcatcccccttcttcccacaacccttgggcagggctggactcagtaattttgaggaaattgaagatgccatcttcccctgtgagtgacatgtctttaattttttaaaaaactactatttgaaaattggagggggaagaatgggaagggagttattgccaaatatgttaaatatgggttggggtgcttgtatatgtatcttcctcccacacctcacacacacatactcccacttgcaactattctgtttctctcctgggctcccccactttcccttccccaccccacttgtatgctctggaatctgtggagacgccagccctgcccaatcagagatgccaaaaatggggacatgacttctggacagaggacatgggccacgccccaatgcatccccaccccccgcccctccggacggcttacttancctcatanggcagctcatcttaaaccaatagaatcgctcgggtgggacgagagtgtctgactcagnatatctat

SEQ ID NO: 422927 - DNA, 3649 bp, Homo sapiens
tcctccctctctctcacacacacccccgcttgggcctcctctctctctccggctccattttctccgccgccgggggccggggtctcctgtggggggcccagccggtatcccaggtctcccttcagtgccggggtgaacccccgggggagccgggagccgggggcagacgggcgggggttggggcggagggagcagcggccccagcgagtttggggggagaagtaaccaggcggggggaggggcggagcagggagggggcctcagggcccccccccagctatggacgaacggctactggggccgccccctccaggcgggggccgggggggcctgggattggtgagtggggagcctgggggccctggcgagcctcccggtggcggagaccccggtgggggtagcgggggggtcccgggaggccgagggaagcaagacatcggggacattctgcagcagataatgaccatcaccgaccagagcctggacgaggcccaggccaagaaacacgccctaaactgccaccgaatgaagcctgctctctttagcgtcctgtgtgaaatcaaggagaaaactggtatgtgggccccccccggattgctcaactctgggaacagaaccctgttcattatagggctagagtgtgacaacttggggccctgaggaaagtaaggagtcagggggactggggaaggaaccaaagcctgggaacttggctctccaggaagcaccaggaggactgagcactgggtattggggtctctgggtccctaagtccactcgcctgcatgctaggcctcagcattcggagctcccaggaggaggagccggtggacccacagctgatgcgcttggacaacatgcttctggcagagggtgtggctgggcccgagaaagggggcggctcagcagcagcagctgcagccgctgcagcctctggtggtggtgtgtcccctgacaactccatcgaacactcggactatcgcagcaaacttgcccagatccgtcacatataccactcggagctggagaagtatgagcaggcatgtaatgagttcacgacccatgtcatgaacctgctgagggagcagagccgcaccaggcccgtggcccccaaagagatggaacgcatggtgagcatcatccatcgaaagttcagcgccatccagatgcagctgaagcagagcacctgcgaggctgtgatgatcctgcgctcccgtttcctggatgccagacgaaagcgccgtaacttcagcaaacaggccactgaggtcctaaatgagtatttctactcccacctgagtaacccatatcctagtgaggaggccaaggaggagcttgccaagaagtgtggcatcaccgtgtctcaggtctccaactggtttggcaacaagaggattcgctataagaaaaacatcggaaagttccaagaggaggcaaacatctatgctgtcaagaccgccgtgtcagtcacccaggggggccacagccgcaccagctccccgacacccccttcctctgcaggctctggcggctctttcaatctctcaggatctggagacatgtttctggggatgcctgggctcaacggagattcctattctgcttcccaggtggaatcactccgacactcgatggggccagggggctatggggataacctcgggggaggccagatgtacagcccacgggaaatgagggcaaatggcagctggcaagaggctgtgaccccctcttcagtgacatccccaacggagggaccagggagtgttcactctgatacctccaactgatcttgcccctcagggtcacaggggtgggggctctcacaaggcgacttgaagaggacgcaggcttccagaggacaaaccccaatacaggagaagcacaagacagagaagggccaatggggtcatcccctccctaacgagactctctgtgctgggggtgctaattacatggcaggaagaatggggcctctaaggggagtgtggggtctgtctctcccttttttccatctttttcctctctcgctttctttcttacacagaaacatacacataccgagaaacctatttctcagacccctttttctcctctgtctttctctctccctctcccacacctcacacacacatactcccacttgcaactattctgtttctctcctgggctcccccactttcccttccccaccccacttgtatgctctggaatctgtggagacgccagccctgcccaatcagagatgccaaaaatggggacatgacttctggacagaggacatgggccacgcccccatgcatccccacccccgcccctccggacggcttacttacctcatacgcagctcatcttaaaccaatagaatcgctcggtggacgagagtgtctgactcagatatctacctcggagggagtttctgctactttagggaattattgactgggctttggggttgaacttttttttttttaaagaaagaaaaagaaaccctgggatccatctgttttttttgttgttgttgttgtttttgttgttgttggtggtggtggtggtggtggttcttaatttttaatttagtttggggaagtagcttgtttttttttttataaatatgttgatttcttgtcttttttttttatttcttactttcccatattaggggtgatagccaaaggggttctggtaagagaaagggggacaaacagaactggtaaagaggcccccctggctccaggcctgtccatcaggaagtaaattttacagggcaccaagctttgccccctaaaatcccttaggtgttctttgttcatgcaggcaggtttctgccgcatttgatgtggaggcagtgaagggcttgccctgctggcctctcatcccccttcttcccacaacccttgggcagggctggactcagtaattttgaggaaattgaagatgccatcttcccctgtgagtgacatgtctttaattttttaaaaaactactatttgaaaattggagggggaagaatgggaagggagttattgccaaatatgttaaatatgggttggggtgcttgtatatgtatcttcctcaatttccccataaatgaggtatctttttgtcacaccaaaatcaaggggtagggagagggaggaggttgcaaaaagccagatgtgggggaaaagtaacatcaacactgtcccatcctcagccctgaactagctaccatctgatcccctcagacattctcaggattttacaagactgtcagagtggggaacccctcccattaaagatccgggcaggactggggacaggttggaagtgtgatgggtgggggggtgggaggcatgggccgggggcagttctctcctcacttgtaaacttgtgtagtttcacagaaaaaaaacaaaatgcagttttaaataaagaaatttcttttttccctggaaaaaatacgacaaaaaggggggggggttaaatattgctacgaggggccagttaaggggtaccagtatatgtacaaggaccctaggggggatattacgataggccggccggtacaagtaggagggaacggactgggacttgagaccaatcggggatatggcatcccggtagcagggtataggtagtacggataggtcgagagattataaggtac

SEQ ID NO: 422928 - DNA, 3300 bp, Homo sapiens
tcctccctctctctcacacacacccccgcttgggcctcctctctctctccggctccattttctccgccgccgggggccggggtctcctgtggggggcccagccggtatcccaggtctcccttcagtgccggggtgaacccccgggggagccgggagccgggggcagacgggcgggggttggggcggagggagcagcggccccagcgagtttggggggagaagtaaccaggcggggggaggggcggagcagggagggggcctcagggcccccccccagctatggacgaacggctactggggccgccccctccaggcgggggccgggggggcctgggattggtgagtggggagcctgggggccctggcgagcctcccggtggcggagaccccggtgggggtagcgggggggtcccgggaggccgagggaagcaagacatcggggacattctgcagcagataatgaccatcaccgaccagagcctggacgaggcccaggccaagaaacacgccctaaactgccaccgaatgaagcctgctctctttagcgtcctgtgtgaaatcaaggagaaaactggcctcagcattcggagctcccaggaggaggagccggtggacccacagctgatgcgcttggacaacatgcttctggcagagggtgtggctgggcccgagaaagggggcggctcagcagcagcagctgcagccgctgcagcctctggtggtggtgtgtcccctgacaactccatcgaacactcggactatcgcagcaaacttgcccagatccgtcacatataccactcggagctggagaagtatgagcaggcatgtaatgagttcacgacccatgtcatgaacctgctgagggagcagagccgcaccaggcccgtggcccccaaagagatggaacgcatggtgagcatcatccatcgaaagttcagcgccatccagatgcagctgaagcagagcacctgcgaggctgtgatgatcctgcgctcccgtttcctggatgccagacgaaagcgccgtaacttcagcaaacaggccactgaggtcctaaatgagtatttctactcccacctgagtaacccatatcctagtgaggaggccaaggaggagcttgccaagaagtgtggcatcaccgtgtctcaggtctccaactggtttggcaacaagaggattcgctataagaaaaacatcggaaagttccaagaggaggcaaacatctatgctgtcaagaccgccgtgtcagtcacccaggggggccacagccgcaccagctccccgacacccccttcctctgcaggctctggcggctctttcaatctctcaggatctggagacatgtttctggggatgcctgggctcaacggagattcctattctgcttcccaggtggaatcactccgacactcgatggggccagggggctatggggataacctcgggggaggccagatgtacagcccacgggaaatgagggcaaatggcagctggcaagaggctgtgaccccctcttcagtgacatccccaacggagggaccagggagtgttcactctgatacctccaactgatcttgcccctcagggtcacaggggtgggggctctcacaaggcgacttgaagaggacgcaggcttccagaggacaaaccccaatacaggagaagcacaagacagagaagggccaatggggtcatcccctccctaacgagactctctgtgctgggggtgctaattacatggcaggaagaatggggcctctaaggggagtgtggggtctgtctctcccttttttccatctttttcctctctcgctttctttcttacacagaaacatacacataccgagaaacctatttctcagacccctttttctcctctgtctttctctctccctctcccacacctcacacacacatactcccacttgcaactattctgtttctctcctgggctcccccactttcccttccccaccccacttgtatgctctggaatctgtggagacgccagccctgcccaatcagagatgccaaaaatggggacatgacttctggacagaggacatgggccacgcccccatgcatccccacccccgcccctccggacggcttacttacctcatacgcagctcatcttaaaccaatagaatcgctcggtggacgagagtgtctgactcagatatctacctcggagggagtttctgctactttagggaattattgactgggctttggggttgaacttttttttttttaaagaaagaaaaagaaaccctgggatccatctgttttttttgttgttgttgttgtttttgttgttgttggtggtggtggtggtggtggttcttaatttttaatttagtttggggaagtagcttgtttttttttttataaatatgttgatttcttgtcttttttttttatttcttactttcccatattaggggtgatagccaaaggggttctggtaagagaaagggggacaaacagaactggtaaagaggcccccctggctccaggcctgtccatcaggaagtaaattttacagggcaccaagctttgccccctaaaatcccttaggtgttctttgttcatgcaggcaggtttctgccgcatttgatgtggaggcatgggccgggggcagttctctcctcacttgtaaacttgtgtagtttcacagaaaaaaaacaaaatgcagttttaaataaagaaatttcttttttccctgggtttagttgagaatttttttcaaaaaacatgagaaaccccagaaaaaaaatgattttctttcacgaagttccaaacaggtttctctcctgttccccagccttgccttcatgatgcaggcccaattgcacccttgcagacaacagtctggcctgaaccctattgatgcaactttgcgcaatcaagatggggctccagtgggtcaccaggcagccctgatggactgatggaataaataggatcgggggctctgagggaatgagaccctagagggtacactccccatcccccagggaagtgactgtacccagaggctggtagtacccaggggtggggtgataattatttctctagtacctgaaggactcttgtcccaaaggcatgaattcctagcattccctgtgacaagacgactgaaagatgggggctggagagagggtgcaggccccacctagggcggaggccacagcagggagaggggcagacagagccaggaccctggaaggaagcaggatggcagccggaacagcagttggagcctgggtgctggtcctcagtctgtggggtgagcca

SEQ ID NO: 422929 - DNA, 3038 bp, Homo sapiens
tcctccctctctctcacacacacccccgcttgggcctcctctctctctccggctccattttctccgccgccgggggccggggtctcctgtggggggcccagccggtatcccaggtctcccttcagtgccggggtgaacccccgggggagccgggagccgggggcagacgggcgggggttggggcggagggagcagcggccccagcgagtttggggggagaagtaaccaggcggggggaggggcggagcagggagggggcctcagggcccccccccagctatggacgaacggtcagcagcagcagctgcagccgctgcagcctctggtggtggtgtgtcccctgacaactccatcgaacactcggactatcgcagcaaacttgcccagatccgtcacatataccactcggagctggagaagtatgagcaggcatgtaatgagttcacgacccatgtcatgaacctgctgagggagcagagccgcaccaggcccgtggcccccaaagagatggaacgcatggtgagcatcatccatcgaaagttcagcgccatccagatgcagctgaagcagagcacctgcgaggctgtgatgatcctgcgctcccgtttcctggatgccagacgaaagcgccgtaacttcagcaaacaggccactgaggtcctaaatgagtatttctactcccacctgagtaacccatatcctagtgaggaggccaaggaggagcttgccaagaagtgtggcatcaccgtgtctcaggtctccaactggtttggcaacaagaggattcgctataagaaaaacatcggaaagttccaagaggaggcaaacatctatgctgtcaagaccgccgtgtcagtcacccaggggggccacagccgcaccagctccccgacacccccttcctctgcaggctctggcggctctttcaatctctcaggatctggagacatgtttctggggatgcctgggctcaacggagattcctattctgcttcccaggtggaatcactccgacactcgatggggccagggggctatggggataacctcgggggaggccagatgtacagcccacgggaaatgagggcaaatggcagctggcaagaggctgtgaccccctcttcagtgacatccccaacggagggaccagggagtgttcactctgatacctccaactgatcttgcccctcagggtcacaggggtgggggctctcacaaggcgacttgaagaggacgcaggcttccagaggacaaaccccaatacaggagaagcacaagacagagaagggccaatggggtcatcccctccctaacgagactctctgtgctgggggtgctaattacatggcaggaagaatggggcctctaaggggagtgtggggtctgtctctcccttttttccatctttttcctctctcgctttctttcttacacagaaacatacacataccgagaaacctatttctcagacccctttttctcctctgtctttctctctccctctcccacacctcacacacacatactcccacttgcaactattctgtttctctcctgggctcccccactttcccttccccaccccacttgtatgctctggaatctgtggagacgccagccctgcccaatcagagatgccaaaaatggggacatgacttctggacagaggacatgggccacgcccccatgcatccccacccccgcccctccggacggcttacttacctcatacgcagctcatcttaaaccaatagaatcgctcggtggacgagagtgtctgactcagatatctacctcggagggagtttctgctactttagggaattattgactgggctttggggttgaacttttttttttttaaagaaagaaaaagaaaccctgggatccatctgttttttttgttgttgttgttgtttttgttgttgttggtggtggtggtggtggtggttcttaatttttaatttagtttggggaagtagcttgtttttttttttataaatatgttgatttcttgtcttttttttttatttcttactttcccatattaggggtgatagccaaaggggttctggtaagagaaagggggacaaacagaactggtaaagaggcccccctggctccaggcctgtccatcaggaagtaaattttacagggcaccaagctttgccccctaaaatcccttaggtgttctttgttcatgcaggcaggtttctgccgcatttgatgtggaggcagtgaagggcttgccctgctggcctctcatcccccttcttcccacaacccttgggcagggctggactcagtaattttgaggaaattgaagatgccatcttcccctgtgagtgacatgtctttaattttttaaaaaactactatttgaaaattggagggggaagaatgggaagggagttattgccaaatatgttaaatatgggttggggtgcttgtatatgtatcttcctcaatttccccataaatgaggtatctttttgtcacaccaaaatcaaggggtagggagagggaggaggttgcaaaaagccagatgtgggggaaaagtaacatcaacactgtcccatcctcagccctgaactagctaccatctgatcccctcagacattctcaggattttacaagactgtcagagtggggaacccctcccattaaagatccgggcaggactggggacaggttggaagtgtgatgggtgggggggtgggaggcatgggccgggggcagttctctcctcacttgtaaacttgtgtagtttcacagaaaaaaaacaaaatgcagttttaaataaagaaatttcttttttccctggaaaaaatacgacaaaaaggggggggggttaaatattgctacgaggggccagttaaggggtaccagtatatgtacaaggaccctaggggggatattacgataggccggccggtacaagtaggagggaacggactgggacttgagaccaatcggggatatggcatcccggtagcagggtataggtagtacggataggtcgagagattataaggtac

SEQ ID NO: 422930 - DNA, 2295 bp, Homo sapiens
tcctccctctctctcacacacacccccgcttgggcctcctctctctctccggctccattttctccgccgccgggggccggggtctcctgtggggggcccagccggtatcccaggtctcccttcagtgccggggtgaacccccgggggagccgggagccgggggcagacgggcgggggttggggcggagggagcagcggccccagcgagtttggggggagaagtaaccaggcggggggaggggcggagcagggagggggcctcagggcccccccccagctatggacgaacggctactggggccgccccctccaggcgggggccgggggggcctgggattggtgagtggggagcctgggggccctggcgagcctcccggtggcggagaccccggtgggggtagcgggggggtcccgggaggccgagggaagcaagacatcggggacattctgcagcagataatgaccatcaccgaccagagcctggacgaggcccaggccaagaaacacgccctaaactgccaccgaatgaagcctgctctctttagcgtcctgtgtgaaatcaaggagaaaactggcctcagcattcggagctcccaggaggaggagccggtggacccacagctgatgcgcttggacaacatgcttctggcagagggtgtggctgggcccgagaaagggggcggctcagcagcagcagctgcagccgctgcagcctctggtggtggtgtgtcccctgacaactccatcgaacactcggactatcgcagcaaacttgcccagatccgtcacatataccactcggagctggagaagtatgagcaggcatgtaatgagttcacgacccatgtcatgaacctgctgagggagcagagccgcaccaggcccgtggcccccaaagagatggaacgcatggtgagcatcatccatcgaaagttcagcgccatccagatgcagctgaagcagagcacctgcgaggctgtgatgatcctgcgctcccgtttcctggatgccagacgaaagcgccgtaacttcagcaaacaggccactgaggtcctaaatgagtatttctactcccacctgagtaacccatatcctagtgaggaggccaaggaggagcttgccaagaagtgtggcatcaccgtgtctcaggtctccaactggtttggcaacaagaggattcgctataagaaaaacatcggaaagttccaagaggaggcaaacatctatgctgtcaagaccgccgtgtcagtcacccaggggggccacagccgcaccagctccccgacacccccttcctctgcaggctctggcggctctttcaatctctcaggatctggagacatgtttctggggatgcctgggctcaacggagattcctattctgcttcccaggtggaatcactccgacactcgatggggccagggggctatggggataacctcgggggaggccagatgtacagcccacgggaaatgagggcaaatggcagctggcaagaggctgtgaccccctcttcagtgacatccccaacggagggaccagggagtgttcactctgatacctccaactgatcttgcccctcagggtcacaggggtgggggctctcacaaggcgacttgaagaggacgcaggcttccagaggacaaaccccaatacaggagaagcacaagacagagaagggccaatggggtcatcccctccctaacgagactctctgtgctgggggtgctaattacatggcaggaagaatggggcctctaaggggagtgtggggtctgtctctcccttttttccatctttttcctctctcgctttctttcttacacagaaacatacacataccgagaaacctatttctcagacccctttttctcctctgtctttctctctccctctcccacacctcacacacacatactcccacttgcaactattctgtttctctcctgggctcccccactttcccttccccaccccacttgtatgctctggaatctgtggagacgccagccctgcccaatcagagatgccaaaaatggggacatgacttctggacagaggacatgggccacgcccccatgcatccccacccccgcccctccggacggcttacttacctcatacgcagctcatcttaaaccaatagaatcgctcggtggacgagagtgtctgactcagatatctacctcggagggagtttctgctactttagggaattattgactgggctttggggttgaacttttttttttttttcttttctttcttgtcttttttttttttttttttttttt

SEQ ID NO: 422931 - DNA, 1570 bp, Homo sapiens
  misc_feature (1324)..(1324): n is a, c, g, or t
tcctccctctctctcacacacacccccgcttgggcctcctctctctctccggctccattttctccgccgccgggggccggggtctcctgtggggggcccagccggtatcccaggtctcccttcagtgccggggtgaacccccgggggagccgggagccgggggcagacgggcgggggttggggcggagggagcagcggccccagcgagtttggggggagaagtaaccaggcggggggaggggcggagcagggagggggcctcagggcccccccccagctatggacgaacggctactggggccgccccctccaggcgggggccgggggggcctgggattggtgagtggggagcctgggggccctggcgagcctcccggtggcggagaccccggtgggggtagcgggggggtcccgggaggccgagggaagcaagacatcggggacattctgcagcagataatgaccatcaccgaccagagcctggacgaggcccaggccaagaaacacgccctaaactgccaccgaatgaagcctgctctctttagcgtcctgtgtgaaatcaaggagaaaactggcctcagcattcggagctcccaggaggaggagccggtggacccacagctgatgcgcttggacaacatgcttctggcagagggtgtggctgggcccgagaaagggggcggctcagcagcagcagctgcagccgctgcagcctctggtggtggtgtgtcccctgacaactccatcgaacactcggactatcgcagcaaacttgcccagatccgtcacatataccactcggagctggagaagtatgagcaggcatgtaatgagttcacgacccatgtcatgaacctgctgagggagcagagccgcaccaggcccgtggcccccaaagagatggaacgcatggtgagcatcatccatcgaaagttcagcgccatccagatgcagctgaagcagagcacctgcgaggctgtgatgatcctgcgctcccgtttcctggatgccagacgaaagcgccgtaacttcagcaaacaggccactgaggtcctaaatgagtatttctactcccacctgagtaacccatatcctagtgaggaggccaaggaggagcttgccaagaagtgtggcatcaccgtgtctcaggtctccaactggtttggcaacaagaggattcgctataagaaaaacatcggaaagttccaagaggaggcaaacatctatgctgtcaagaccgccgtgtcagtcacccaggggggccacagccgcaccagctccccgacacccccttcctctgcaggtggatcccactgtcaccccngctgactgttttgcacacttcctgcttttgttcccacttcctatctaggcaggatcatagcagagagggggccttttggggtgagagggaccgagctgagataggctggagatgtcaggggacagaggccattccagtgatcttagttctgcctttcttcccacgggtggccaaggaacagcctgctctttctgtgtgttggaatgttattttgtggataattggagtatagtagcatgtccccac

SEQ ID NO: 422932 - DNA, 974 bp, Homo sapiens
  misc_feature (922)..(922): n is a, c, g, or t
tcctccctctctctcacacacacccccgcttgggcctcctctctctctccggctccattttctccgccgccgggggccggggtctcctgtggggggcccagccggtatcccaggtctcccttcagtgccggggtgaacccccgggggagccgggagccgggggcagacgggcgggggttggggcggagggagcagcggccccagcgagtttggggggagaagtaaccaggcggggggaggggcggagcagggagggggcctcagggcccccccccagctatggacgaacggctactggggccgccccctccaggcgggggccgggggggcctgggattggtgagtggggagcctgggggccctggcgagcctcccggtggcggagaccccggtgggggtagcgggggggtcccgggaggccgagggaagcaagacatcggggacattctgcagcagataatgaccatcaccgaccagagcctggacgaggcccaggccaagtgagtgcccccactccgggaccccacacagacccagcaaaccccgttcacatgttctgaatcttctgggagccccccccaactccagggccctctccaggatccaacagctctcttctctccttattcctgggagcccatagaaaagtgatccctctcaaacctcccttcacccccaggccctgaaaccttcacagagggaacccccggtggcccggctccccactcctaaccttttgccgacccctgcagtctcctggaacagccccatccccgggagccccctctggctcccagactaagaaactgttcttgggctacgttatcttctcccctaactctccacccagccccctcattctctccagatgtggagacctccacaccctctccagagcccctaaagctcctacctctgaccncagcttctctctgattcccacaggccccatgcatcctccctgcctcactccc

SEQ ID NO: 422933 - DNA, 3431 bp, Homo sapiens
tcctccctctctctcacacacacccccgcttgggcctcctctctctctccggctccattttctccgccgccgggggccggggtctcctgtggggggcccagccggtatcccaggtctcccttcagtgccggggtgaacccccgggggagccgggagccgggggcagacgggcgggggttggggcggagggagcagcggccccagcgagtttggggggagaagtaaccaggcggggggaggggcggagcagggagggggcctcagggcccccccccagctatggacgaacggctactggggccgccccctccaggcgggggccgggggggcctgggattggtgagtggggagcctgggggccctggcgagcctcccggtggcggagaccccggtgggggtagcgggggggtcccgggaggccgagggaagcaagacatcggggacattctgcagcagataatgaccatcaccgaccagagcctggacgaggcccaggccaagaaacacgccctaaactgccaccgaatgaagcctgctctctttagcgtcctgtgtgaaatcaaggagaaaactggcctcagcattcggagctcccaggaggaggagccggtggacccacagctgatgcgcttggacaacatgcttctggcagagggtgtggctgggcccgagaaagggggcggctcagcagcagcagctgcagccgctgcagcctctggtggtggtgtgtcccctgacaactccatcgaacactcggactatcgcagcaaacttgcccagatccgtcacatataccactcggagctggagaagtatgagcaggcatgtaatgagttcacgacccatgtcatgaacctgctgagggagcagagccgcaccaggcccgtggcccccaaagagatggaacgcatggtgagcatcatccatcgaaagttcagcgccatccagatgcagctgaagcagagcacctgcgaggctgtgatgatcctgcgctcccgtttcctggatgccagacgaaagcgccgtaacttcagcaaacaggccactgaggtcctaaatgagtatttctactcccacctgagtaacccatatcctagtgaggaggccaaggaggagcttgccaagaagtgtggcatcaccgtgtctcaggtctccaactggtttggcaacaagaggattcgctataagaaaaacatcggaaagttccaagaggaggcaaacatctatgctgtcaagaccgccgtgtcagtcacccaggggggccacagccgcaccagctccccgacacccccttcctctgcaggctctggcggctctttcaatctctcaggatctggagacatgtttctggggatgcctgggctcaacggagattcctattctgcttcccaggtggaatcactccgacactcgatggggccagggggctatggggataacctcgggggaggccagatgtacagcccacgggaaatgagggcaaatggcagctggcaagaggctgtgaccccctcttcagtgacatccccaacggagggaccagggagtgttcactctgatacctccaactgatcttgcccctcagggtcacaggggtgggggctctcacaaggcgacttgaagaggacgcaggcttccagaggacaaaccccaatacaggagaagcacaagacagagaagggccaatggggtcatcccctccctaacgagactctctgtgctgggggtgctaattacatggcaggaagaatggggcctctaaggggagtgtggggtctgtctctcccttttttccatctttttcctctctcgctttctttcttacacagaaacatacacataccgagaaacctatttctcagacccctttttctcctctgtctttctctctccctctcccacacctcacacacacatactcccacttgcaactattctgtttctctcctgggctcccccactttcccttccccaccccacttgtatgctctggaatctgtggagacgccagccctgcccaatcagagatgccaaaaatggggacatgacttctggacagaggacatgggccacgcccccatgcatccccacccccgcccctccggacggcttacttacctcatacgcagctcatcttaaaccaatagaatcgctcggtggacgagagtgtctgactcagatatctacctcggagggagtttctgctactttagggaattattgactgggctttggggttgaacttttttttttttaaagaaagaaaaagaaaccctgggatccatctgttttttttgttgttgttgttgtttttgttgttgttggtggtggtggtggtggtggttcttaatttttaatttagtttggggaagtagcttgtttttttttttataaatatgttgatttcttgtcttttttttttatttcttactttcccatattaggggtgatagccaaaggggttctggtaagagaaagggggacaaacagaactggtaaagaggcccccctggctccaggcctgtccatcaggaagtaaattttacagggcaccaagctttgccccctaaaatcccttaggtgttctttgttcatgcaggcaggtttctgccgcatttgatgtggaggcagtgaagggcttgccctgctggcctctcatcccccttcttcccacaacccttgggcagggctggactcagtaattttgaggaaattgaagatgccatcttcccctgtgagtgacatgtctttaattttttaaaaaactactatttgaaaattggagggggaagaatgggaagggagttattgccaaatatgttaaatatgggttggggtgcttgtatatgtatcttcctcaatttccccataaatgaggtatctttttgtcacaccaaaatcaaggggtagggagagggaggaggttgcaaaaagccagatgtgggggaaaagtaacatcaacactgtcccatcctcagccctgaactagctaccatctgatcccctcagacattctcaggattttacaagactgtcagagtggggaacccctcccattaaagatccgggcaggactggggacaggttggaagtgtgatgggtgggggggtgggaggcatgggccgggggcagttctctcctcacttgtaaacttgtgtagtttcacagaaaaaaaacaaaatgcagttttaaataaagaaatttcttttttccctggaaaaaatacgacaaaaaggggggggggttaaatattgctacgaggggccagttaaggggtaccagtatatgtacaaggaccctaggggggatattacgataggccggccggtacaagtaggagggaacggactgggacttgagaccaatcggggatatggcatcccggtagcagggtataggtagtacggataggtcgagagattataaggtac

SEQ ID NO: 422934 - DNA, 3342 bp, Homo sapiens
tcctccctctctctcacacacacccccgcttgggcctcctctctctctccggctccattttctccgccgccgggggccggggtctcctgtggggggcccagccggtatcccaggtctcccttcagtgccggggtgaacccccgggggagccgggagccgggggcagacgggcgggggttggggcggagggagcagcggccccagcgagtttggggggagaagtaaccaggcggggggaggggcggagcagggagggggcctcagggcccccccccagctatggacgaacggctactggggccgccccctccaggcgggggccgggggggcctgggattggtgagtggggagcctgggggccctggcgagcctcccggtggcggagaccccggtgggggtagcgggggggtcccgggaggccgagggaagcaagacatcggggacattctgcagcagataatgaccatcaccgaccagagcctggacgaggcccaggccaagaaacacgccctaaactgccaccgaatgaagcctgctctctttagcgtcctgtgtgaaatcaaggagaaaactggcctcagcattcggagctcccaggaggaggagccggtggacccacagctgatgcgcttggacaacatgcttctggcagagggtgtggctgggcccgagaaagggggcggctcagcagcagcagctgcagccgctgcagcctctggtggtggtgtgtcccctgacaactccatcgaacactcggactatcgcagcaaacttgcccagatccgtcacatataccactcggagctggagaagtatgagcaggcatgtaatgagttcacgacccatgtcatgaacctgctgagggagcagagccgcaccaggcccgtggcccccaaagagatggaacgcatggtgagcatcatccatcgaaagttcagcgccatccagatgcagctgaagcagagcacctgcgaggctgtgatgatcctgcgctcccgtttcctggatgccagacgaaagcgccgtaacttcagcaaacaggccactgaggtcctaaatgagtatttctactcccacctgagtaacccatatcctagtgaggaggccaaggaggagcttgccaagaagtgtggcatcaccgtgtctcaggtctccaactggtttggcaacaagaggattcgctataagaaaaacatcggaaagttccaagaggaggcaaacatctatgctgtcaagaccgccgtgtcagtcacccaggggggccacagccgcaccagctccccgacacccccttcctctgcaggtggaatcactccgacactcgatggggccagggggctatggggataacctcgggggaggccagatgtacagcccacgggaaatgagggcaaatggcagctggcaagaggctgtgaccccctcttcagtgacatccccaacggagggaccagggagtgttcactctgatacctccaactgatcttgcccctcagggtcacaggggtgggggctctcacaaggcgacttgaagaggacgcaggcttccagaggacaaaccccaatacaggagaagcacaagacagagaagggccaatggggtcatcccctccctaacgagactctctgtgctgggggtgctaattacatggcaggaagaatggggcctctaaggggagtgtggggtctgtctctcccttttttccatctttttcctctctcgctttctttcttacacagaaacatacacataccgagaaacctatttctcagacccctttttctcctctgtctttctctctccctctcccacacctcacacacacatactcccacttgcaactattctgtttctctcctgggctcccccactttcccttccccaccccacttgtatgctctggaatctgtggagacgccagccctgcccaatcagagatgccaaaaatggggacatgacttctggacagaggacatgggccacgcccccatgcatccccacccccgcccctccggacggcttacttacctcatacgcagctcatcttaaaccaatagaatcgctcggtggacgagagtgtctgactcagatatctacctcggagggagtttctgctactttagggaattattgactgggctttggggttgaacttttttttttttaaagaaagaaaaagaaaccctgggatccatctgttttttttgttgttgttgttgtttttgttgttgttggtggtggtggtggtggtggttcttaatttttaatttagtttggggaagtagcttgtttttttttttataaatatgttgatttcttgtcttttttttttatttcttactttcccatattaggggtgatagccaaaggggttctggtaagagaaagggggacaaacagaactggtaaagaggcccccctggctccaggcctgtccatcaggaagtaaattttacagggcaccaagctttgccccctaaaatcccttaggtgttctttgttcatgcaggcaggtttctgccgcatttgatgtggaggcagtgaagggcttgccctgctggcctctcatcccccttcttcccacaacccttgggcagggctggactcagtaattttgaggaaattgaagatgccatcttcccctgtgagtgacatgtctttaattttttaaaaaactactatttgaaaattggagggggaagaatgggaagggagttattgccaaatatgttaaatatgggttggggtgcttgtatatgtatcttcctcaatttccccataaatgaggtatctttttgtcacaccaaaatcaaggggtagggagagggaggaggttgcaaaaagccagatgtgggggaaaagtaacatcaacactgtcccatcctcagccctgaactagctaccatctgatcccctcagacattctcaggattttacaagactgtcagagtggggaacccctcccattaaagatccgggcaggactggggacaggttggaagtgtgatgggtgggggggtgggaggcatgggccgggggcagttctctcctcacttgtaaacttgtgtagtttcacagaaaaaaaacaaaatgcagttttaaataaagaaatttcttttttccctggaaaaaatacgacaaaaaggggggggggttaaatattgctacgaggggccagttaaggggtaccagtatatgtacaaggaccctaggggggatattacgataggccggccggtacaagtaggagggaacggactgggacttgagaccaatcggggatatggcatcccggtagcagggtataggtagtacggataggtcgagagattataaggtac

SEQ ID NO: 422935 - DNA, 3362 bp, Homo sapiens
tcctccctctctctcacacacacccccgcttgggcctcctctctctctccggctccattttctccgccgccgggggccggggtctcctgtggggggcccagccggtatcccaggtctcccttcagtgccggggtgaacccccgggggagccgggagccgggggcagacgggcgggggttggggcggagggagcagcggccccagggctccccactcaccaatcctaggcccccccagctatggacgaacggccgggggggcctgggattggtgagtggggagcctgggggccctggcgagcctcccggtggcggagaccccggtgggggtagcgggggggtcccgggaggccgagggaagcaagacatcggggacattctgcagcagataatgaccatcaccgaccagagcctggacgaggcccaggccaagaaacacgccctaaactgccaccgaatgaagcctgctctctttagcgtcctgtgtgaaatcaaggagaaaactggcctcagcattcggagctcccaggaggaggagccggtggacccacagctgatgcgcttggacaacatgcttctggcagagggtgtggctgggcccgagaaagggggcggctcagcagcagcagctgcagccgctgcagcctctggtggtggtgtgtcccctgacaactccatcgaacactcggactatcgcagcaaacttgcccagatccgtcacatataccactcggagctggagaagtatgagcaggcatgtaatgagttcacgacccatgtcatgaacctgctgagggagcagagccgcaccaggcccgtggcccccaaagagatggaacgcatggtgagcatcatccatcgaaagttcagcgccatccagatgcagctgaagcagagcacctgcgaggctgtgatgatcctgcgctcccgtttcctggatgccagacgaaagcgccgtaacttcagcaaacaggccactgaggtcctaaatgagtatttctactcccacctgagtaacccatatcctagtgaggaggccaaggaggagcttgccaagaagtgtggcatcaccgtgtctcaggtctccaactggtttggcaacaagaggattcgctataagaaaaacatcggaaagttccaagaggaggcaaacatctatgctgtcaagaccgccgtgtcagtcacccaggggggccacagccgcaccagctccccgacacccccttcctctgcaggctctggcggctctttcaatctctcaggatctggagacatgtttctggggatgcctgggctcaacggagattcctattctgcttcccaggtggaatcactccgacactcgatggggccagggggctatggggataacctcgggggaggccagatgtacagcccacgggaaatgagggcaaatggcagctggcaagaggctgtgaccccctcttcagtgacatccccaacggagggaccagggagtgttcactctgatacctccaactgatcttgcccctcagggtcacaggggtgggggctctcacaaggcgacttgaagaggacgcaggcttccagaggacaaaccccaatacaggagaagcacaagacagagaagggccaatggggtcatcccctccctaacgagactctctgtgctgggggtgctaattacatggcaggaagaatggggcctctaaggggagtgtggggtctgtctctcccttttttccatctttttcctctctcgctttctttcttacacagaaacatacacataccgagaaacctatttctcagacccctttttctcctctgtctttctctctccctctcccacacctcacacacacatactcccacttgcaactattctgtttctctcctgggctcccccactttcccttccccaccccacttgtatgctctggaatctgtggagacgccagccctgcccaatcagagatgccaaaaatggggacatgacttctggacagaggacatgggccacgcccccatgcatccccacccccgcccctccggacggcttacttacctcatacgcagctcatcttaaaccaatagaatcgctcggtggacgagagtgtctgactcagatatctacctcggagggagtttctgctactttagggaattattgactgggctttggggttgaacttttttttttttaaagaaagaaaaagaaaccctgggatccatctgttttttttgttgttgttgttgtttttgttgttgttggtggtggtggtggtggtggttcttaatttttaatttagtttggggaagtagcttgtttttttttttataaatatgttgatttcttgtcttttttttttatttcttactttcccatattaggggtgatagccaaaggggttctggtaagagaaagggggacaaacagaactggtaaagaggcccccctggctccaggcctgtccatcaggaagtaaattttacagggcaccaagctttgccccctaaaatcccttaggtgttctttgttcatgcaggcaggtttctgccgcatttgatgtggaggcagtgaagggcttgccctgctggcctctcatcccccttcttcccacaacccttgggcagggctggactcagtaattttgaggaaattgaagatgccatcttcccctgtgagtgacatgtctttaattttttaaaaaactactatttgaaaattggagggggaagaatgggaagggagttattgccaaatatgttaaatatgggttggggtgcttgtatatgtatcttcctcaatttccccataaatgaggtatctttttgtcacaccaaaatcaaggggtagggagagggaggaggttgcaaaaagccagatgtgggggaaaagtaacatcaacactgtcccatcctcagccctgaactagctaccatctgatcccctcagacattctcaggattttacaagactgtcagagtggggaacccctcccattaaagatccgggcaggactggggacaggttggaagtgtgatgggtgggggggtgggaggcatgggccgggggcagttctctcctcacttgtaaacttgtgtagtttcacagaaaaaaaacaaaatgcagttttaaataaagaaatttcttttttccctggaaaaaatacgacaaaaaggggggggggttaaatattgctacgaggggccagttaaggggtaccagtatatgtacaaggaccctaggggggatattacgataggccggccggtacaagtaggagggaacggactgggacttgagaccaatcggggatatggcatcccggtagcagggtataggtagtacggataggtcgagagattataaggtac

SEQ ID NO: 422936 - DNA, 3087 bp, Homo sapiens
tcctccctctctctcacacacacccccgcttgggcctcctctctctctccggctccattttctccgccgccgggggccggggtctcctgtggggggcccagccggtatcccaggtctcccttcagtgccggggtgaacccccgggggagccgggagccgggggcagacgggcgggggttggggcggagggagcagcggccccagcgagtttggggggagaagtaaccaggcggggggaggggcggagcagggagggggcctcagggcccccccccagctatggacgaacggctactggggccgccccctccaggcgggggccgggggggcctgggattggtgagtggggagcctgggggccctggcgagcctcccggtggcggagaccccggtgggggtagcgggggggtcccgggaggccgagggaagcaagacatcggggacattctgcagcagataatgaccatcaccgaccagagcctggacgaggcccaggccaagaaacacgccctaaactgccaccgaatgaagcctgctctctttagcgtcctgtgtgaaatcaaggagaaaactggcctcagcattcggagctcccaggaggaggagccggtggacccacagctgatgcgcttggacaacatgcttctggcagagggtgtggctgggcccgagaaagggggcggctcagcagcagcagctgcagccgctgcagcctctggtggtggtgtgtcccctgacaactccatcgaacactcggactatcgcagcaaacttgcccagatccgtcacatataccactcggagctggagaagtatgagcaggcatgtaatgagttcacgacccatgtcatgaacctgctgagggagcagagccgcaccaggcccgtggcccccaaagagatggaacgcatggtgagcatcatccatcgaaagttcagcgccatccagatgcagctgaagcagagcacctgcgaggctgtgatgatcctgcgctcccgtttcctggatgccagacgaaagcgccgtaacttcagcaaacaggccactgaggtcctaaatgagtatttctactcccacctgagtaacccatatcctagtgaggaggccaaggaggagcttgccaagaagtgtggcatcaccgtgtctcaggtctccaactggtttggcaacaagaggattcgctataagaaaaacatcggaaagttccaagaggaggcaaacatctatgctgtcaagaccgccgtgtcagtcacccaggggggccacagccgcaccagctccccgacacccccttcctctgcaggctctggcggctctttcaatctctcaggatctggagacatgtttctggggatgcctgggctcaacggagattcctattctgcttcccaggtggaatcactccgacactcgatggggccagggggctatggggataacctcgggggaggccagatgtacagcccacgggaaatgagggcaaatggcagctggcaagaggctgtgaccccctcttcagtgacatccccaacggagggaccagggagtgttcactctgatacctccaactgatcttgcccctcagggtcacaggggtgggggctctcacaaggcgacttgaagaggacgcaggcttccagaggacaaaccccaatacaggagaagcacaagacagagaagggccaatggggtcatcccctccctaacgagactctctgtgctgggggtgctaattacatggcaggaagaatggggcctctaaggggagtgtggggtctgtctctcccttttttccatctttttcctctctcgctttctttcttacacagaaacatacacataccgagaaacctatttctcagacccctttttctcctctgtctttctctctccctctcccacacctcacacacacatactcccacttgcaactattctgtttctctcctgggctcccccactttcccttccccaccccacttgtatgcttggactcagtaattttgaggaaattgaagatgccatcttcccctgtgagtgacatgtctttaattttttaaaaaactactatttgaaaattggagggggaagaatgggaagggagttattgccaaatatgttaaatatgggttggggtgcttgtatatgtatcttcctcaatttccccataaatgaggtatctttttgtcacaccaaaatcaaggggtagggagagggaggaggttgcaaaaagccagatgtgggggaaaagtaacatcaacactgtcccatcctcagccctgaactagctaccatctgatcccctcagacattctcaggattttacaagactgtcagagtggggaacccctcccattaaagatccgggcaggactggggacaggttggaagtgtgatgggtgggggggtgggaggcatgggccgggggcagttctctcctcacttgtaaacttgtgtagtttcacagaaaaaaaacaaaatgcagttttaaataaagaaatttcttttttccctgggtttagttgagaatttttttcaaaaaacatgagaaaccccagaaaaaaaatgattttctttcacgaagttccaaacaggtttctctcctgttccccagccttgccttcatgatgcaggcccaattgcacccttgcagacaacagtctggcctgaaccctattgatgcaactttgcgcaatcaagatggggctccagtgggtcaccaggcagccctgatggactgatggaataaataggatcgggggctctgagggaatgagaccctagagggtacactccccatcccccagggaagtgactgtacccagaggctggtagtacccaggggtggggtgataattatttctctagtacctgaaggactcttgtcccaaaggcatgaattcctagcattccctgtgacaagacgactgaaagatgggggctggagagagggtgcaggccccacctagggcggaggccacagcagggagaggggcagacagagccaggaccctggaaggaagcaggatggcagccggaacagcagttggagcctgggtgctggtcctcagtctgtggggtgagcca

SEQ ID NO: 422937 - DNA, 1405 bp, Homo sapiens
tcctccctctctctcacacacacccccgcttgggcctcctctctctctccggctccattttctccgccgccgggggccggggtctcctgtggggggcccagccggtatcccaggtctcccttcagtgccggggtgaacccccgggggagccgggagccgggggcagacgggcgggggttggggcggagggagcagcggccccagcgagtttggggggagaagtaaccaggcggggggaggggcggagcagggagggggcctcagggcccccccccagctatggacgaacggctactggggccgccccctccaggcgggggccgggggggcctgggattggtgagtggggagcctgggggccctggcgagcctcccggtggcggagaccccggtgggggtagcgggggggtcccgggaggccgagggaagcaagacatcggggacattctgcagcagataatgaccatcaccgaccagagcctggacgaggcccaggccaagaaacacgccctaaactgccaccgaatgaagcctgctctctttagcgtcctgtgtgaaatcaaggagaaaactggcctcagcattcggagctcccaggaggaggagccggtggacccacagctgatgcgcttggacaacatgcttctggcagagggtgtggctgggcccgagaaagggggcggctcagcagcagcagctgcagccgctgcagcctctggtggtggtgtgtcccctgacaactccatcgaacactcggactatcgcagcaaacttgcccagatccgtcacatataccactcggagctggagaagtatgagcaggcatgtaatgagttcacgacccatgtcatgaacctgctgagggagcagagccgcaccaggcccgtggcccccaaagagatggaacgcatggtgagcatcatccatcgaaagttcagcgccatccagatgcagctgaagcagagcacctgcgaggctgtgatgatcctgcgctcccgtttcctggatgccagacgaaagcgccgtaacttcagcaaacaggccactgaggtcctaaatgagtatttctactcccacctgagtaacccatatcctagtgaggaggccaaggaggagcttgccaagaagtgtggcatcaccgtgtctcaggtctccaactggtttggcaacaagaggattcgctataagaaaaacatcggaaagttccaagaggaggcaaacatctatgctgtcaagaccgccgtgtcagtcacccaggggggccacagccgcaccagctccccgacacccccttcctctgcagctctggcgggtcttcatctctcaggatctggggactgttctgggatgctggtcaggagatctatctgtcccagggatcattcgacctcgatgggcagcggct

SEQ ID NO: 422938 - DNA, 353 bp, Homo sapiens
cagagccgcaccaggcccgtggcccccaaagagatggaacgcatggtgagcatcatccatcgaaagttcagcgccatccagatgcagctgaagcagagcacctgcgaggctgtgatgatcctgcgctcccgtttcctggatgccaggtgggcccagggaccccaggctggcccccagcactgggctccttcccattcctctccaagaccctgagctgccatgctgcacaacatggtactccatgacaatggtgactctggggtcatgccatgtgacagccctgccaggacatcaacatcctcctcaccgctcttctccctcctctgtagacgaaagcgccgtaacttcagcaa

SEQ ID NO: 422939 - DNA, 673 bp, Homo sapiens
attaggaattctcattttaaaattaaggtctttttgtgacttttaccatggattattattttcccaaatacatgaccctgtttgattagcatatagagttttgacccagggagaggatgcagtgcccagcttctcagtggttaacagctgttcagcctagtgcatatcagaatttatgtgggtgttgaatgatttttttaaactagtgtaggaacacttgataccttctcagtagttatgtgcatgtttctgtagtttcccaagctaatgggagagatcttcaaaatgatgaaattttattgaaatcaaatagatacattaagaaatggaaatgctgaatagagcctagtttgctctacatgctctttggcaaattgttgggtcactgagacattttaagatagcaatataggccaggtgcagtggctcacacctataatccagcacttttgggaggctgaggcttgagcccaggaggttgagaccagcctgggcaacatagcaggcccctgtcgctaccaaaaaaaaaaaaaaaaaaaaaaaaaagccaggcatggtggggcatgcctgtagtcccagctacttgggaggctcgcttgagccagtaaagtcaaggctgaaatgagccatgattatggctccgtactccagtctgggcaacagagttgagact

SEQ ID NO: 422940 - DNA, 451 bp, Homo sapiens
ttcatttccgggtcactgtagatgcgatggcgccgattccaaagactgtggggcggatcaagctagactgctctctacggcccagctgcccactggaggtcgctgctgcacccaaactttgcaaggaattcggtccagaggattacggcgaagaggtaaaagcgaccctcagtttcccccagtcctgctcattttggtcacgcctctttgaagtcagctgtgcagaaacccgcgacggatgggcgccagacggggctctggaggctttggggagttgtagtctccggccatgcccttgaggatcttaggcaagtgaggggcaggggatcaggaggatgatcctgatgtaacagatgctcgaagtgggtagaattgagcagacaagggtctctgagttgaggattagggagtgggtacgagttccttgggaaaagatggaggccgggcgcgg

SEQ ID NO: 422941 - DNA, 3006 bp, Homo sapiens
  misc_feature (1220)..(1220): n is a, c, g, or t
  misc_feature (1276)..(1276): n is a, c, g, or t
  misc_feature (1312)..(1312): n is a, c, g, or t
ttcatttccgggtcactgtagatgcgatggcgccgattccaaagactgtggggcggatcaagctagactgctctctacggcccagctgcccactggaggtcgctgctgcacccaaactttgcaaggaattcggtccagaggattacggcgaagagattacctcctgggccacttggatgatgaagggaaatcaactggacagagtgacaggggcaagggggctgagggactgggcacctactgtggtctccgcaagtccttcctgtatcctccccaagagtctgagccctgccctcaaagcccctctgcctctgccaccttccccagtgtctcagacagcctgcttcaggtggccatgccccagaagctcctggtgacagaagaggaagccaatcgcctggctgaggagctggtggctgaggaggagcgcatgaaacagaaagcagagaaaaagcgactcaagaagaagcgtcaaaaggaacggaagcgacaggagcgtttggagcagtactgtggggagcccaaggccagcactacctcagatggagatgagagccccccatccagccctggaaacccagttcagggacagtgtggtgaagaagaggactcactggatctatctagcacttttgtgtctctggctttgcgcaaggttggggattggcccctcagtgcccgcagagagaagggactgaaccaggagccccaaggcaggggtctggccctccagaagatgggtcaagaggaagagagccctccaagagaggagaggccccagcagagtccaaaggcatctccgggactgctggcagctgccttacaacagagccaggaactggcaaagttgggtaccagctttgctcaaaatggtttctaccatgaggccgtggtcctcttcacccaggccttgaagctcaacccccaggaccaccggttatttggaaatcgttccttctgccatgagcggttgggtcagccagcgtgggccctggctgatgcccaggtggcccttaccctacggcctggctggccccggggcctcttccgcctgggcaaggccttgatgggactacagcgcttcagagaggcagctgctgtgtttcaggaaactctgagaggtgggtcccagcctgacgcagcccgagagctccgctcttgccttctccacctcacactgactggtaagggggccaggcacactgtcatgctgaggcggntatcagggagaattggctgggactgcaataccaagcctcaggtggctaaggagggngcggggaaggatgggtggaatgagaggcatgggctntcctgcttaaaagaaggatctggtgcccttctctctcccttctcagcagggtcagcgaggaggaatctgtgcaccacctctgtcacctggggccctccagccacttccccatgctgagctggcaccctcaggcctaccttccctcaggtgccctcgaagcactgctttgaggtcccctggcctgtctccactcttgcattatccttcatgtcaccgaagccaccccaaccagcccctctcccagactcagagtagaaggccccatcctctcaagccccaggacccttcaaagggctgggacatcctgggacttgggctccagcatctgtctcaggccagatgagggggcaccggtccctcatagggcagggccatgtatatatcccttggtgggggacatagtgtggtgacagttcactgcatattttgagaccttattctctagatccatagttaatgatgccctggcagtcattcctcttgccatggggaagcttctgatgagagaaaggagccccacatccactgaaacatcctttggttctcaagcttcttctggaggcagtaaggaaaaataaaacccaccaaggctcaagaagggaactatagaaaagttcaggtttttaggctatagcagagacagtgagaaagcatctgggcctttctcttcctcttggtccaggggacctcattcaccaactagagcttggtgtacaggaacggggtcacagtgctgagggggcttgagtcccacctttcagcttgatggatgctcacctcttctcagccccagctcgtgccctgtttttctagccatagcccccagattactcacagctcctcatgccatttcctgtccagattgctatgtatgactctgacctctcttgtccagtggtctggtgctcacctcctctcactgctagaatattcaccaagggtttgcatttgggaagtcccttaccagctcctgcttagagctggtagggccatacatgtccacactcccaactggtggctctcccgctgaatggggcctcagcaggtgcccaagctgctacaaccttggccactctgtttctccaccccagcactgggcatggtaattagcctttccccatgttaatttattcagttttttcaagggtcaactgaattccccacttcctgggtaagaagcatgatctccttttaatttcacgtctaagatcctggcagcttcccctagctggttcctctgtagtcctgctgggactgtcagctcatttaaatgtgggtctgcagaaggctttaggtctcccccaacccccttacctttcacagaggaacctttcatcaggataaatgattattgctgccctgtgggtcttgctcaatactgttcatacctggagagagaaggtattgaaacatctcctttatgtgtgactttcccaaatttttaaaaattgtttatggtttaggccccttaaatactgtgtagcaggatgaagtctaccattaccagctgggtcaccttggatgggtctgtcaacatctaagcctcagttccctcacctgtaaaaatgagggtagtccctacctcataagggatattgtgaggatggaaagcgaaagtgtgagaaaatacctcccaagtgcctggtacatagtgggtgctaaataaaccactttttgtctgcaaaaaaaaaaaa

SEQ ID NO: 422942 - DNA, 3225 bp, Homo sapiens
  misc_feature (1439)..(1439): n is a, c, g, or t
  misc_feature (1495)..(1495): n is a, c, g, or t
  misc_feature (1531)..(1531): n is a, c, g, or t
ttcatttccgggtcactgtagatgcgatggcgccgattccaaagactgtggggcggatcaagctagactgctctctacggcccagctgcccactggaggtcgctgctgcacccaaactttgcaaggaattcggtccagaggattacggcgaagaggacatagtggattttcttcgacggcttgtggagagtgatccccagggcctgcaccggatccatgtggatgggagcagcgggcggctgcagctgtggcaccatggtggggagtgcagggaccgggcccagggatcgaggctggtaccctgggagggctgaccctcagatgcaccccgctctcatgtcctttctttcctgtctctttctccctcctgacagattacctcctgggccacttggatgatgaagggaaatcaactggacagagtgacaggggcaagggggctgagggactgggcacctactgtggtctccgcaagtccttcctgtatcctccccaagagtctgagccctgccctcaaagcccctctgcctctgccaccttccccagtgtctcagacagcctgcttcaggtggccatgccccagaagctcctggtgacagaagaggaagccaatcgcctggctgaggagctggtggctgaggaggagcgcatgaaacagaaagcagagaaaaagcgactcaagaagaagcgtcaaaaggaacggaagcgacaggagcgtttggagcagtactgtggggagcccaaggccagcactacctcagatggagatgagagccccccatccagccctggaaacccagttcagggacagtgtggtgaagaagaggactcactggatctatctagcacttttgtgtctctggctttgcgcaaggttggggattggcccctcagtgcccgcagagagaagggactgaaccaggagccccaaggcaggggtctggccctccagaagatgggtcaagaggaagagagccctccaagagaggagaggccccagcagagtccaaaggcatctccgggactgctggcagctgccttacaacagagccaggaactggcaaagttgggtaccagctttgctcaaaatggtttctaccatgaggccgtggtcctcttcacccaggccttgaagctcaacccccaggaccaccggttatttggaaatcgttccttctgccatgagcggttgggtcagccagcgtgggccctggctgatgcccaggtggcccttaccctacggcctggctggccccggggcctcttccgcctgggcaaggccttgatgggactacagcgcttcagagaggcagctgctgtgtttcaggaaactctgagaggtgggtcccagcctgacgcagcccgagagctccgctcttgccttctccacctcacactgactggtaagggggccaggcacactgtcatgctgaggcggntatcagggagaattggctgggactgcaataccaagcctcaggtggctaaggagggngcggggaaggatgggtggaatgagaggcatgggctntcctgcttaaaagaaggatctggtgcccttctctctcccttctcagcagggtcagcgaggaggaatctgtgcaccacctctgtcacctggggccctccagccacttccccatgctgagctggcaccctcaggcctaccttccctcaggtgccctcgaagcactgctttgaggtcccctggcctgtctccactcttgcattatccttcatgtcaccgaagccaccccaaccagcccctctcccagactcagagtagaaggccccatcctctcaagccccaggacccttcaaagggctgggacatcctgggacttgggctccagcatctgtctcaggccagatgagggggcaccggtccctcatagggcagggccatgtatatatcccttggtgggggacatagtgtggtgacagttcactgcatattttgagaccttattctctagatccatagttaatgatgccctggcagtcattcctcttgccatggggaagcttctgatgagagaaaggagccccacatccactgaaacatcctttggttctcaagcttcttctggaggcagtaaggaaaaataaaacccaccaaggctcaagaagggaactatagaaaagttcaggtttttaggctatagcagagacagtgagaaagcatctgggcctttctcttcctcttggtccaggggacctcattcaccaactagagcttggtgtacaggaacggggtcacagtgctgagggggcttgagtcccacctttcagcttgatggatgctcacctcttctcagccccagctcgtgccctgtttttctagccatagcccccagattactcacagctcctcatgccatttcctgtccagattgctatgtatgactctgacctctcttgtccagtggtctggtgctcacctcctctcactgctagaatattcaccaagggtttgcatttgggaagtcccttaccagctcctgcttagagctggtagggccatacatgtccacactcccaactggtggctctcccgctgaatggggcctcagcaggtgcccaagctgctacaaccttggccactctgtttctccaccccagcactgggcatggtaattagcctttccccatgttaatttattcagttttttcaagggtcaactgaattccccacttcctgggtaagaagcatgatctccttttaatttcacgtctaagatcctggcagcttcccctagctggttcctctgtagtcctgctgggactgtcagctcatttaaatgtgggtctgcagaaggctttaggtctcccccaacccccttacctttcacagaggaacctttcatcaggataaatgattattgctgccctgtgggtcttgctcaatactgttcatacctggagagagaaggtattgaaacatctcctttatgtgtgactttcccaaatttttaaaaattgtttatggtttaggccccttaaatactgtgtagcaggatgaagtctaccattaccagctgggtcaccttggatgggtctgtcaacatctaagcctcagttccctcacctgtaaaaatgagggtagtccctacctcataagggatattgtgaggatggaaagcgaaagtgtgagaaaatacctcccaagtgcctggtacatagtgggtgctaaataaaccactttttgtctgcaaaaaaaaaaaa

SEQ ID NO: 422943 - DNA, 2928 bp, Homo sapiens
ttcatttccgggtcactgtagatgcgatggcgccgattccaaagactgtggggcggatcaagctagactgctctctacggcccagctgcccactggaggtcgctgctgcacccaaactttgcaaggaattcggtccagaggattacggcgaagaggacatagtggattttcttcgacggcttgtggagagtgatccccagggcctgcaccggatccatgtggatgggagcagcgggcggctgcagctgtggcaccatgattacctcctgggccacttggatgatgaagggaaatcaactggacagagtgacaggggcaagggggctgagggactgggcacctactgtggtctccgcaagtccttcctgtatcctccccaagagtctgagccctgccctcaaagcccctctgcctctgccaccttccccagtgtctcagacagcctgcttcaggtggccatgccccagaagctcctggtgacagaagaggaagccaatcgcctggctgaggagctggtggctgaggaggagcgcatgaaacagaaagcagagaaaaagcgactcaagaagaagcgtcaaaaggaacggaagcgacaggagcgtttggagcagtactgtggggagcccaaggccagcactacctcagatggagatgagagccccccatccagccctggaaacccagttcagggacagtgtggtgaagaagaggactcactggatctatctagcacttttgtgtctctggctttgcgcaaggttggggattggcccctcagtgcccgcagagagaagggactgaaccaggagccccaaggcaggggtctggccctccagaagatgggtcaagaggaagagagccctccaagagaggagaggccccagcagagtccaaaggcatctccgggactgctggcagctgccttacaacagagccaggaactggcaaagttgggtaccagctttgctcaaaatggtttctaccatgaggccgtggtcctcttcacccaggccttgaagctcaacccccaggaccaccggttatttggaaatcgttccttctgccatgagcggttgggtcagccagcgtgggccctggctgatgcccaggtggcccttaccctacggcctggctggccccggggcctcttccgcctgggcaaggccttgatgggactacagcgcttcagagaggcagctgctgtgtttcaggaaactctgagaggtgggtcccagcctgacgcagcccgagagctccgctcttgccttctccacctcacactgggtcagcgaggaggaatctgtgcaccacctctgtcacctggggccctccagccacttccccatgctgagctggcaccctcaggcctaccttccctcaggtgccctcgaagcactgctttgaggtcccctggcctgtctccactcttgcattatccttcatgtcaccgaagccaccccaaccagcccctctcccagactcagagtagaaggccccatcctctcaagccccaggacccttcaaagggctgggacatcctgggacttgggctccagcatctgtctcaggccagatgagggggcaccggtccctcatagggcagggccatgtatatatcccttggtgggggacatagtgtggtgacagttcactgcatattttgagaccttattctctagatccatagttaatgatgccctggcagtcattcctcttgccatggggaagcttctgatgagagaaaggagccccacatccactgaaacatcctttggttctcaagcttcttctggaggcagtaaggaaaaataaaacccaccaaggctcaagaagggaactatagaaaagttcaggtttttaggctatagcagagacagtgagaaagcatctgggcctttctcttcctcttggtccaggggacctcattcaccaactagagcttggtgtacaggaacggggtcacagtgctgagggggcttgagtcccacctttcagcttgatggatgctcacctcttctcagccccagctcgtgccctgtttttctagccatagcccccagattactcacagctcctcatgccatttcctgtccagattgctatgtatgactctgacctctcttgtccagtggtctggtgctcacctcctctcactgctagaatattcaccaagggtttgcatttgggaagtcccttaccagctcctgcttagagctggtagggccatacatgtccacactcccaactggtggctctcccgctgaatggggcctcagcaggtgcccaagctgctacaaccttggccactctgtttctccaccccagcactgggcatggtaattagcctttccccatgttaatttattcagttttttcaagggtcaactgaattccccacttcctgggtaagaagcatgatctccttttaatttcacgtctaagatcctggcagcttcccctagctggttcctctgtagtcctgctgggactgtcagctcatttaaatgtgggtctgcagaaggctttaggtctcccccaacccccttacctttcacagaggaacctttcatcaggataaatgattattgctgccctgtgggtcttgctcaatactgttcatacctggagagagaaggtattgaaacatctcctttatgtgtgactttcccaaatttttaaaaattgtttatggtttaggccccttaaatactgtgtagcaggatgaagtctaccattaccagctgggtcaccttggatgggtctgtcaacatctaagcctcagttccctcacctgtaaaaatgagggtagtccctacctcataagggatattgtgaggatggaaagcgaaagtgtgagaaaatacctcccaagtgcctggtacatagtgggtgctaaataaaccactttttgtctgcaaaaaaaaaaaa

SEQ ID NO: 422944 - DNA, 2898 bp, Homo sapiens
ttcatttccgggtcactgtagatgcgatggcgccgattccaaagactgtggggcggatcaagctagactgctctctacggcccagctgcccactggaggtcgctgctgcacccaaactttgcaaggaattcggtccagaggattacggcgaagaggacatagtggattttcttcgacggcttgtggagagtgatccccagggcctgcaccggatccatgtggatgggagcagcgggcggctgcagctgtggcaccatgattacctcctgggccacttggatgatgaagggaaatcaactggacagagtgacaggggcaagggggctgagggactgggcacctactgtggtctccgcaagtccttcctgtatcctccccaagagtctgagccctgccctcaaagcccctctgcctctgccaccttccccagtgtctcagacagcctgcttcaggtggccatgccccagaagctcctggtgacagaagaggaagccaatcgcctggctgaggagctggtggctgaggaggagcgcatgaaacagaaagcagagaaaaagcgactcaagaagaagcgtcaaaaggaacggaagcgacaggagcgtttggagcagtactgtggggagcccaaggccagcactacctcagatggagatgagagccccccatccagccctggaaacccagttcagggacagtgtggtgaagaagaggactcactggatctatctagcacttttgtgtctctggctttgcgcaaggttggggattggcccctcagtgcccgcagagagaagggactgaaccaggagccccaaggcaggggtctggccctccagaagatgggtcaagaggaagagagccctccaagagaggagaggccccagcagagtccaaaggcatctccgggactgctggcagctgccttacaacagagccaggaactggcaaagttgggtaccagctttgctcaaaatggtttctaccatgaggccgtggtcctcttcacccaggccttgaagctcaacccccaggaccaccggttatttggaaatcgttccttctgccatgagcggttgggtcagccagcgtgggccctggctgatgcccaggtggcccttaccctacggcctggctggccccggggcctcttccgcctgggcaaggccttgatgggactacaggaaactctgagaggtgggtcccagcctgacgcagcccgagagctccgctcttgccttctccacctcacactgggtcagcgaggaggaatctgtgcaccacctctgtcacctggggccctccagccacttccccatgctgagctggcaccctcaggcctaccttccctcaggtgccctcgaagcactgctttgaggtcccctggcctgtctccactcttgcattatccttcatgtcaccgaagccaccccaaccagcccctctcccagactcagagtagaaggccccatcctctcaagccccaggacccttcaaagggctgggacatcctgggacttgggctccagcatctgtctcaggccagatgagggggcaccggtccctcatagggcagggccatgtatatatcccttggtgggggacatagtgtggtgacagttcactgcatattttgagaccttattctctagatccatagttaatgatgccctggcagtcattcctcttgccatggggaagcttctgatgagagaaaggagccccacatccactgaaacatcctttggttctcaagcttcttctggaggcagtaaggaaaaataaaacccaccaaggctcaagaagggaactatagaaaagttcaggtttttaggctatagcagagacagtgagaaagcatctgggcctttctcttcctcttggtccaggggacctcattcaccaactagagcttggtgtacaggaacggggtcacagtgctgagggggcttgagtcccacctttcagcttgatggatgctcacctcttctcagccccagctcgtgccctgtttttctagccatagcccccagattactcacagctcctcatgccatttcctgtccagattgctatgtatgactctgacctctcttgtccagtggtctggtgctcacctcctctcactgctagaatattcaccaagggtttgcatttgggaagtcccttaccagctcctgcttagagctggtagggccatacatgtccacactcccaactggtggctctcccgctgaatggggcctcagcaggtgcccaagctgctacaaccttggccactctgtttctccaccccagcactgggcatggtaattagcctttccccatgttaatttattcagttttttcaagggtcaactgaattccccacttcctgggtaagaagcatgatctccttttaatttcacgtctaagatcctggcagcttcccctagctggttcctctgtagtcctgctgggactgtcagctcatttaaatgtgggtctgcagaaggctttaggtctcccccaacccccttacctttcacagaggaacctttcatcaggataaatgattattgctgccctgtgggtcttgctcaatactgttcatacctggagagagaaggtattgaaacatctcctttatgtgtgactttcccaaatttttaaaaattgtttatggtttaggccccttaaatactgtgtagcaggatgaagtctaccattaccagctgggtcaccttggatgggtctgtcaacatctaagcctcagttccctcacctgtaaaaatgagggtagtccctacctcataagggatattgtgaggatggaaagcgaaagtgtgagaaaatacctcccaagtgcctggtacatagtgggtgctaaataaaccactttttgtctgcaaaaaaaaaaaa

SEQ ID NO: 422945 - DNA, 1056 bp, Homo sapiens
acggcagtgcacgcgtgcattgcgtgatagctctgttctagagtatccccccggtctccaactagagcttggtgtacaggaacggggtcacagtgctgagggggcttgagtcccacctttcagcttgatggatgctcacctcttctcagccccagctcgtgccctgtttttctagccatagcccccagattactcacagctcctcatgccatttcctgtccagattgctatgtatgactctgacctctcttgtccagtggtctggtgctcacctcctctcactgctagaatattcaccaagggtttgcatttgggaagtcccttaccagctcctgcttagagctggtagggccatacatgtccacactcccaactggtggctctcccgctgaatggggcctcagcaggtgcccaagctgctacaaccttggccactctgtttctccaccccagcactgggcatggtaattagcctttccccatgttaatttattcagttttttcaagggtcaactgaattccccacttcctgggtaagaagcatgatctccttttaatttcacgtctaagatcctggcagcttcccctagctggttcctctgtagtcctgctgggactgtcagctcatttaaatgtgggtctgcagaaggctttaggtctcccccaacccccttacctttcacagaggaacctttcatcaggataaatgattattgctgccctgtgggtcttgctcaatactgttcatacctggagagagaaggtattgaaacatctcctttatgtgtgactttcccaaatttttaaaaattgtttatggtttaggccccttaaatactgtgtagcaggatgaagtctaccattaccagctgggtcaccttggatgggtctgtcaacatctaagcctcagttccctcacctgtaaaaatgagggtagtccctacctcataagggatattgtgaggatggaaagcgaaagtgtgagaaaatacctcccaagtgcctggtacatagtgggtgctaaataaaccactttttgtctgcaaaaaaaaaaaa

SEQ ID NO: 422946 - DNA, 2810 bp, Homo sapiens
ttcatttccgggtcactgtagatgcgatggcgccgattccaaagactgtggggcggatcaagctagactgctctctacggcccagctgcccactggaggtcgctgctgcacccaaactttgcaaggaattcggtccagaggattacggcgaagaggacatagtggattttcttcgacggcttgtggagagtgatccccagggcctgcaccggatccatgtggatgggagcagcgggcggctgcagctgtggcaccatgattacctcctgggccacttggatgatgaagggaaatcaactggacagagtgacaggggcaagggggctgagggactgggcacctactgtggtctccgcaagtccttcctgtatcctccccaagagtctgagccctgccctcaaagcccctctgcctctgccaccttccccagtgtctcagacagcctgcttcaggtggccatgccccagaagctcctggtgacagaagaggaagccaatcgcctggctgaggagctggtggctgaggaggagcgcatgaaacagaaagcagagaaaaagcgactcaagaagaagcgtcaaaaggaacggaagcgacaggagcgtttggagcagtactgtggggagcccaaggccagcactacctcagatggagatgagagccccccatccagccctggaaacccagttcagggacagtgtggtgaagaagaggactcactggatctatctagcacttttgtgtctctggctttgcgcaaggttggggattggcccctcagtgcccgcagagagaagggactgaaccaggagccccaaggcaggggtctggccctccagaagatgggtcaagaggaagagagccctccaagagaggagaggccccagcagagtccaaaggcatctccgggactgctggcagctgccttacaacagagccaggaactggcaaagttgggtaccagctttgctcaaaatggtttctaccatgaggccgtggtcctcttcacccaggccttgaagctcaacccccaggaccaccggttatttggaaatcgttccttctgccatgagcggttgggtcagccagcgtgggccctggctgatgcccaggtggcccttaccctacggcctggctggccccggggcctcttccgcctgggcaaggccttgatgggactacagcgcttcagagaggcagctgctgtgtttcaggaaactctgagaggtgggtcccagcctgacgcagcccgagagctccgctcttgccttctccacctcacactgggtcagcgaggaggaatctgtgcaccacctctgtcacctggggccctccagccacttccccatgctgagctggcaccctcaggcctaccttccctcaggtgccctcgaagcactgctttgaggtcccctggcctgtctccactcttgcattatccttcatgtcaccgaagccaccccaaccagcccctctcccagactcagagtagaaggccccatcctctcaagccccaggacccttcaaagggctgggacatcctgggacttgggctccagcatctgtctcaggccagatgagggggcaccggtccctcatagggcagggccatgtatatatcccttggtgggggacatagtgtggtgacagttcactgcatattttgagaccttattctctagatccatagttaatgatgccctggcagtcattcctcttgccatggggaagcttctgatgagagaaaggagccccacatccactgaaacatcctttggttctcaagcttcttctggaggcagtaaggaaaaataaaacccaccaaggctcaagaagggaactatagaaaagttcaggtttttaggctatagcagagacagtgagaaagcatctgggcctttctcttcctcttggtccaggggacctcattcaccaactagagcttggtgtacaggaacggggtcacagtgctgagggggcttgagtcccacctttcagcttgatggatgctcacctcttctcagccccagctcgtgccctgtttttctagccatagcccccagattactcacagctcctcatgccatttcctgtccagattgctatgtatgactctgacctctcttgtccagtggtctggtgctcacctcctctcactgctagaatattcaccaagggtttgcatttgggaagtcccttaccagctcctgcttagagctggtagggccatacatgtccacactcccaactggtggctctcccgctgaatggggcctcagcaggtgcccaagctgctacaaccttggccactctgtttctccaccccagcactgggcatggtaattagcctttccccatgttaatttattcagttttttcaagggtcaactgaattccccacttcctgggtaagaagcatgatctccttttaatttcacgtctaagatcctttcatcaggataaatgattattgctgccctgtgggtcttgctcaatactgttcatacctggagagagaaggtattgaaacatctcctttatgtgtgactttcccaaatttttaaaaattgtttatggtttaggccccttaaatactgtgtagcaggatgaagtctaccattaccagctgggtcaccttggatgggtctgtcaacatctaagcctcagttccctcacctgtaaaaatgagggtagtccctacctcataagggatattgtgaggatggaaagcgaaagtgtgagaaaatacctcccaagtgcctggtacatagtgggtgctaaataaaccactttttgtctgcaaaaaaaaaaaa

SEQ ID NO: 422947 - DNA, 1516 bp, Homo sapiens
ttcatttccgggtcactgtagatgcgatggcgccgattccaaagactgtggggcggatcaagctagactgctctctacggcccagctgcccactggaggtcgctgctgcacccaaactttgcaaggaattcggtccagaggattacggcgaagaggacatagtggattttcttcgacggcttgtggagagtgatccccagggcctgcaccggatccatgtggatgggagcagcgggcggctgcagctgtggcaccatgattacctcctgggccacttggatgatgaagggaaatcaactggacagagtgacaggggcaagggggctgagggactgggcacctactgtggtctccgcaagtccttcctgtatcctccccaagagtctgagccctgccctcaaagcccctctgcctctgccaccttccccagtgtctcagacagcctgcttcaggtggccatgccccagaagctcctggtgacagaagaggaagccaatcgcctggctgaggagctggtggctgaggaggagcgcatgaaacagaaagcagagaaaaagcgactcaagaagaagcgtcaaaaggaacggaagcgacaggagcgtttggagcagtactgtggggagcccaaggccagcactacctcagatggagatgagagccccccatccagccctggaaacccagttcagggacagtgtggtgaagaagaggactcactggatctatctagcacttttgtgtctctggctttgcgcaaggttggggattggcccctcagtgcccgcagagagaagggactgaaccaggagccccaaggcaggggtctggccctccagaagatgggtcaagaggaagagagccctccaagagaggagaggccccagcagagtccaaaggcatctccgggactgctggcagctgccttacaacagagccaggaactggcaaagttgggtaccagctttgctcaaaatggtttctaccatgaggccgtggtcctcttcacccaggccttgaagctcaacccccaggaccaccggttatttggaaatcgttccttctgccatgagcggttgggtcagccagcgtgggccctggctgatgcccaggtggcccttaccctacggcctggctggccccggggcctcttccgcctgggcaaggccttgatgggactacagcgcttcagagaggcagctgctgtgtttcaggaaactctgagaggtgggtcccagcctgacgcagcccgagagctccgctcttgccttctccacctcacactggaagatgggtcaagaggaagagagccctccaagagaggagaggccccagcagagtccaaaggtacaggagaaggatttggggaggctgagacctcaagacctgcttgactttgctccctacctcataagggatattgtgaggatggaaagcgaaagtgtgagaaaatacctcccaagtgcctggtacatagtgggtgctaaataaaccactttttgtctgcaaaaaaaaaaaa

SEQ ID NO: 422948 - DNA, 355 bp, Homo sapiens
gagctggtggctgaggaggagcgcatgaaacagaaagcagagaaaaagcgactcaagaagaaggtggctagagcatggctggagggtgcaggggagccaaagggatttgggagagggaaagaggaaactttgtgggaacaggagagagctcaagatggcctgcagtggactctcttgccaggaggacacaaggggcccagggactggggggtctctcacaggccatctggtgcagtggttctggaatcctactgtgctgcctaggtaggaatctgcctccttacatgaggcctcttgctggtgcctctcttgtctgctttttcacctgcaaaatgaggataataatgatgcctgt

SEQ ID NO: 422949 - DNA, 2462 bp, Homo sapiens
ttcatttccgggtcactgtagatgcgatggcgccgattccaaagactgtggggcggatcaagctagactgctctctacggcccagctgcccactggaggtcgctgctgcacccaaactttgcaaggaattcggtccagaggattacggcgaagaggacatagtggattttcttcgacggcttgtggagagtgatccccagggcctgcaccggatccatgtggatgggagcagcgggcggctgcagctgtggcaccatgattacctcctgggccacttggatgatgaagggaaatcaactggacagagtgacaggggcaagggggctgagggactgggcacctactgtggtctccgcaagtccttcctgtatcctccccaagagtctgagccctgccctcaaagcccctctgcctctgccaccttccccagtgtctcagacagcctgcttcaggtggccatgccccagaagctcctggtgacagaagaggaagccaatcgcctggctgaggagctggtggctgaggaggagcgcatgaaacagaaagcagagaaaaagcgactcaagaagaagcgtcaaaaggaacggaagcgacaggagcgtttggagcagtactgtggggagcccaaggccagcactacctcagatggagatgagagccccccatccagccctggaaacccagttcagggacagtgtggtgaagaagaggactcactggatctatctagcacttttgtgtctctggctttgcgcaaggttggggattggcccctcagtgcccgcagagagaagggactgaaccaggagccccaaggcaggggtctggccctccagaagatgggtcaagaggaagagagcccctccagccacttccccatgctgagctggcaccctcaggcctaccttccctcaggtgccctcgaagcactgctttgaggtcccctggcctgtctccactcttgcattatccttcatgtcaccgaagccaccccaaccagcccctctcccagactcagagtagaaggccccatcctctcaagccccaggacccttcaaagggctgggacatcctgggacttgggctccagcatctgtctcaggccagatgagggggcaccggtccctcatagggcagggccatgtatatatcccttggtgggggacatagtgtggtgacagttcactgcatattttgagaccttattctctagatccatagttaatgatgccctggcagtcattcctcttgccatggggaagcttctgatgagagaaaggagccccacatccactgaaacatcctttggttctcaagcttcttctggaggcagtaaggaaaaataaaacccaccaaggctcaagaagggaactatagaaaagttcaggtttttaggctatagcagagacagtgagaaagcatctgggcctttctcttcctcttggtccaggggacctcattcaccaactagagcttggtgtacaggaacggggtcacagtgctgagggggcttgagtcccacctttcagcttgatggatgctcacctcttctcagccccagctcgtgccctgtttttctagccatagcccccagattactcacagctcctcatgccatttcctgtccagattgctatgtatgactctgacctctcttgtccagtggtctggtgctcacctcctctcactgctagaatattcaccaagggtttgcatttgggaagtcccttaccagctcctgcttagagctggtagggccatacatgtccacactcccaactggtggctctcccgctgaatggggcctcagcaggtgcccaagctgctacaaccttggccactctgtttctccaccccagcactgggcatggtaattagcctttccccatgttaatttattcagttttttcaagggtcaactgaattccccacttcctgggtaagaagcatgatctccttttaatttcacgtctaagatcctggcagcttcccctagctggttcctctgtagtcctgctgggactgtcagctcatttaaatgtgggtctgcagaaggctttaggtctcccccaacccccttacctttcacagaggaacctttcatcaggataaatgattattgctgccctgtgggtcttgctcaatactgttcatacctggagagagaaggtattgaaacatctcctttatgtgtgactttcccaaatttttaaaaattgtttatggtttaggccccttaaatactgtgtagcaggatgaagtctaccattaccagctgggtcaccttggatgggtctgtcaacatctaagcctcagttccctcacctgtaaaaatgagggtagtccctacctcataagggatattgtgaggatggaaagcgaaagtgtgagaaaatacctcccaagtgcctggtacatagtgggtgctaaataaaccactttttgtctgcaaaaaaaaaaaa

SEQ ID NO: 422950 - DNA, 3109 bp, Homo sapiens
  misc_feature (1323)..(1323): n is a, c, g, or t
  misc_feature (1379)..(1379): n is a, c, g, or t
  misc_feature (1415)..(1415): n is a, c, g, or t
ttcatttccgggtcactgtagatgcgatggcgccgattccaaagactgtggggcggatcaagctagactgctctctacggcccagctgcccactggaggtcgctgctgcacccaaactttgcaaggaattcggtccagaggattacggcgaagaggacatagtggattttcttcgacggcttgtggagagtgatccccagggcctgcaccggatccatgtggatgggagcagcgggcggctgcagctgtggcaccatgattacctcctgggccacttggatgatgaagggaaatcaactggacagagtgacaggggcaagggggctgagggactgggcacctactgtggtctccgcaagtccttcctgtatcctccccaagagtctgagccctgccctcaaagcccctctgcctctgccaccttccccagtgtctcagacagcctgcttcaggtggccatgccccagaagctcctggtgacagaagaggaagccaatcgcctggctgaggagctggtggctgaggaggagcgcatgaaacagaaagcagagaaaaagcgactcaagaagaagcgtcaaaaggaacggaagcgacaggagcgtttggagcagtactgtggggagcccaaggccagcactacctcagatggagatgagagccccccatccagccctggaaacccagttcagggacagtgtggtgaagaagaggactcactggatctatctagcacttttgtgtctctggctttgcgcaaggttggggattggcccctcagtgcccgcagagagaagggactgaaccaggagccccaaggcaggggtctggccctccagaagatgggtcaagaggaagagagccctccaagagaggagaggccccagcagagtccaaaggcatctccgggactgctggcagctgccttacaacagagccaggaactggcaaagttgggtaccagctttgctcaaaatggtttctaccatgaggccgtggtcctcttcacccaggccttgaagctcaacccccaggaccaccggttatttggaaatcgttccttctgccatgagcggttgggtcagccagcgtgggccctggctgatgcccaggtggcccttaccctacggcctggctggccccggggcctcttccgcctgggcaaggccttgatgggactacagcgcttcagagaggcagctgctgtgtttcaggaaactctgagaggtgggtcccagcctgacgcagcccgagagctccgctcttgccttctccacctcacactgactggtaagggggccaggcacactgtcatgctgaggcggntatcagggagaattggctgggactgcaataccaagcctcaggtggctaaggagggngcggggaaggatgggtggaatgagaggcatgggctntcctgcttaaaagaaggatctggtgcccttctctctcccttctcagcagggtcagcgaggaggaatctgtgcaccacctctgtcacctggggccctccagccacttccccatgctgagctggcaccctcaggcctaccttccctcaggtgccctcgaagcactgctttgaggtcccctggcctgtctccactcttgcattatccttcatgtcaccgaagccaccccaaccagcccctctcccagactcagagtagaaggccccatcctctcaagccccaggacccttcaaagggctgggacatcctgggacttgggctccagcatctgtctcaggccagatgagggggcaccggtccctcatagggcagggccatgtatatatcccttggtgggggacatagtgtggtgacagttcactgcatattttgagaccttattctctagatccatagttaatgatgccctggcagtcattcctcttgccatggggaagcttctgatgagagaaaggagccccacatccactgaaacatcctttggttctcaagcttcttctggaggcagtaaggaaaaataaaacccaccaaggctcaagaagggaactatagaaaagttcaggtttttaggctatagcagagacagtgagaaagcatctgggcctttctcttcctcttggtccaggggacctcattcaccaactagagcttggtgtacaggaacggggtcacagtgctgagggggcttgagtcccacctttcagcttgatggatgctcacctcttctcagccccagctcgtgccctgtttttctagccatagcccccagattactcacagctcctcatgccatttcctgtccagattgctatgtatgactctgacctctcttgtccagtggtctggtgctcacctcctctcactgctagaatattcaccaagggtttgcatttgggaagtcccttaccagctcctgcttagagctggtagggccatacatgtccacactcccaactggtggctctcccgctgaatggggcctcagcaggtgcccaagctgctacaaccttggccactctgtttctccaccccagcactgggcatggtaattagcctttccccatgttaatttattcagttttttcaagggtcaactgaattccccacttcctgggtaagaagcatgatctccttttaatttcacgtctaagatcctggcagcttcccctagctggttcctctgtagtcctgctgggactgtcagctcatttaaatgtgggtctgcagaaggctttaggtctcccccaacccccttacctttcacagaggaacctttcatcaggataaatgattattgctgccctgtgggtcttgctcaatactgttcatacctggagagagaaggtattgaaacatctcctttatgtgtgactttcccaaatttttaaaaattgtttatggtttaggccccttaaatactgtgtagcaggatgaagtctaccattaccagctgggtcaccttggatgggtctgtcaacatctaagcctcagttccctcacctgtaaaaatgagggtagtccctacctcataagggatattgtgaggatggaaagcgaaagtgtgagaaaatacctcccaagtgcctggtacatagtgggtgctaaataaaccactttttgtctgcaaaaaaaaaaaa

SEQ ID NO: 422951 - DNA, 3159 bp, Homo sapiens
  misc_feature (1373)..(1373): n is a, c, g, or t
  misc_feature (1429)..(1429): n is a, c, g, or t
  misc_feature (1465)..(1465): n is a, c, g, or t
ttcatttccgggtcactgtagatgcgatggcgccgattccaaagactgtggggcggatcaagctagactgctctctacggcccagctgcccactggaggtcgctgctgcacccaaactttgcaaggaattcggtccagaggattacggcgaagaggtaaaagcgaccctcagtttcccccagtcctgctcattttggtcacgcctctttgaagtcagctgtgcagaaacccgcgacggatgggcgccagacggggctctggaggctttggggagttgtagtctccggccatgcccttgaggatcttagattacctcctgggccacttggatgatgaagggaaatcaactggacagagtgacaggggcaagggggctgagggactgggcacctactgtggtctccgcaagtccttcctgtatcctccccaagagtctgagccctgccctcaaagcccctctgcctctgccaccttccccagtgtctcagacagcctgcttcaggtggccatgccccagaagctcctggtgacagaagaggaagccaatcgcctggctgaggagctggtggctgaggaggagcgcatgaaacagaaagcagagaaaaagcgactcaagaagaagcgtcaaaaggaacggaagcgacaggagcgtttggagcagtactgtggggagcccaaggccagcactacctcagatggagatgagagccccccatccagccctggaaacccagttcagggacagtgtggtgaagaagaggactcactggatctatctagcacttttgtgtctctggctttgcgcaaggttggggattggcccctcagtgcccgcagagagaagggactgaaccaggagccccaaggcaggggtctggccctccagaagatgggtcaagaggaagagagccctccaagagaggagaggccccagcagagtccaaaggcatctccgggactgctggcagctgccttacaacagagccaggaactggcaaagttgggtaccagctttgctcaaaatggtttctaccatgaggccgtggtcctcttcacccaggccttgaagctcaacccccaggaccaccggttatttggaaatcgttccttctgccatgagcggttgggtcagccagcgtgggccctggctgatgcccaggtggcccttaccctacggcctggctggccccggggcctcttccgcctgggcaaggccttgatgggactacagcgcttcagagaggcagctgctgtgtttcaggaaactctgagaggtgggtcccagcctgacgcagcccgagagctccgctcttgccttctccacctcacactgactggtaagggggccaggcacactgtcatgctgaggcggntatcagggagaattggctgggactgcaataccaagcctcaggtggctaaggagggngcggggaaggatgggtggaatgagaggcatgggctntcctgcttaaaagaaggatctggtgcccttctctctcccttctcagcagggtcagcgaggaggaatctgtgcaccacctctgtcacctggggccctccagccacttccccatgctgagctggcaccctcaggcctaccttccctcaggtgccctcgaagcactgctttgaggtcccctggcctgtctccactcttgcattatccttcatgtcaccgaagccaccccaaccagcccctctcccagactcagagtagaaggccccatcctctcaagccccaggacccttcaaagggctgggacatcctgggacttgggctccagcatctgtctcaggccagatgagggggcaccggtccctcatagggcagggccatgtatatatcccttggtgggggacatagtgtggtgacagttcactgcatattttgagaccttattctctagatccatagttaatgatgccctggcagtcattcctcttgccatggggaagcttctgatgagagaaaggagccccacatccactgaaacatcctttggttctcaagcttcttctggaggcagtaaggaaaaataaaacccaccaaggctcaagaagggaactatagaaaagttcaggtttttaggctatagcagagacagtgagaaagcatctgggcctttctcttcctcttggtccaggggacctcattcaccaactagagcttggtgtacaggaacggggtcacagtgctgagggggcttgagtcccacctttcagcttgatggatgctcacctcttctcagccccagctcgtgccctgtttttctagccatagcccccagattactcacagctcctcatgccatttcctgtccagattgctatgtatgactctgacctctcttgtccagtggtctggtgctcacctcctctcactgctagaatattcaccaagggtttgcatttgggaagtcccttaccagctcctgcttagagctggtagggccatacatgtccacactcccaactggtggctctcccgctgaatggggcctcagcaggtgcccaagctgctacaaccttggccactctgtttctccaccccagcactgggcatggtaattagcctttccccatgttaatttattcagttttttcaagggtcaactgaattccccacttcctgggtaagaagcatgatctccttttaatttcacgtctaagatcctggcagcttcccctagctggttcctctgtagtcctgctgggactgtcagctcatttaaatgtgggtctgcagaaggctttaggtctcccccaacccccttacctttcacagaggaacctttcatcaggataaatgattattgctgccctgtgggtcttgctcaatactgttcatacctggagagagaaggtattgaaacatctcctttatgtgtgactttcccaaatttttaaaaattgtttatggtttaggccccttaaatactgtgtagcaggatgaagtctaccattaccagctgggtcaccttggatgggtctgtcaacatctaagcctcagttccctcacctgtaaaaatgagggtagtccctacctcataagggatattgtgaggatggaaagcgaaagtgtgagaaaatacctcccaagtgcctggtacatagtgggtgctaaataaaccactttttgtctgcaaaaaaaaaaaa

SEQ ID NO: 422952 - DNA, 3291 bp, Homo sapiens
  misc_feature (1505)..(1505): n is a, c, g, or t
  misc_feature (1561)..(1561): n is a, c, g, or t
  misc_feature (1597)..(1597): n is a, c, g, or t
ttcatttccgggtcactgtagatgcgatggcgccgattccaaagactgtggggcggatcaagctagactgctctctacggcccagctgcccactggaggtcgctgctgcacccaaactttgcaaggaattcggtccagaggattacggcgaagaggacatagtggattttcttcgacggcttgtggagagtgatccccagggcctgcaccggatccatgtggatgggagcagcgggcggctgcagctgtggcaccatgattacctcctgggccacttggatgatgaagggaaatcaactggacagagtgacaggggcaagggggctgagggactgggcacctactgtggtctccgcaagtccttcctgtatcctccccaagagtctgagccctgccctcaaagcccctctgcctctgccaccttccccagtgtctcagacagcctgcttcaggtggccatgccccagaagctcctggtgacagaagaggtgagattctcaggagagggctttgccgtcccccagggttctttcaatccctgtatccccatccctatattctcccctaattggtacctttcaagatccttctatactgcctgccccctttcatgtttgctctccatttccctgtttctctctttttctgtcacctgcccttcgtccttcaggaagccaatcgcctggctgaggagctggtggctgaggaggagcgcatgaaacagaaagcagagaaaaagcgactcaagaagaagcgtcaaaaggaacggaagcgacaggagcgtttggagcagtactgtggggagcccaaggccagcactacctcagatggagatgagagccccccatccagccctggaaacccagttcagggacagtgtggtgaagaagaggactcactggatctatctagcacttttgtgtctctggctttgcgcaaggttggggattggcccctcagtgcccgcagagagaagggactgaaccaggagccccaaggcaggggtctggccctccagaagatgggtcaagaggaagagagccctccaagagaggagaggccccagcagagtccaaaggcatctccgggactgctggcagctgccttacaacagagccaggaactggcaaagttgggtaccagctttgctcaaaatggtttctaccatgaggccgtggtcctcttcacccaggccttgaagctcaacccccaggaccaccggttatttggaaatcgttccttctgccatgagcggttgggtcagccagcgtgggccctggctgatgcccaggtggcccttaccctacggcctggctggccccggggcctcttccgcctgggcaaggccttgatgggactacagcgcttcagagaggcagctgctgtgtttcaggaaactctgagaggtgggtcccagcctgacgcagcccgagagctccgctcttgccttctccacctcacactgactggtaagggggccaggcacactgtcatgctgaggcggntatcagggagaattggctgggactgcaataccaagcctcaggtggctaaggagggngcggggaaggatgggtggaatgagaggcatgggctntcctgcttaaaagaaggatctggtgcccttctctctcccttctcagcagggtcagcgaggaggaatctgtgcaccacctctgtcacctggggccctccagccacttccccatgctgagctggcaccctcaggcctaccttccctcaggtgccctcgaagcactgctttgaggtcccctggcctgtctccactcttgcattatccttcatgtcaccgaagccaccccaaccagcccctctcccagactcagagtagaaggccccatcctctcaagccccaggacccttcaaagggctgggacatcctgggacttgggctccagcatctgtctcaggccagatgagggggcaccggtccctcatagggcagggccatgtatatatcccttggtgggggacatagtgtggtgacagttcactgcatattttgagaccttattctctagatccatagttaatgatgccctggcagtcattcctcttgccatggggaagcttctgatgagagaaaggagccccacatccactgaaacatcctttggttctcaagcttcttctggaggcagtaaggaaaaataaaacccaccaaggctcaagaagggaactatagaaaagttcaggtttttaggctatagcagagacagtgagaaagcatctgggcctttctcttcctcttggtccaggggacctcattcaccaactagagcttggtgtacaggaacggggtcacagtgctgagggggcttgagtcccacctttcagcttgatggatgctcacctcttctcagccccagctcgtgccctgtttttctagccatagcccccagattactcacagctcctcatgccatttcctgtccagattgctatgtatgactctgacctctcttgtccagtggtctggtgctcacctcctctcactgctagaatattcaccaagggtttgcatttgggaagtcccttaccagctcctgcttagagctggtagggccatacatgtccacactcccaactggtggctctcccgctgaatggggcctcagcaggtgcccaagctgctacaaccttggccactctgtttctccaccccagcactgggcatggtaattagcctttccccatgttaatttattcagttttttcaagggtcaactgaattccccacttcctgggtaagaagcatgatctccttttaatttcacgtctaagatcctggcagcttcccctagctggttcctctgtagtcctgctgggactgtcagctcatttaaatgtgggtctgcagaaggctttaggtctcccccaacccccttacctttcacagaggaacctttcatcaggataaatgattattgctgccctgtgggtcttgctcaatactgttcatacctggagagagaaggtattgaaacatctcctttatgtgtgactttcccaaatttttaaaaattgtttatggtttaggccccttaaatactgtgtagcaggatgaagtctaccattaccagctgggtcaccttggatgggtctgtcaacatctaagcctcagttccctcacctgtaaaaatgagggtagtccctacctcataagggatattgtgaggatggaaagcgaaagtgtgagaaaatacctcccaagtgcctggtacatagtgggtgctaaataaaccactttttgtctgcaaaaaaaaaaaa

SEQ ID NO: 422953 - DNA, 1911 bp, Homo sapiens
ttcatttccgggtcactgtagatgcgatggcgccgattccaaagactgtggggcggatcaagctagactgctctctacggcccagctgcccactggaggtcgctgctgcacccaaactttgcaaggaattcggtccagaggattacggcgaagaggacatagtggattttcttcgacggcttgtggagagtgatccccagggcctgcaccggatccatgtggatgggagcagcgggcggctgcagctgtggcaccatgattacctcctgggccacttggatgatgaagggaaatcaactggacagagtgacaggggcaagggggctgagggactgggcacctactgtggtctccgcaagtccttcctgtatcctccccaagagtctgagccctgccctcaaagcccctctgcctctgccaccttccccagtgtctcagacagcctgcttcaggtggccatgccccagaagctcctggtgacagaagaggaagccaatcgcctggctgaggagctggtggctgaggaggagcgcatgaaacagaaagcagagaaaaagcgactcaagaagaagcgtcaaaaggaacggaagcgacaggagcgtttggagcagtactgtggggagcccaaggccagcactacctcagatggagatgagagccccccatccagccctggaaacccagttcagggacagtgtggtgaagaagaggactcactggatctatctagcacttttgtgtctctggctttgcgcaaggttggggattggcccctcagtgcccgcagagagaagggactgaaccaggagccccaaggcaggggtctggccctccagaagatgggtcaagaggaagagagccctccaagagaggagaggccccagcagagtccaaaggcatctccgggactgctggcagctgccttacaacagagccaggaactggcaaagttgggtaccagctttgctcaaaatggtttctaccatgaggccgtggtcctcttcacccaggccttgaagctcaacccccaggaccaccggttatttggaaatcgttccttctgccatttcctgtccagattgctatgtatgactctgacctctcttgtccagtggtctggtgctcacctcctctcactgctagaatattcaccaagggtttgcatttgggaagtcccttaccagctcctgcttagagctggtagggccatacatgtccacactcccaactggtggctctcccgctgaatggggcctcagcaggtgcccaagctgctacaaccttggccactctgtttctccaccccagcactgggcatggtaattagcctttccccatgttaatttattcagttttttcaagggtcaactgaattccccacttcctgggtaagaagcatgatctccttttaatttcacgtctaagatcctggcagcttcccctagctggttcctctgtagtcctgctgggactgtcagctcatttaaatgtgggtctgcagaaggctttaggtctcccccaacccccttacctttcacagaggaacctttcatcaggataaatgattattgctgccctgtgggtcttgctcaatactgttcatacctggagagagaaggtattgaaacatctcctttatgtgtgactttcccaaatttttaaaaattgtttatggtttaggccccttaaatactgtgtagcaggatgaagtctaccattaccagctgggtcaccttggatgggtctgtcaacatctaagcctcagttccctcacctgtaaaaatgagggtagtccctacctcataagggatattgtgaggatggaaagcgaaagtgtgagaaaatacctcccaagtgcctggtacatagtgggtgctaaataaaccactttttgtctgcaaaaaaaaaaaa

SEQ ID NO: 422954 - DNA, 747 bp, Homo sapiens
ttcatttccgggtcactgtagatgcgatggcgccgattccaaagactgtggggcggatcaagctagactgctctctacggcccagctgcccactggaggtcgctgctgcacccaaactttgcaaggaattcggtccagaggattacggcgaagaggacatagtggattttcttcgacggcttgtggagagtgatccccagggcctgcaccggatccatgtggatgggagcagcgggcggctgcagctgtggcaccatgattacctcctgggccacttggatgatgaagggaaatcaactggacagagtgacaggggcaagggggctgagggactgggcacctactgtggtctccgcaagtccttcctgtatcctccccaagagtctgagccctgccctcaaagcccctctgcctctgccaccttccccagtgtctcagacagcctgcttcaggtggccatgccccagaagctcctggtgacagaagaggaagccaaatcgcctggctgagggagctggtggctgaggattcagggattgttggcgttattcaaagaggagactttgaaattccccgatggctggaatgtggaagccccaggtgcctctggtggagggtcatctgcttttccagactgtgggttgtgaaccggctccttctccaagaaaggttgcagctgagaacatccagaggtgagactcagacacattgaaagtgactgcatttagggaggttaacgagttctta

SEQ ID NO: 422955 - DNA, 781 bp, Homo sapiens
acaggctgctttgggccctcccgcgtgccgttcttacccggcctgccccgcgccgccgcttccggaagtgggtctcgtctcctcccaagcggagcatttgtgcctgaagctgccgggtctgctacggcaccgcggggctgcagaaacccgggggccaagggcgggctgcttgccgctatggctggcagtcaggacatattcgatgccatcgtgatggcggatgagaggtttcatggggaagggtatcgggaaggctatgaagaaggcagtagtttgggtgtgatggagggaaggcagcatggcacgctgcatggagccaaaatcgggtctgagatcgggtgctaccaaggttttgcttttgcatggaaatgtctactgcacagttgcaccactgagaaggacaggtaaaggtggagatgtctttctttctcagcgtaggaaccaggagttctagttccatgggttaccagcatgcccttgagtaatcaatctgtctgttcctcatctgtaaaatggagaaaattatcagtgtcaagcttgagtgttgttaggagatttaacggaaatactaaatagaaagtgccaggcacattttaggtgtttggtgaacactggctgttgttgcttctcaagagttctatgctcctgccttttacctggagtcattagtgcaccacgtggcttttagataccctaccaataaaataatgttgacattgattgtattttctcattcacctttcccctgagcttctaataaacaaattataacagttttgta

SEQ ID NO: 422956 - DNA, 624 bp, Homo sapiens
ccaccgatgacctaatttcctaatttccattgcctaatgctcaacaggtgcttccagaacaatagtgtgagaagcaccgctgccttctgcccccaccttttgttttgagatcttggtaatgaaagtgtagctagttgcttattaatttcactcttaaatatttttcacattcacagatcgggtgctaccaaggttttgcttttgcatggaaatgtctactgcacagttgcaccactgagaaggacaggtaaaggtggagatgtctttctttctcagcgtaggaaccaggagttctagttccatgggttaccagcatgcccttgagtaatcaatctgtctgttcctcatctgtaaaatggagaaaattatcagtgtcaagcttgagtgttgttaggagatttaacggaaatactaaatagaaagtgccaggcacattttaggtgtttggtgaacactggctgttgttgcttctcaagagttctatgctcctgccttttacctggagtcattagtgcaccacgtggcttttagataccctaccaataaaataatgttgacattgattgtattttctcattcacctttcccctgagcttctaataaacaaattataacagttttgta

SEQ ID NO: 422957 - DNA, 529 bp, Homo sapiens
tgatttcgtgtaatgagaaaataatcatccagcttttgaacgaaggcattcttagcgcacctgctgggtttcaggaagccagcagcatagctgttgtgtaagttgagcctgttgtgtgcacatgactgagagtctgtatttctgtgctttacagcagaaagatgaaggtcttagaatcattgattggaatgatccagaaattcccttatgatgaccctacttacgataaactccatgaagattaggtctcctcctcccgaactctaaacctgcgtgtgtggctgtgcaccgctcgtttgtagcgtcacctcaggtctggggaagtctgtgctggcatctcctcattgtgccttcatcagagctggtgccttcgggccagaaagactctcgttctttctagatggtgggatcaggggcctttgctgtgtttcccttggtggatttttgtgttttgtaagttgtctattttgataatgtattatttttataactgtaaaaaaagtaaatagcatattttaaagtgaaagtt

SEQ ID NO: 422958 - DNA, 959 bp, Homo sapiens
tggggggggcacagatgagcagagtggatggttcggtgggtccccacgaggcgagtggtggtcatatgtgatggcacgtgttcacacaccctcctgtgtacccccccagggtcaccgaagtccccacacgctggctctccacacccctcctgttccagaaagcatgtccgaaagcagtccaggagattattaaggggtcgccatgaatccactttggttttaaaaccattcccgaatgtcctagtggattgtgttgtgctgcctaagctgccggctgcaggagccagagaagtgacccccgcgggagcagcggcaggtggatctccacggtggctcgctttgtttttgttttgttttttcttttaagacggagtctcactctgtcgccgagtttggagtgtattggcgcgatctcggctcactgtaacctccgcctcctgaattcaagtgattctcctgcctcagcctccctagtagctgggattataggcgccccccaccacgcccaagtaacttttgtatttttagtagagatggggttttgccttgttggccaggctggtcttgaactcccagcctgaaatgatccacccacgtccacctaccaaagtgctggaattgcaggcatgagccaccactcccggcctgctttttgtttttgaagacaggacttaggtctcctcctcccgaactctaaacctgcgtgtgtggctgtgcaccgctcgtttgtagcgtcacctcaggtctggggaagtctgtgctggcatctcctcattgtgccttcatcagagctggtgccttcgggccagaaagactctcgttctttctagatggtgggatcaggggcctttgctgtgtttcccttggtggatttttgtgttttgtaagttgtctattttgataatgtattatttttataactgtaaaaaaagtaaatagcatattttaaagtgaaagtt

SEQ ID NO: 422959 - DNA, 1481 bp, Homo sapiens
acaggctgctttgggccctcccgcgtgccgttcttacccggcctgccccgcgccgccgcttccggaagtgggtctcgtctcctcccaagcggagcatttgtgcctgaagctgccgggtctgctacggcaccgcggggctgcagaaacccgggggccaagggcgggctgcttgccgctatggctggcagtcaggacatattcgatgccatcgtgatggcggatgagaggtttcatggggaagggtatcgggaaggctatgaagaaggcagtagtttgggtgtgatggagggaaggcagcatggcacgctgcatggagccaaaatcgggtctgagatcgggtgctaccaaggttttgcttttgcatggaaatgtctactgcacagttgcaccactgagaaggacagcagaaagatgaaggtcttagaatcattgattggaatgatccagaaattcccttatgatgaccctacttacgataaactccatgaagacttagacaagatcagaggaaaatttaaacagttttgttcgttactcaatgttcagccagactttaaaattagtgcagaaggttccggactttcattttgaggaggatggatgaacagagaccgaacgtcgaggaacagatggtcaccgaagtccccacacgctggctctccacacccctcctgttccagaaagcatgtccgaaagcagtccaggagattattaaggggtcgccatgaatccactttggttttaaaaccattcccgaatgtcctagtggattgtgttgtgctgcctaagctgccggctgcaggagccagagaagtgacccccgcgggagcagcggcaggtggatctccacggtggctcgctttgtttttgttttgttttttcttttaagacggagtctcactctgtcgccgagtttggagtgtattggcgcgatctcggctcactgtaacctccgcctcctgaattcaagtgattctcctgcctcagcctccctagtagctgggattataggcgccccccaccacgcccaagtaacttttgtatttttagtagagatggggttttgccttgttggccaggctggtcttgaactcccagcctgaaatgatccacccacgtccacctaccaaagtgctggaattgcaggcatgagccaccactcccggcctgctttttgtttttgaagacaggacttaggtctcctcctcccgaactctaaacctgcgtgtgtggctgtgcaccgctcgtttgtagcgtcacctcaggtctggggaagtctgtgctggcatctcctcattgtgccttcatcagagctggtgccttcgggccagaaagactctcgttctttctagatggtgggatcaggggcctttgctgtgtttcccttggtggatttttgtgttttgtaagttgtctattttgataatgtattatttttataactgtaaaaaaagtaaatagcatattttaaagtgaaagtt

SEQ ID NO: 422960 - DNA, 1349 bp, Homo sapiens
cctcgtgctgcgacagtgggggagctgtgagttgcctcctggctgacttccagtgcccggcccagaggacgcgtccatagatgttagttaagaaagcggccgaacatttagcagtcaggcgctgacgtttatttagctcgcgctgtgagtcagacactgagctaaacgttccaccctggttatctacttcagccctacttaatcgggtgctaccaaggttttgcttttgcatggaaatgtctactgcacagttgcaccactgagaaggacagcagaaagatgaaggtcttagaatcattgattggaatgatccagaaattcccttatgatgaccctacttacgataaactccatgaagacttagacaagatcagaggaaaatttaaacagttttgttcgttactcaatgttcagccagactttaaaattagtgcagaaggttccggactttcattttgaggaggatggatgaacagagaccgaacgtcgaggaacagatggtcaccgaagtccccacacgctggctctccacacccctcctgttccagaaagcatgtccgaaagcagtccaggagattattaaggggtcgccatgaatccactttggttttaaaaccattcccgaatgtcctagtggattgtgttgtgctgcctaagctgccggctgcaggagccagagaagtgacccccgcgggagcagcggcaggtggatctccacggtggctcgctttgtttttgttttgttttttcttttaagacggagtctcactctgtcgccgagtttggagtgtattggcgcgatctcggctcactgtaacctccgcctcctgaattcaagtgattctcctgcctcagcctccctagtagctgggattataggcgccccccaccacgcccaagtaacttttgtatttttagtagagatggggttttgccttgttggccaggctggtcttgaactcccagcctgaaatgatccacccacgtccacctaccaaagtgctggaattgcaggcatgagccaccactcccggcctgctttttgtttttgaagacaggacttaggtctcctcctcccgaactctaaacctgcgtgtgtggctgtgcaccgctcgtttgtagcgtcacctcaggtctggggaagtctgtgctggcatctcctcattgtgccttcatcagagctggtgccttcgggccagaaagactctcgttctttctagatggtgggatcaggggcctttgctgtgtttcccttggtggatttttgtgttttgtaagttgtctattttgataatgtattatttttataactgtaaaaaaagtaaatagcatattttaaagtgaaagtt

SEQ ID NO: 422961 - DNA, 1324 bp, Homo sapiens
ccaccgatgacctaatttcctaatttccattgcctaatgctcaacaggtgcttccagaacaatagtgtgagaagcaccgctgccttctgcccccaccttttgttttgagatcttggtaatgaaagtgtagctagttgcttattaatttcactcttaaatatttttcacattcacagatcgggtgctaccaaggttttgcttttgcatggaaatgtctactgcacagttgcaccactgagaaggacagcagaaagatgaaggtcttagaatcattgattggaatgatccagaaattcccttatgatgaccctacttacgataaactccatgaagacttagacaagatcagaggaaaatttaaacagttttgttcgttactcaatgttcagccagactttaaaattagtgcagaaggttccggactttcattttgaggaggatggatgaacagagaccgaacgtcgaggaacagatggtcaccgaagtccccacacgctggctctccacacccctcctgttccagaaagcatgtccgaaagcagtccaggagattattaaggggtcgccatgaatccactttggttttaaaaccattcccgaatgtcctagtggattgtgttgtgctgcctaagctgccggctgcaggagccagagaagtgacccccgcgggagcagcggcaggtggatctccacggtggctcgctttgtttttgttttgttttttcttttaagacggagtctcactctgtcgccgagtttggagtgtattggcgcgatctcggctcactgtaacctccgcctcctgaattcaagtgattctcctgcctcagcctccctagtagctgggattataggcgccccccaccacgcccaagtaacttttgtatttttagtagagatggggttttgccttgttggccaggctggtcttgaactcccagcctgaaatgatccacccacgtccacctaccaaagtgctggaattgcaggcatgagccaccactcccggcctgctttttgtttttgaagacaggacttaggtctcctcctcccgaactctaaacctgcgtgtgtggctgtgcaccgctcgtttgtagcgtcacctcaggtctggggaagtctgtgctggcatctcctcattgtgccttcatcagagctggtgccttcgggccagaaagactctcgttctttctagatggtgggatcaggggcctttgctgtgtttcccttggtggatttttgtgttttgtaagttgtctattttgataatgtattatttttataactgtaaaaaaagtaaatagcatattttaaagtgaaagtt

SEQ ID NO: 422962 - DNA, 1484 bp, Homo sapiens
acaggctgctttgggccctcccgcgtgccgttcttacccggcctgccccgcgccgccgcttccggaagtgggtctcgtctcctcccaagcggagcatttgtgcctgaagctgccgggtctgctacggcaccgcggggctgcagaaacccgggggccaagggcgggctgcttgccgctatggctggcagtcaggacatattcgatgccatcgtgatggcggatgagaggtttcatggggaagggtatcgggaaggctatgaagaaggcagtagtttgggtgtgatggagggaaggcagcatggcacgctgcatggagccaaaatcgggtctgagcagaaagatgaaggtcttagaatcattgattggaatgatccagaaattcccttatgatgaccctacttacgataaactccatgaagacttagacaagatcagaggaaaatttaaacagttttgttcgttactcaatgttcagccagactttaaaattagtgcagaaggttccggactttcattttgaggaggatggatgaacagagaccgaacgtcgaggaacagatgtgtgtgtgacgtgtttagaaatgcggtgaagggccagacggtgctgggaaggcagttgttcattgggagggtgagggttccggttcggccgtgggagggcttccttccctggggttttctgcctgtgtcaccttggtgcccgtcttggggcctctccacacatgccctttgttgggctgaagccgtccctggcagagccctcgtgcattgacttgacagcctctccggcagcacaggcctagctggttctgggttggagttggctctggatagggttagtcaccaggcctggactgaaggcagttatttttattattattattatttgcaatgagagagatggttggccccgaatgaggctcatgggaggtttggacgggtgctgtgccgcatgtcgaggccgattgtgtgccaggcggtgcgggacgtgcctcccgtgtgttatttaatcccttcaggagcccacaagatgggtgttattctcattttacagaggagggaggggagacgcgaagggattgcctggtctaagggcacccagcagcagagctaggacttccgccctaaggctgtgcctcactgccaccaggcacagccgcctccggaatgcacaggcgagtccctgccctccctcccaggccgcacaggtcctgccaagcctcacggagcacgggggagtctgtggtggccagtttacctgggcatctggctgagaggaagaaaggccaacctgatcctgaggggacccagacatatcctttgcactgtccctagaggggcgatgagctttgcagcattaaaaaatggtgaaggggggaaatattttgaaccaaagaccaaatgttaggccgccgttatatttgcagaagctttgagaaccatgcgtatagcctcctgcattctcccctctcctaggagctctt

SEQ ID NO: 422963 - DNA, 745 bp, Homo sapiens
cctcgtgctgcgacagtgggggagctgtgagttgcctcctggctgacttccagtgcccggcccagaggacgcgtccatagatgttagttaagaaagcggccgaacatttagcagtcaggcgctgacgtttatttagctcgcgctgtgagtcagacactgagctaaacgttccaccctggttatctacttcagccctacttagtttcatggggaagggtatcgggaaggctatgaagaaggcagtagtttgggtgtgatggagggaaggcagcatggcacgctgcatggagccaaaatcgggtctgagatcgggtgctaccaaggttttgcttttgcatggaaatgtctactgcacagttgcaccactgagaaggacagcagaaagatgaaggtcttagaatcattgattggcatgagccaccactcccggcctgctttttgtttttgaagacaggacttaggtctcctcctcccgaactctaaacctgcgtgtgtggctgtgcaccgctcgtttgtagcgtcacctcaggtctggggaagtctgtgctggcatctcctcattgtgccttcatcagagctggtgccttcgggccagaaagactctcgttctttctagatggtgggatcaggggcctttgctgtgtttcccttggtggatttttgtgttttgtaagttgtctattttgataatgtattatttttataactgtaaaaaaagtaaatagcatattttaaagtgaaagtt

SEQ ID NO: 422964 - DNA, 916 bp, Homo sapiens
acaggctgctttgggccctcccgcgtgccgttcttacccggcctgccccgcgccgccgcttccggaagtgggtctcgtctcctcccaagcggagcatttgtgcctgaagctgccgggtctgctacggcaccgcggggctgcagaaacccgggggccaagggcgggctgcttgccgctatggctggcagtcaggacatattcgatgccatcgtgatggcggatgagaggtttcatggggaagggtatcgggaaggctatgaagaaggcagtagtttgggtgtgatggagggaaggcagcatggcacgctgcatggagccaaaatcgggtctgagatcgggtgctaccaaggttttgcttttgcatggaaatgtctactgcacagttgcaccactgagaaggacagcagaaagatgaaggtcttagaatcattgattggaatgatccagaaattcccttatgatgaccctacttacgataaactccatgaagacttagacaagatcagaggaaaatttaaacagttttgttcgttactcaatgttcagccagactttaaaattagtgcagaaggttccggactttcattttgaggaggatggatgaacagagaccgaacgtcgaggaacagatgccgcacaggtcctgccaagcctcacggagcacgggggagtctgtggtggccagtttacctgggcatctggctgagaggaagaaaggccaacctgatcctgaggggacccagacatatcctttgcactgtccctagaggggcgatgagctttgcagcattaaaaaatggtgaaggggggaaatattttgaaccaaagaccaaatgttaggccgccgttatatttgcagaagctttgagaaccatgcgtatagcctcctgcattctcccctctcctaggagctctt

SEQ ID NO: 422965 - DNA, 801 bp, Homo sapiens
cctcgtgctgcgacagtgggggagctgtgagttgcctcctggctgacttccagtgcccggcccagaggacgcgtccatagatgttagttaagaaagcggccgaacatttagcagtcaggcgctgacgtttatttagctcgcgctgtgagtcagacactgagctaaacgttccaccctggttatctacttcagccctacttagtttcatggggaagggtatcgggaaggctatgaagaaggcagtagtttgggtgtgatggagggaaggcagcatggcacgctgcatggagccaaaatcgggtctgagatcgggtgctaccaaggttttgcttttgcatggaaatgtctactgcacagttgcaccactgagaaggacagcagaaagatgaaggtcttagaatcattgattggaatgatccagaaattcccttatgatgaccctacttacgataaactccatgaagacttagacaagatcagaggaaaatttaaacaggtgcgtgcactgtgtgtttcctcctgctaggagcacctgattgcgcctttcccaggcggggcagcgcactcccggggccgctgcggcaatggcctggggctgcgtgcgccgcggaactgtccgtagaggcgcctcatccttgagtcgcagtgcaggaaaactgaagacagtccagagaaaaggagttagaactcatttatgggctggccacatagacaggaaaagctatagctagagatagagttatcttctcatttttcagtaaaaatgcacaagattaaaaataccatctcttttgtgttttc

SEQ ID NO: 422966 - DNA, 742 bp, Homo sapiens
acaggctgctttgggccctcccgcgtgccgttcttacccggcctgccccgcgccgccgcttccggaagtgggtctcgtctcctcccaagcggagcatttgtgcctgaagctgccgggtctgctacggcaccgcggggctgcagaaacccgggggccaagggcgggctgcttgccgctatggctggcagtcaggacatattcgatgccatcgtgatggcggatgagaggtttcatggggaagggtatcgggaaggctatgaagaaggcagtagtttgggtgtgatggagggaaggcagcatggcacgctgcatggagccaaaatcgggtctgaggtaagtgggaacccccatctggagatgaagcctcttcatttacaatttataatttatttcgatattcagtgtgatggagtaagaattgtcaggccttttaaaatcacagtgccggatgggcgcggtgactcacacctgtaatcccagcactttgggagtctgaggtgggtggatcgccttgaggtcaggagttggagaccagcctgaccaacatggtgaaaccctgtctctactaaaaatactgaattagctgggcatggtggtgcatgcctgtaatcccagccacttgggaggctgaggtatgagactcgcttgaacctgggaggcagaggttgtggtaagccgggaccgtgccattgcactgcagcctgggcgacaggatgaaactccatctccaaaaaataaacaa

SEQ ID NO: 422967 - DNA, 663 bp, Homo sapiens
ctcagcctggtggttcccctcctccgaggccgcctcgtcctctgggaggacagacctttgccatctgggagctgcctttttttctggttccttaatcataggacatacggcagtattcatggatgtgctgatagatgtacccgaccacaccccttttccctccagagcccctggggagcccctcgtgctgcgacagtgggggagctgtgagttgcctcctggctgacttccagtgcccggcccagaggacgcgtccatagatgttagttaagaaagcggccgaacatttagcagtcaggcgctgacgtttatttagctcgcgctgtgagtcagacactgagctaaacgttccaccctggttatctacttcagccctacttagtaagtggatcctattattcttcggaatttacagactaggaggcacagtcactttccagggtcacacaactattaagtggggagctatgcaccctgcttcatggggcgctgcagcccactccttgcatgtttggtgactgcaggttaagatagtggcagttccactgttgggcctcagggtcagtgctactccgggtaccagtcggagaacattttgtggtgatctgatgccatttctctctgttgccctacccatgtgatgtcaaaccctgtgtatgttgc

SEQ ID NO: 422968 - DNA, 1555 bp, Homo sapiens
acaggctgctttgggccctcccgcgtgccgttcttacccggcctgccccgcgccgccgcttccggaagtgggtctcgtctcctcccaagcggagcatttgtgcctgaagctgccgggtctgctacggcaccgcggggctgcagaaacccgggggccaagggcgggctgcttgccgctatggctggcagtcaggacatattcgatgccatcgtgatggcggatgagaggtttcatggggaagggtatcgggaaggctatgaagaaggcagtagtttgggtgtgatggagggaaggcagcatggcacgctgcatggagccaaaatcgggtctgagatcgggtgctaccaaggttttgcttttgcatggaaatgtctactgcacagttgcaccactgagaaggacagcagaaagatgaaggtcttagaatcattgattggaatgatccagaaattcccttatgatgaccctacttacgataaactccatgaagacttagacaagatcagaggaaaatttaaacagttttgttcgttactcaatgttcagccagactttaaaattagtgcagaaggttccggactttcattttgaggaggatggatgaacagagaccgaacgtcgaggaacagatgtgtgtgtgacgtgtttagaaatgcggtgaagggccagacggtgctgggaaggcagttgttcattgggagggtgagggttccggttcggccgtgggagggcttccttccctggggttttctgcctgtgtcaccttggtgcccgtcttggggcctctccacacatgccctttgttgggctgaagccgtccctggcagagccctcgtgcattgacttgacagcctctccggcagcacaggcctagctggttctgggttggagttggctctggatagggttagtcaccaggcctggactgaaggcagttatttttattattattattatttgcaatgagagagatggttggccccgaatgaggctcatgggaggtttggacgggtgctgtgccgcatgtcgaggccgattgtgtgccaggcggtgcgggacgtgcctcccgtgtgttatttaatcccttcaggagcccacaagatgggtgttattctcattttacagaggagggaggggagacgcgaagggattgcctggtctaagggcacccagcagcagagctaggacttccgccctaaggctgtgcctcactgccaccaggcacagccgcctccggaatgcacaggcgagtccctgccctccctcccaggccgcacaggtcctgccaagcctcacggagcacgggggagtctgtggtggccagtttacctgggcatctggctgagaggaagaaaggccaacctgatcctgaggggacccagacatatcctttgcactgtccctagaggggcgatgagctttgcagcattaaaaaatggtgaaggggggaaatattttgaaccaaagaccaaatgttaggccgccgttatatttgcagaagctttgagaaccatgcgtatagcctcctgcattctcccctctcctaggagctctt

SEQ ID NO: 422969 - DNA, 1455 bp, Homo sapiens
cctcgtgctgcgacagtgggggagctgtgagttgcctcctggctgacttccagtgcccggcccagaggacgcgtccatagatgttagttaagaaagcggccgaacatttagcagtcaggcgctgacgtttatttagctcgcgctgtgagtcagacactgagctaaacgttccaccctggttatctacttcagccctacttagtttcatggggaagggtatcgggaaggctatgaagaaggcagtagtttgggtgtgatggagggaaggcagcatggcacgctgcatggagccaaaatcgggtctgagatcgggtgctaccaaggttttgcttttgcatggaaatgtctactgcacagttgcaccactgagaaggacagcagaaagatgaaggtcttagaatcattgattggaatgatccagaaattcccttatgatgaccctacttacgataaactccatgaagacttagacaagatcagaggaaaatttaaacagttttgttcgttactcaatgttcagccagactttaaaattagtgcagaaggttccggactttcattttgaggaggatggatgaacagagaccgaacgtcgaggaacagatggtcaccgaagtccccacacgctggctctccacacccctcctgttccagaaagcatgtccgaaagcagtccaggagattattaaggggtcgccatgaatccactttggttttaaaaccattcccgaatgtcctagtggattgtgttgtgctgcctaagctgccggctgcaggagccagagaagtgacccccgcgggagcagcggcaggtggatctccacggtggctcgctttgtttttgttttgttttttcttttaagacggagtctcactctgtcgccgagtttggagtgtattggcgcgatctcggctcactgtaacctccgcctcctgaattcaagtgattctcctgcctcagcctccctagtagctgggattataggcgccccccaccacgcccaagtaacttttgtatttttagtagagatggggttttgccttgttggccaggctggtcttgaactcccagcctgaaatgatccacccacgtccacctaccaaagtgctggaattgcaggcatgagccaccactcccggcctgctttttgtttttgaagacaggacttaggtctcctcctcccgaactctaaacctgcgtgtgtggctgtgcaccgctcgtttgtagcgtcacctcaggtctggggaagtctgtgctggcatctcctcattgtgccttcatcagagctggtgccttcgggccagaaagactctcgttctttctagatggtgggatcaggggcctttgctgtgtttcccttggtggatttttgtgttttgtaagttgtctattttgataatgtattatttttataactgtaaaaaaagtaaatagcatattttaaagtgaaagtt

SEQ ID NO: 422970 - DNA, 1449 bp, Homo sapiens
acaggctgctttgggccctcccgcgtgccgttcttacccggcctgccccgcgccgccgcttccggaagtgggtctcgtctcctcccaagcggagcatttgtgcctgaagctgccgggtctgctacggcaccgcggggctgcagaaacccgggggccaagggcgggctgcttgccgctatggctggcagtcaggacatattcgatgccatcgtgatggcggatgagagatcgggtgctaccaaggttttgcttttgcatggaaatgtctactgcacagttgcaccactgagaaggacagcagaaagatgaaggtcttagaatcattgattggaatgatccagaaattcccttatgatgaccctacttacgataaactccatgaagacttagacaagatcagaggaaaatttaaacagttttgttcgttactcaatgttcagccagactttaaaattagtgcagaaggttccggactttcattttgaggaggatggatgaacagagaccgaacgtcgaggaacagatgtgtgtgtgacgtgtttagaaatgcggtgaagggccagacggtgctgggaaggcagttgttcattgggagggtgagggttccggttcggccgtgggagggcttccttccctggggttttctgcctgtgtcaccttggtgcccgtcttggggcctctccacacatgccctttgttgggctgaagccgtccctggcagagccctcgtgcattgacttgacagcctctccggcagcacaggcctagctggttctgggttggagttggctctggatagggttagtcaccaggcctggactgaaggcagttatttttattattattattatttgcaatgagagagatggttggccccgaatgaggctcatgggaggtttggacgggtgctgtgccgcatgtcgaggccgattgtgtgccaggcggtgcgggacgtgcctcccgtgtgttatttaatcccttcaggagcccacaagatgggtgttattctcattttacagaggagggaggggagacgcgaagggattgcctggtctaagggcacccagcagcagagctaggacttccgccctaaggctgtgcctcactgccaccaggcacagccgcctccggaatgcacaggcgagtccctgccctccctcccaggccgcacaggtcctgccaagcctcacggagcacgggggagtctgtggtggccagtttacctgggcatctggctgagaggaagaaaggccaacctgatcctgaggggacccagacatatcctttgcactgtccctagaggggcgatgagctttgcagcattaaaaaatggtgaaggggggaaatattttgaaccaaagaccaaatgttaggccgccgttatatttgcagaagctttgagaaccatgcgtatagcctcctgcattctcccctctcctaggagctctt

SEQ ID NO: 422971 - DNA, 965 bp, Homo sapiens
acaggctgctttgggccctcccgcgtgccgttcttacccggcctgccccgcgccgccgcttccggaagtgggtctcgtctcctcccaagcggagcatttgtgcctgaagctgccgggtctgctacggcaccgcggggctgcagaaacccgggggccaagggcgggctgcttgccgctatggctggcagtcaggacatattcgatgccatcgtgatggcggatgagaggtttcatggggaagggtatcgggaaggctatgaagaaggcagtagtttgggtgtgatggagggaaggcagcatggcacgctgcatggagccaaaatcgggtctgagatcgggtgctaccaaggttttgcttttgcatggaaatgtctactgcacagttgcaccactgagaaggacagcagaaagatgaaggtcttagaatcattgattggaatgatccagaaattcccttatgatgaccctacttacgataaactccatgaagacttagacaagatcagaggaaaatttaaacagttttgttcgttactcaatgttcagccagactttaaaattagtgcagaaggttccggactttcattttgaggaggatggatgaacagagaccgaacgtcgaggaacagatgcacagccgcctccggaatgcacaggcgagtccctgccctccctcccaggccgcacaggtcctgccaagcctcacggagcacgggggagtctgtggtggccagtttacctgggcatctggctgagaggaagaaaggccaacctgatcctgaggggacccagacatatcctttgcactgtccctagaggggcgatgagctttgcagcattaaaaaatggtgaaggggggaaatattttgaaccaaagaccaaatgttaggccgccgttatatttgcagaagctttgagaaccatgcgtatagcctcctgcattctcccctctcctaggagctctt

SEQ ID NO: 422972 - DNA, 750 bp, Homo sapiens
gaaagatgtagcaataattatatttgtgtttatgagttttttttattaacctctacacttgataatgaaagaggtttccactgctaaaggaaaataaatctcttgatgccaaaattactaagccactagaaaagtcaagttgagaactatgtcaggcaaatctgcctcccattttatttctaaataagatagctacaaagataaaaaagctacatactttctttacaattagccaacaaggaaattccttgagaaccaaagacagacagaactcagagtcatttctctgagcctcgcctgagacaaatgcacatctgattgcttcctctgcactgctgttaatttagatatgcaggttcactgagccagactaaattgtattcagttgaatgcttatcaaggactcaagaatccagacttttatctcttatttacttatgacctggaagccctcacctcaagttgtcctgcattactggatcaaaccaagaaagagagagaggaaggaggaggtggagaaggaaaaaggtagggaaggaagatcttatacatattgattgatgtctcatgctttcctaaaatgtttaaaagctgctgggcatggtggctcacacctgtaatcccagcactttgggaggctaaggcgagcagttcaccaggtcaggagacatcctggctaacagggtgaaaccctgtctctactaaaaatacaaaaaattagctggtattcatagaaaatataatttttaa

SEQ ID NO: 422973 - DNA, 856 bp, Homo sapiens
accttgtgacatatctgtgcatccattactttggaggtgtgactctcctcttccatctgcaccatgcccagagaaagattgtgttgcatctctgggttcagcaaccaggtgctgtgtttcttgtgcccaggccttgcctgcagagagaattgtgacatagctgggtccagtaccaagtaacgtgactttgttgtctgtgccttgctttcgagaaggaattgtaacataaccctggacaggcaaccagccctcacctcaagttgtcctgcattactggatcaaaccaagaaagagagagaggaaggaggaggtggagaaggaaaaagacctgaaagtgattcacagaccatggggcccagaaacccgatcaaagtaacgtgtgcattgagtagacatgaggacatgaggatctccactttcttcctcttgctaaaaatgccctaaactgtgtaggtgaaacctgctgccacaccaccagatttagctccactaaatctgcagccccaaattctgattctgggttttgagatttgagaaataaaaaaaaactttaatctgagaaatgcaagtccttttttcaaactcagagacattaaaatgagaacacaattatttctttctcctccctttgaactatgtatttatctcttgaaactatttgctattgccacaagtagctataaactaaactaataatgtcacactggacactataacccataccttaaaccttaacaatgtatatccaatcaataatcagtgttatttctgtaaataaataagacttcctgacaacttttttttttggttggttgggttgtttgatttttgagacagtttcactcttgttgcccag

SEQ ID NO: 422974 - DNA, 1311 bp, Homo sapiens
aaactgagcctgaatcactgctcaggcttagtgagcctgctgaactctctttctgtctttgcaatctcttaagcagatttactgtcatgctgctcacattctggtttaattgtgtaataaacaattttatttctgttctatcattttggagtttctctggggctgcagaaattttttttaaattccatttccaaacactgtcttgaattaccagacataatataaacacataaggtgccaactaacctttaatctagaggaaactttttctttcaggcttcccatctattcacaattgtgctgcaaagtgtatgatgtcccctaaatatgcaggtggaattgtttttttgcctatttggtatatgtaattaactgtagtcgcttctagaaaggatagacaaaatttctacaaacttcacagagaaggaaccaaccatttacctcttcatttattattttttatttttttgagatggagtcttgctctgttgcccaggctggagtgcagtggcaccatctcggcctactgcaacctctgcctctcgggtttaagcgattcttctgcctcagcctcccaagtagctgggactacaggtgagttccaccatgcccagctaatttttgtatttttagtagacgaagtttcaccatattggctggattggtcttgatctcttgacctcctgatccacctgccttggcctcccacagtgctgggattacaggcgtgagccactgacccaggctattttacctttttcaatgactcttgtatcctcagacctgaaagtgattcacagaccatggggcccagaaacccgatcaaagtaacgtgtgcattgagtagacatgaggacatgaggatctccactttcttcctcttgctaaaaatgccctaaactgtgtaggtgaaacctgctgccacaccaccagatttagctccactaaatctgcagccccaaattctgattctgggttttgagatttgagaaataaaaaaaaactttaatctgagaaatgcaagtccttttttcaaactcagagacattaaaatgagaacacaattatttctttctcctccctttgaactatgtatttatctcttgaaactatttgctattgccacaagtagctataaactaaactaataatgtcacactggacactataacccataccttaaaccttaacaatgtatatccaatcaataatcagtgttatttctgtaaataaataagacttcctgacaacttttttttttggttggttgggttgtttgatttttgagacagtttcactcttgttgcccag

SEQ ID NO: 422975 - DNA, 1067 bp, Homo sapiens
  misc_feature (14)..(14): n is a, c, g, or t
  misc_feature (19)..(19): n is a, c, g, or t
cccccccccccccnccaangtttttctttcaggcttcccatctattcacaattgtgctgcaaagtgtatgatgtcccctaaatatgcaggtggaattgtttttttgcctatttggtatatgtaattaactgtagtcgcttctagaaaggatagacaaaatttctacaaacttcacagagaaggaaccaaccatttacctcttcatttattattttttatttttttgagatggagtcttgctctgttgcccaggctggagtgcagtggcaccatctcggcctactgcaacctctgcctctcgggtttaagcgattcttctgcctcagcctcccaagtagctgggactacaggtgagttccaccatgcccagctaatttttgtatttttagtagacgaagtttcaccatattggctggattggtcttgatctcttgacctcctgatccacctgccttggcctcccacagtgctgggattacaggcgtgagccactgacccaggctattttacctttttcaatgactcttgtatcctcagacctgaaagtgattcacagaccatggggcccagaaacccgatcaaagtaacgtgtgcattgagtagacatgaggacatgaggatctccactttcttcctcttgctaaaaatgccctaaactgtgtaggtgaaacctgctgccacaccaccagatttagctccactaaatctgcagccccaaattctgattctgggttttgagatttgagaaataaaaaaaaactttaatctgagaaatgcaagtccttttttcaaactcagagacattaaaatgagaacacaattatttctttctcctccctttgaactatgtatttatctcttgaaactatttgctattgccacaagtagctataaactaaactaataatgtcacactggacactataacccataccttaaaccttaacaatgtatatccaatcaataatcagtgttatttctgtaaataaataagacttcctgacaacttttttttttggttggttgggttgtttgatttttgagacagtttcactcttgttgcccag

SEQ ID NO: 422976 - DNA, 592 bp, Homo sapiens
  misc_feature (14)..(14): n is a, c, g, or t
  misc_feature (19)..(19): n is a, c, g, or t
cccccccccccccnccaangtttttctttcaggcttcccatctattcacaattgtgctgcaaagtgtatgatgtcccctaaatatgcaggtggaattgtttttttgcctatttggtatatgtaattaactgtagtcgcttctagaaaggatagacaaaatttctacaaacttcacagagaaggaaccaaccatttacctcttcatttattattttttatttttttgagatggagtctgggcaacaagagcgaaactccatctcacgaaaaaaaaaaaaaaaaaaaaaaaggcctgattctttcttgcccggcttatcattgggcagtcagctctgggtcactggaatcctctcacaatcaactagacatctttgcgacatttgaaaatgtccagaacagaattgtgtcatgctgacaagaatggttaattctgctctgtctcagtctaggataaattagtcatgctgttcttgtttctcatcttgtgtaagatggtacccagatgagagtttttgcagttttcttgtagttgggtgaaaaacaggagatctggagactcaaacagataaactaatttctaccatttcttatg

SEQ ID NO: 422977 - DNA, 1139 bp, Homo sapiens
accttgtgacatatctgtgcatccattactttggaggtgtgactctcctcttccatctgcaccatgcccagagaaagattgtgttgcatctctgggttcagcaaccaggtgctgtgtttcttgtgcccaggccttgcctgcagagagaattgtgacatagctgggtccagtaccaagtaacgtgactttgttgtctgtgccttgctttcgagaaggaattgtaacataaccctggacaggcaaccaggtaatatgactctcctgcctggtccttgtcctgaaaaattgtgacatatttccgactcagcatgcaggtgatgttactctcccatttactttctactcacaggttagattgtgacatacactttagcccagttcacagttgcgatgatgatactcataccacaaaccagtccatagcagagatactggtgctggtagctagacttagagaaacaggtaaagtcctggattaccattctttcacattttgtataaagtctttggacggtacagagagtgttatcatagggccaagcacacaggtgagactgtttctcaaatgcacaacctaccaaatgttagcattgtcaccctcacacgaatttcacacgtgaatggagtccacagtaaaaattgtgactgtcatatgtaatcatgtgacaacagttaagatggtgactcatttctaaacctagctcataggcaggtgagaactcttttctctagacccagccaattggagagatgttgactctaatgcatgagcctaggtccacaggtatgattatgagtttgtattagaaaaaaaagtctcagagcaaattgtgaccatcatggatattgtataaagccctcaggtagtatagagagttctataacagggcctagcacccaggtgacattgtgacactcgtatgcaaacccagccaacagtgaaaattgacaactttccacatgaacacagctcactgttgaagttctgaatctcacacctggaggtggttggaaaattgactctcaaacgtggattcggttcacacgtgggctggtgactctcaaaccaagattcagcatacctgtgaggctgtgactccactaaggggacacagtccacggcaaagattgaggctctc

SEQ ID NO: 422978 - DNA, 2033 bp, Homo sapiens
cggggtcggctcagtggccctgagaccctagctctgctctcggtccgctcgctgtccgctagcccgctgcgatgttgcgcgctgccgcccgcttcgggccccgcctgggccgccgcctcttgtcagccgccgccacccaggccgtgcctgcccccaaccagcagcccgaggtcttctgcaaccagattttcataaacaatgaatggcacgatgccgtcagcaggaaaacattccccaccgtcaatccgtccactggagaggtcatctgtcaggtagctgaaggggacaaggaagatgtggacaaggcagtgaaggccgcccgggccgccttccagctgggctcaccttggcgccgcatggacgcatcacacaggggccggctgctgaaccgcctggccgatctgatcgagcgggaccggacctacctggcggccttggagaccctggacaatggcaagccctatgtcatctcctacctggtggatttggacatggtcctcaaatgtctccggtattatgccggctgggctgataagtaccacgggaaaaccatccccattgacggagacttcttcagctacacacgccatgaacctgtgggggtgtgcgggcagatcattccgtggaatttcccgctcctgatgcaagcatggaagctgggcccagccttggcaactggaaacgtggttgtgatgaaggtagctgagcagacacccctcaccgccctctatgtggccaacctgatcaaggaggctggctttccccctggtgtggtcaacattgtgcctggatttggccccacggctggggccgccattgcctcccatgaggatgtggacaaagtggcattcacaggctccactgagattggccgcgtaatccaggttgctgctgggagcagcaacctcaagagagtgaccttggagctgggggggaagagccccaacatcatcatgtcagatgccgatatggattgggccgtggaacaggcccacttcgccctgttcttcaaccagggccagtgctgctgtgccggctcccggaccttcgtgcaggaggacatctatgatgagtttgtggagcggagcgttgcccgggccaagtctcgggtggtcgggaacccctttgatagcaagaccgagcaggggccgcaggtggatgaaactcagtttaagaagatcctcggctacatcaacacggggaagcaagagggggcgaagctgctgtgtggtgggggcattgctgctgaccgtggttacttcatccagcccactgtgtttggagatgtgcaggatggcatgaccatcgccaaggaggagatcttcgggccagtgatgcagatcctgaagttcaagaccatagaggaggttgttgggagagccaacaattccacgtacgggctggccgcagctgtcttcacaaaggatttggacaaggccaattacctgtcccaggccctccaggcgggcactgtgtgggtcaactgctatgatgtgtttggagcccagtcaccctttggtggctacaagatgtcggggagtggccgggagttgggcgagtacgggctgcaggcatacactgaagtgaaaactgtcacagtcaaagtgcctcagaagaactcataagaatcatgcaagcttcctccctcagccattgatggaaagttcagcaagatcagcaacaaaaccaagaaaaatgatccttgcgtgctgaatatctgaaaagagaaatttttcctacaaaatctcttgggtcaagaaagttctagaatttgaattgataaacatggtgggttggctgagggtaagagtatatgaggaaccttttaaacgacaacaatactgctagctttcaggatgatttttaaaaaatagattcaaatgtgttatcctctctctgaaacgcttcctataactcgagtttataggggaagaaaaagctattgtttacaattatatcaccattaaggcaactgctacaccctgctttgtattctgggctaagattcattaaaaactagctgctcttaaaaa

SEQ ID NO: 422979 - DNA, 718 bp, Homo sapiens
gcttgcagtgagctgagatcgcgccactgcactccagcctgggcaacagagcgagactctgtctcagaaaaaaaaataaaaaataaaaaaattaaaacttagatgggcgtcttggcaggcatgatgatgagtttgtggagcggagcgttgcccgggccaagtctcgggtggtcgggaacccctttgatagcaagaccgagcaggggccgcaggtggatgaaactcagtttaagaagatcctcggctacatcaacacggggaagcaagagggggcgaagctgctgtgtggtgggggcattgctgctgaccgtggttacttcatccagcccactgtgtttggagatgtgcaggatggcatgaccatcgccaaggaggagatcttcgggccagtgatgcagatcctgaagttcaagaccatagaggaggttgttgggagagccaacaattccacgtacgggctggccgcagctgtcttcacaaaggatttggacaaggccaattacctgtcccaggccctccaggcgggcactgtgtggacaactgctatgaacactctgagcccagttacccctggcggctacaagagtccggaactgaccgccagctgggcagtccgcgctgcaagcacacctgaagtgataactgtccacagcaaaggccccactataacgtccagcattatgcaagccccctccttaaccattgacgtaacgctcaa

SEQ ID NO: 422980 - DNA, 476 bp, Homo sapiens
aggtatcgtcttaatgaccctagcctccgtcgcatgagcagactttaggacaaccatccatgtgccggctcccggaccttcgtgcaggaggacatctatgatgagtttgtggagcggagcgttgcccgggccaagtctcgggtggtcgggaacccctttgatagcaagaccgagcaggggccgcaggtggatgaaactcagtttaagaagatcctcggctacatcaacacggggaagcaagagggggcgaagctgctgtgtggtgggggcattgctgctgacccacacagtgcccgcctggagggcctgggacaggtaattggccttgtccaaatcctttgtgaagacagctgcggccagcccgtacgtggaattgttggctctcccaacaacctcctctatggtcttgaacttcaggatctgcatcactggcccgaagatctccttcttggcgatggtcatgccatcctgcacat

SEQ ID NO: 422981 - DNA, 2335 bp, Homo sapiens
cggggtcggctcagtggccctgagaccctagctctgctctcggtccgctcgctgtccgctagcccgctgcgatgttgcgcgctgccgcccgcttcgggccccgcctgggccgccgcctcttgtcagccgccgccacccaggccgtgcctgcccccaaccagcagcccgaggtcttctgcaaccagattttcataaacaatgaatggcacgatgccgtcagcaggaaaacattccccaccgtcaatccgtccactggagaggtcatctgtcaggtagctgaaggggacaaggaagatgtggacaaggcagtgaaggccgcccgggccgccttccagctgggctcaccttggcgccgcatggacgcatcacacaggggccggctgctgaaccgcctggccgatctgatcgagcgggaccggacctacctggcggccttggagaccctggacaatggcaagccctatgtcatctcctacctggtggatttggacatggtcctcaaatgtctccggtattatgccggctgggctgataagtaccacgggaaaaccatccccattgacggagacttcttcagctacacacgccatgaacctgtgggggtgtgcgggcagatcattccgtggaatttcccgctcctgatgcaagcatggaagctgggcccagccttggcaactggaaacgtggttgtgatgaaggtagctgagcagacacccctcaccgccctctatgtggccaacctgatcaaggaggctggctttccccctggtgtggtcaacattgtgcctggatttggccccacggctggggccgccattgcctcccatgaggatgtggacaaagtggcattcacaggctccactgagattggccgcgtaatccaggttgctgctgggagcagcaacctcaagagagtgaccttggagctgggggggaagagccccaacatcatcatgtcagatgccgatatggattgggccgtggaacaggcccacttcgccctgttcttcaaccagggccagtgctgctgtgccggctcccggaccttcgtgcaggaggacatctatgatgagtttgtggagcggagcgttgcccgggccaagtctcgggtggtcgggaacccctttgatagcaagaccgagcaggggccgcaggtggatgaaactcagtttaagaagatcctcggctacatcaacacggggaagcaagagggggcgaagctgctgtgtggtgggggcattgctgctgaccgtggttacttcatccagcccactgtgtttggagatgtgcaggatggcatgaccatcgccaaggaggagatcttcgggccagtgatgcagatcctgaagttcaagaccatagaggaggttgttgggagagccaacaattccacgtacgggctggccgcagctgtcttcacaaaggatttggacaaggccaattacctgtcccaggccctccaggcgggcactgtgtgggtcaactgctatgatgtgtttggagcccagtcaccctttggtggctacaagatgtcggggagtggccgggagttgggcgagtacgggctgcaggcatacactgaagtgaaaactgtcacagtcaaagtgcctcagaagaactcataagaatcatgcaagcttcctccctcagccattgatggaaagttcagcaagatcagcaacaaaaccaagaaaaatgatccttgcgtgctgaatatctgaaaagagaaatttttcctacaaaatctcttgggtcaagaaagttctagaatttgaattgataaacatggtgggttggctgagggtaagagtatatgaggaaccttttaaacgacaacaatactgctagctttcaggatgatttttaaaaaatagattcaaatgtgttatcctctctctgaaacgcttcctataactcgagtttataggggaagaaaaagctattgtttacaattatatcaccattaaggcaactgctacaccctgctttgtattctgggctaagattcattaaaaactagctgctcttaaaaactgtagggaccagccccacagggtcggtgggtttttctccccatgtgcggagacgagagattgtagaaataaagacacaagacaaagaggtaaaagaaaagacagctgggcttgggggaccactaccaccaagaggcggagaccggtagaggccccgaatgtctggctgcactgttatttattggatacaaagcaaaaggggcagggtaaagagtgtgagtcatctccaatgacaggtaaggtcacgtgggtcacgtgtccactggacagggggcccttccctgcctggcagccaaggcaga

SEQ ID NO: 422982 - DNA, 2117 bp, Homo sapiens
cggggtcggctcagtggccctgagaccctagctctgctctcggtccgctcgctgtccgctagcccgctgcgatgttgcgcgctgccgcccgcttcgggccccgcctgggccgccgcctcttgtcagccgccgccacccaggccgtgcctgcccccaaccagcagcccgaggtcttctgcaaccaggatccagattttcgatacaatcgagattgagatggctacgagtgccagtcatgctaggaaaatcattccccacctgtcaatcccgtccacctgcgagagagtcatcttgtcaggtatctagaatcgggacgcggaagatgtggacaaggcattgaacggtcgtccgtggccgctcttcctgagactggagctctacctttgtgacgccagctgttgtgacatcaattccacgagctagtggcggctcagtgcgttgcatgtaaccagtccatgtgtccgattcctgaatcagaggtcgaggcactcgggatccatatcgcatgtggcggggccttggagaccctggacaatggcaagccctatgtcatctcctacctggtggatttggacatggtcctcaaatgtctccggtattatgccggctgggctgataagtaccacgggaaaaccatccccattgacggagacttcttcagctacacacgccatgaacctgtgggggtgtgcgggcagatcattccgtggaatttcccgctcctgatgcaagcatggaagctgggcccagccttggcaactggaaacgtggttgtgatgaaggtagctgagcagacacccctcaccgccctctatgtggccaacctgatcaaggaggctggctttccccctggtgtggtcaacattgtgcctggatttggccccacggctggggccgccattgcctcccatgaggatgtggacaaagtggcattcacaggctccactgagattggccgcgtaatccaggttgctgctgggagcagcaacctcaagagagtgaccttggagctgggggggaagagccccaacatcatcatgtcagatgccgatatggattgggccgtggaacaggcccacttcgccctgttcttcaaccagggccagtgctgctgtgccggctcccggaccttcgtgcaggaggacatctatgatgagtttgtggagcggagcgttgcccgggccaagtctcgggtggtcgggaacccctttgatagcaagaccgagcaggggccgcaggtggatgaaactcagtttaagaagatcctcggctacatcaacacggggaagcaagagggggcgaagctgctgtgtggtgggggcattgctgctgaccgtggttacttcatccagcccactgtgtttggagatgtgcaggatggcatgaccatcgccaaggaggagatcttcgggccagtgatgcagatcctgaagttcaagaccatagaggaggttgttgggagagccaacaattccacgtacgggctggccgcagctgtcttcacaaaggatttggacaaggccaattacctgtcccaggccctccaggcgggcactgtgtgggtcaactgctatgatgtgtttggagcccagtcaccctttggtggctacaagatgtcggggagtggccgggagttgggcgagtacgggctgcaggcatacactgaagtgaaaactgtcacagtcaaagtgcctcagaagaactcataagaatcatgcaagcttcctccctcagccattgatggaaagttcagcaagatcagcaacaaaaccaagaaaaatgatccttgcgtgctgaatatctgaaaagagaaatttttcctacaaaatctcttgggtcaagaaagttctagaatttgaattgataaacatggtgggttggctgagggtaagagtatatgaggaaccttttaaacgacaacaatactgctagctttcaggatgatttttaaaaaatagattcaaatgtgttatcctctctctgaaacgcttcctataactcgagtttataggggaagaaaaagctattgtttacaattatatcaccattaaggcaactgctacaccctgctttgtattctgggctaagattcattaaaaactagctgctcttaaaaa

SEQ ID NO: 422983 - DNA, 1806 bp, Homo sapiens
cggggtcggctcagtggccctgagaccctagctctgctctcggtccgctcgctgtccgctagcccgctgcgatgttgcgcgctgccgcccgcttcgggccccgcctgggccgccgcctcttgtcagccgccgccacccaggccgtgcctgcccccaaccagcagcccgaggtcttctgcaaccagattttcataaacaatgaatggcacgatgccgtcagcaggaaaacattccccaccgtcaatccgtccactggagaggtcatctgtcaggtagctgaaggggacaaggaagatgtggacaaggcagtgaaggccgcccgggccgccttccagctgggctcaccttggcgccgcatggacgcatcacacaggggccggctgctgaaccgcctggccgatctgatcgagcgggaccggacctacctggcggccttggagaccctggacaatggcaagccctatgtcatctcctacctggtggatttggacatggtcctcaaatgtctccggtattatgccggctgggctgataagtaccacgggaaaaccatccccattgacggagacttcttcagctacacacgccattgcctcccatgaggatgtggacaaagtggcattcacaggctccactgagattggccgcgtaatccaggttgctgctgggagcagcaacctcaagagagtgaccttggagctgggggggaagagccccaacatcatcatgtcagatgccgatatggattgggccgtggaacaggcccacttcgccctgttcttcaaccagggccagtgctgctgtgccggctcccggaccttcgtgcaggaggacatctatgatgagtttgtggagcggagcgttgcccgggccaagtctcgggtggtcgggaacccctttgatagcaagaccgagcaggggccgcaggtggatgaaactcagtttaagaagatcctcggctacatcaacacggggaagcaagagggggcgaagctgctgtgtggtgggggcattgctgctgaccgtggttacttcatccagcccactgtgtttggagatgtgcaggatggcatgaccatcgccaaggaggagatcttcgggccagtgatgcagatcctgaagttcaagaccatagaggaggttgttgggagagccaacaattccacgtacgggctggccgcagctgtcttcacaaaggatttggacaaggccaattacctgtcccaggccctccaggcgggcactgtgtgggtcaactgctatgatgtgtttggagcccagtcaccctttggtggctacaagatgtcggggagtggccgggagttgggcgagtacgggctgcaggcatacactgaagtgaaaactgtcacagtcaaagtgcctcagaagaactcataagaatcatgcaagcttcctccctcagccattgatggaaagttcagcaagatcagcaacaaaaccaagaaaaatgatccttgcgtgctgaatatctgaaaagagaaatttttcctacaaaatctcttgggtcaagaaagttctagaatttgaattgataaacatggtgggttggctgagggtaagagtatatgaggaaccttttaaacgacaacaatactgctagctttcaggatgatttttaaaaaatagattcaaatgtgttatcctctctctgaaacgcttcctataactcgagtttataggggaagaaaaagctattgtttacaattatatcaccattaaggcaactgctacaccctgctttgtattctgggctaagattcattaaaaactagctgctcttaaaaa

SEQ ID NO: 422984 - DNA, 2193 bp, Homo sapiens
cggggtcggctcagtggccctgagaccctagctctgctctcggtccgctcgctgtccgctagcccgctgcgatgttgcgcgctgccgcccgcttcgggccccgcctgggccgccgcctcttgtcagccgccgccacccaggccgtgcctgcccccaaccagcagcccgaggtcttctgcaaccagattttcataaacaatgaatggcacgatgccgtcagcaggaaaacattccccaccgtcaatccgtccactggagaggtcatctgtcaggtagctgaaggggacaaggaagatgtggacaaggcagtgaaggccgcccgggccgccttccagctgggctcaccttggcgccgcatggacgcatcacacaggggccggctgctgaaccgcctggccgatctgatcgagcgggaccggacctacctggcggccttggagaccctggacaatggcaagccctatgtcatctcctacctggtggatttggacatggtcctcaaatgtctccggtattatgccggctgggctgataagtaccacgggaaaaccatccccattgacggagacttcttcagctacacacgccatgaacctgtgggggtgtgcgggcagatcattccgtggaatttcccgctcctgatgcaagcatggaagctgggcccagccttggcaactggaaacgtggttgtgatgaaggtagctgagcagacacccctcaccgccctctatgtggccaacctgatcaaggaggctggctttccccctggtgtggtcaacattgtgcctggatttggccccacggctggggccgccattgcctcccatgaggatgtggacaaagtggcattcacaggctccactgagattggccgcgtaatccaggttgctgctgggagcagcaacctcaagagagtgaccttggagctgggggggaagagccccaacatcatcatgtcagatgccgatatggattgggccgtggaacaggcccacttcgccctgttcttcaaccagggccagtgctgctgtgccggctcccggaccttcgtgcaggaggacatctatgatgagtttgtggagcggagcgttgcccgggccaagtctcgggtggtcgggaacccctttgatagcaagaccgagcaggggccgcaggtggatgaaactcagtttaagaagatcctcggctacatcaacacggggaagcaagagggggcgaagctgctgtgtggtgggggcattgctgctgaccgtggttacttcatccagcccactgtgtttggagatgtgcaggatggcatgaccatcgccaaggaggagatcttcgggccagtgatgcagatcctgaagttcaagaccatagaggaggttgttgggagagccaacaattccacgtacgggctggccgcagctgtcttcacaaaggatttggacaaggccaattacctgtcccaggccctccaggcgggcactgtgtgggtcaactgctatgatgtgtttggagcccagtcaccctttggtggctacaagatgtcggggagtggccgggagttgggcgagtacgggctgcaggcatacactgaagtgaaaactgtcacagtcaaagtgcctcagaagaactcataagaatcatgcaagcttcctccctcagccattgatggaaagttcagcaagatcagcaacaaaaccaagaaaaatgatccttgcgtgctgaatatctgaaaagagaaatttttcctacaaaatctcttgggtcaagaaagttctagaatttgaattgataaacatggtgggttggctgagggtaagagtatatgaggaaccttttaaacgacaacaatactgctagctttcaggatgatttttaaaaaatagattcaaatgtgttatcctctctctgaaacgcttcctataactcgagtttataggggaagaaaaagctattgtgctcatccttgaaggatgagaaactgtatcacaagaaacaaaccaaaaaataatgcttaacagcctagatgagatttcaaaccatacaccaaaactaaacagctcccattaaaacagctaggtgcattggctcacaaaatgctgtaatgccctagcattttgggaggccgatgagggaggatcccatgacccccaggaattcgagaccagcctaagcaacatagcagcattctcatacggggatcct

SEQ ID NO: 422985 - DNA, 1075 bp, Homo sapiens
  misc_feature (9)..(9): n is a, c, g, or t
aggtatctngctctgcctcgattctcagtctcatgtatgtatgcacttcgactcttagggacaccaaccatgtgccggctcccggaccttcgtgcaggaggacatctatgatgagtttgtggagcggagcgttgcccgggccaagtctcgggtggtcgggaacccctttgatagcaagaccgagcaggggccgcaggtggatgaaactcagtttaagaagatcctcggctacatcaacacggggaagcaagagggggcgaagctgctgtgtggtgggggcattgctgctgaccgtggttacttcatccagcccactgtgtttggagatgtgcaggatggcatgaccatcgccaaggaggagatcttcgggccagtgatgcagatcctgaagttcaagaccatagaggaggttgttgggagagccaacaattccacgtacgggctggccgcagctgtcttcacaaaggatttggacaaggccaattacctgtcccaggccctccaggcgggcactgtgtgggtcaactgctatgatgtgtttggagcccagtcaccctttggtggctacaagatgtcggggagtggccgggagttgggcgagtacgggctgcaggcatacactgaagtgaaaactgtcacagtcaaagtgcctcagaagaactcataagaatcatgcaagcttcctccctcagccattgatggaaagttcagcaagatcagcaacaaaaccaagaaaaatgatccttgcgtgctgaatatctgaaaagagaaatttttcctacaaaatctcttgggtcaagaaagttctagaatttgaattgataaacatggtgggttggctgagggtaagagtatatgaggaaccttttaaacgacaacaatactgctagctttcaggatgatttttaaaaaatagattcaaatgtgttatcctctctctgaaacgcttcctataactcgagtttataggggaagaaaaagctattgtttacaattatatcaccattaaggcaactgctacaccctgctttgtattctgggctaagattcattaaaaactagctgctcttaaaaa

SEQ ID NO: 422986 - DNA, 1456 bp, Homo sapiens
cggggtcggctcagtggccctgagaccctagctctgctctcggtccgctcgctgtccgctagcccgctgcgatgttgcgcgctgccgcccgcttcgggccccgcctgggccgccgcctcttgtcagccgccgccacccaggccgtgcctgcccccaaccagcagcccgaggtcttctgcaaccagattttcataaacaatgaatggcacgatgccgtcagcaggaaaacattccccaccgtcaatccgtccactggagaggtcatctgtcaggtagctgaaggggacaaggaagatgtggacaaggcagtgaaggccgcccgggccgccttccagctgggctcaccttggcgccgcatggacgcatcacacaggggccggctgctgaaccgcctggccgatctgatcgagcgggaccggacctacctggcggccttggagaccctggacaatggcaagccctatgtcatctcctacctggtggatttgatgatgagtttgtggagcggagcgttgcccgggccaagtctcgggtggtcgggaacccctttgatagcaagaccgagcaggggccgcaggtggatgaaactcagtttaagaagatcctcggctacatcaacacggggaagcaagagggggcgaagctgctgtgtggtgggggcattgctgctgaccgtggttacttcatccagcccactgtgtttggagatgtgcaggatggcatgaccatcgccaaggaggagatcttcgggccagtgatgcagatcctgaagttcaagaccatagaggaggttgttgggagagccaacaattccacgtacgggctggccgcagctgtcttcacaaaggatttggacaaggccaattacctgtcccaggccctccaggcgggcactgtgtgggtcaactgctatgatgtgtttggagcccagtcaccctttggtggctacaagatgtcggggagtggccgggagttgggcgagtacgggctgcaggcatacactgaagtgaaaactgtcacagtcaaagtgcctcagaagaactcataagaatcatgcaagcttcctccctcagccattgatggaaagttcagcaagatcagcaacaaaaccaagaaaaatgatccttgcgtgctgaatatctgaaaagagaaatttttcctacaaaatctcttgggtcaagaaagttctagaatttgaattgataaacatggtgggttggctgagggtaagagtatatgaggaaccttttaaacgacaacaatactgctagctttcaggatgatttttaaaaaatagattcaaatgtgttatcctctctctgaaacgcttcctataactcgagtttataggggaagaaaaagctattgtttacaattatatcaccattaaggcaactgctacaccctgctttgtattctgggctaagattcattaaaaactagctgctcttaaaaa

SEQ ID NO: 422987 - DNA, 1976 bp, Homo sapiens
cggggtcggctcagtggccctgagaccctagctctgctctcggtccgctcgctgtccgctagcccgctgcgatgttgcgcgctgccgcccgcttcgggccccgcctgggccgccgcctcttgtcagccgccgccacccaggccgtgcctgcccccaaccagcagcccgaggtcttctgcaaccagattttcataaacaatgaatggcacgatgccgtcagcaggaaaacattccccaccgtcaatccgtccactggagaggtcatctgtcaggtagctgaaggggacaaggaagatgtggacaaggcagtgaaggccgcccgggccgccttccagctgggctcaccttggcgccgcatggacgcatcacacaggggccggctgctgaaccgcctggccgatctgatcgagcgggaccggacctacctggcggccttggagaccctggacaatggcaagccctatgtcatctcctacctggtggatttggacatggtcctcaaatgtctccggtattatgccggctgggctgataagtaccacgggaaaaccatccccattgacggagacttcttcagctacacacgccatgaacctgtgggggtgtgcgggcagatcattccgtggaatttcccgctcctgatgcaagcatggaagctgggcccagccttggcaactggaaacgtggttgtgatgaaggtagctgagcagacacccctcaccgccctctatgtggccaacctgatcaaggaggctggctttccccctggtgtggtcaacattgtgcctggatttggccccacggctggggccgccattgcctcccatgaggatgtggacaaagtggcattcacaggctccactgagattggccgcgtaatccaggttgctgctgggagcagcaacctcaagagagtgaccttggagctgggggggaagagccccaacatcatcatgtcagatgccgatatggattgggccgtggaacaggcccacttcgccctgttcttcaaccagggccagtgctgctgtgccggctcccggaccttcgtgcaggaggacatctatgatgagtttgtggagcggagcgttgcccgggccaagtctcgggtggtcgggaacccctttgatagcaagaccgagcaggggccgcaggtggatgaaactcagtttaagaagatcctcggctacatcaacacggggaagcaagagggggcgaagctgctgtgtggtgggggcattgctgctgaccgtggttacttcatccagcccactgtgtttggagatgtgcaggatggcatgaccatcgccaaggaggagatcttcgggccagtgatgcagatcctgaagttcaagaccatagaggaggttgttgggagagccaacaattccacgtacgggctggccgcagctgtcttcacaaaggatttggacaaggccaattacctgtcccaggccctccaggcgggcactgtgtgggtcaactgctatgatgtgtttggagcccagtcaccctttggtggctacaagatgtcggggagtggccgggagttgggcgagtacgggctgcaggcatacactgaagtgaaaactgtcacagtcaaagtgcctcagaagaactcataagaatcatgcaagcttcctccctcagccattgatggaaagttcagcaagatcagcaacaaaaccaagaaaaatgatccttgcgtgctgaatatctgaaaagagaaatttttcctggctgagggtaagagtatatgaggaaccttttaaacgacaacaatactgctagctttcaggatgatttttaaaaaatagattcaaatgtgttatcctctctctgaaacgcttcctataactcgagtttataggggaagaaaaagctattgtttacaattatatcaccattaaggcaactgctacaccctgctttgtattctgggctaagattcattaaaaactagctgctcttaaaaa

SEQ ID NO: 422988 - DNA, 1988 bp, Homo sapiens
cggggtcggctcagtggccctgagaccctagctctgctctcggtccgctcgctgtccgctagcccgctgcgatgttgcgcgctgccgcccgcttcgggccccgcctgggccgccgcctcttgtcagccgccgccacccaggccgtgcctgcccccaaccagcagcccgaggtcttctgcaaccagattttcataaacaatgaatggcacgatgccgtcagcaggaaaacattccccaccgtcaatccgtccactggagaggtcatctgtcaggtagctgaaggggacaaggaagatgtggacaaggcagtgaaggccgcccgggccgccttccagctgggctcaccttggcgccgcatggacgcatcacacaggggccggctgctgaaccgcctggccgatctgatcgagcgggaccggacctacctggcggccttggagaccctggacaatggcaagccctatgtcatctcctacctggtggatttggacatggtcctcaaatgtctccggtattatgccggctgggctgataagtaccacgggaaaaccatccccattgacggagacttcttcagctacacacgccatgaacctgtgggggtgtgcgggcagatcattccgtggaatttcccgctcctgatgcaagcatggaagctgggcccagccttggcaactggaaacgtggttgtgatgaaggtagctgagcagacacccctcaccgccctctatgtggccaacctgatcaaggaggctggctttccccctggtgtggtcaacattgtgcctggatttggccccacggctggggccgccattgcctcccatgaggatgtggacaaagtggcattcacaggctccactgagattggccgcgtaatccaggttgctgctgggagcagcaacctcaagagagtgaccttggagctgggggggaagagccccaacatcatcatgtcagatgccgatatggattgggccgtggaacaggcccacttcgccctgttcttcaaccagggccagtgctgctgtgccggctcccggaccttcgtgcaggaggacatctatgatgagtttgtggagcggagcgttgcccgggccaagtctcgggtggtcgggaacccctttgatagcaagaccgagcaggggccgcaggtggatgaaactcagtttaagaagatcctcggctacatcaacacggggaagcaagagggggcgaagctgctgtgtggtgggggcattgctgctgaccgtggttacttcatccagcccactgtgtttggagatgtgcaggatggcatgaccatcgccaaggaggagatcttcgggccagtgatgcagatcctgaagttcaagaccatagaggaggttgttgggagagccaacaattccacgtacgggctggccgcagctgtcttcacaaaggatttggacaaggccaattacctgtcccaggccctccaggcgggcactgtgtgggtcaactgctatgatgtgtttggagcccagtcaccctttggtggctacaagatgtcggggagtggccgggagttgggcgagtacgggctgcaggcatacactgaagtgaaaactcttcctccctcagccattgatggaaagttcagcaagatcagcaacaaaaccaagaaaaatgatccttgcgtgctgaatatctgaaaagagaaatttttcctacaaaatctcttgggtcaagaaagttctagaatttgaattgataaacatggtgggttggctgagggtaagagtatatgaggaaccttttaaacgacaacaatactgctagctttcaggatgatttttaaaaaatagattcaaatgtgttatcctctctctgaaacgcttcctataactcgagtttataggggaagaaaaagctattgtttacaattatatcaccattaaggcaactgctacaccctgctttgtattctgggctaagattcattaaaaactagctgctcttaaaaa

SEQ ID NO: 422989 - DNA, 1976 bp, Homo sapiens
cggggtcggctcagtggccctgagaccctagctctgctctcggtccgctcgctgtccgctagcccgctgcgatgttgcgcgctgccgcccgcttcgggccccgcctgggccgccgcctcttgtcagccgccgccacccaggccgtgcctgcccccaaccagcagcccgaggtcttctgcaaccagattttcataaacaatgaatggcacgatgccgtcagcaggaaaacattccccaccgtcaatccgtccactggagaggtcatctgtcaggtagctgaaggggacaaggaagatgtggacaaggcagtgaaggccgcccgggccgccttccagctgggctcaccttggcgccgcatggacgcatcacacaggggccggctgctgaaccgcctggccgatctgatcgagcgggaccggacctacctggcggccttggagaccctggacaatggcaagccctatgtcatctcctacctggtggatttggacatggtcctcaaatgtctccggtattatgccggctgggctgataagtaccacgggaaaaccatccccattgacggagacttcttcagctacacacgccatgaacctgtgggggtgtgcgggcagatcattccgtggaatttcccgctcctgatgcaagcatggaagctgggcccagccttggcaactggaaacgtggttgtgatgaaggtagctgagcagacacccctcaccgccctctatgtggccaacctgatcaaggaggctggctttccccctggtgtggtcaacattgtgcctggatttggccccacggctggggccgccattgcctcccatgaggatgtggacaaagtggcattcacaggctccactgagattggccgcgtaatccaggttgctgctgggagcagcaacctcaagagagtgaccttggagctgggggggaagagccccaacatcatcatgtcagatgccgatatggattgggccgtggaacaggcccacttcgccctgttcttcaaccagggccagtgctgctgtgccggctcccggaccttcgtgcaggaggacatctatgatgagtttgtggagcggagcgttgcccgggccaagtctcgggtggtcgggaacccctttgatagcaagaccgagcaggggccgcaggtggatgaaactcagtttaagaagatcctcggctacatcaacacggggaagcaagagggggcgaagctgctgtgtggtgggggcattgctgctgaccgtggttacttcatccagcccactgtgtttggagatgtgcaggatggcatgaccatcgccaaggaggagatcttcgggccagtgatgcagatcctgaagttcaagaccatagaggaggttgttgggagagccaacaattccacgtacgggctggccgcagctgtcttcacaaaggatttggacaaggccaattacctgtcccaggccctccaggcgggcactgtgtgggtcaactgctatgatgtgtttggagcccagtcaccctttggtggctacaagatgtcggggagtggccgggagttgggcgagtacgggctgcaggcatacactgaagtgaaaactgtcacagtcaaagtgcctcagaagaactcataagaatcatgcaagcttcctccctcagccattgatggaaagttcagcaagatcagcatacaaaatctcttgggtcaagaaagttctagaatttgaattgataaacatggtgggttggctgagggtaagagtatatgaggaaccttttaaacgacaacaatactgctagctttcaggatgatttttaaaaaatagattcaaatgtgttatcctctctctgaaacgcttcctataactcgagtttataggggaagaaaaagctattgtttacaattatatcaccattaaggcaactgctacaccctgctttgtattctgggctaagattcattaaaaactagctgctcttaaaaa

SEQ ID NO: 422990 - DNA, 962 bp, Homo sapiens
  misc_feature (11)..(11): n is a, c, g, or t
  misc_feature (15)..(15): n is a, c, g, or t
ctagaactcgnggancccctgtgctgcaggaattcggcacgagcgggaacctttttgatagcaagaccgagcaggggccgcaggtggatgaaactcagtttaagaagatcctcggctacatcaacacggggaagcaagagggggcgaagctgctgtgtggtgggggcattgctgctgaccgtggttacttcatccagcccactgtgtttggagatgtgcaggatggcatgaccatcgccaaggaggagatcttcgggccagtgatgcagatcctgaagttcaagaccatagaggaggttgttgggagagccaacaattccacgtacgggctggccgcagctgtcttcacaaaggatttggacaaggccaattacctgtcccaggccctccaggcgggcactgtgtgggtcaactgctatgatgtgtttggagcccagtcaccctttggtggctacaagatgtcggggagtggccgggagttgggcgagtacgggctgcaggcatacactgaagtgaaaactgtcacagtcaaagtgcctcagaagaactcataagaatcatgcaagcttcctccctcagccattgatggaaagttcagcaagatcagcaacaaaaccaagaaaaatgatccttgcgtgctgaatatctgaaaagagaaatttttcctacaaaatctcttgggtcaagaaagttctagaatttgaattgataaacatggtgggttggctgagggtaagagtatatgaggaaccttttaaacgacaacaatactgctagctttcaggatgatttttaaaaaatagattcaaatgtgttatcctctctctgaaacgcttcctataactcgagtttataggggaagaaaaagctattgtttacaattatatcaccattaaggcaactgctacaccctgctttgtattctgggctaagattcattaaaaactagctgctcttaaaaa

SEQ ID NO: 422991 - DNA, 960 bp, Homo sapiens
cggggtcggctcagtggccctgagaccctagctctgctctcggtccgctcgctgtccgctagcccgctgcgatgttgcgcgctgccgcccgcttcgggccccgcctgggccgccgcctcttgtcagccgccgccacccaggccgtgcctgctgtgtggtgggggcattgctgctgaccgtggttacttcatccagcccactgtgtttggagatgtgcaggatggcatgaccatcgccaaggaggagatcttcgggccagtgatgcagatcctgaagttcaagaccatagaggaggttgttgggagagccaacaattccacgtacgggctggccgcagctgtcttcacaaaggatttggacaaggccaattacctgtcccaggccctccaggcgggcactgtgtgggtcaactgctatgatgtgtttggagcccagtcaccctttggtggctacaagatgtcggggagtggccgggagttgggcgagtacgggctgcaggcatacactgaagtgaaaactgtcacagtcaaagtgcctcagaagaactcataagaatcatgcaagcttcctccctcagccattgatggaaagttcagcaagatcagcaacaaaaccaagaaaaatgatccttgcgtgctgaatatctgaaaagagaaatttttcctacaaaatctcttgggtcaagaaagttctagaatttgaattgataaacatggtgggttggctgagggtaagagtatatgaggaaccttttaaacgacaacaatactgctagctttcaggatgatttttaaaaaatagattcaaatgtgttatcctctctctgaaacgcttcctataactcgagtttataggggaagaaaaagctattgtttacaattatatcaccattaaggcaactgctacaccctgctttgtattctgggctaagattcattaaaaactagctgctcttaaaaa

SEQ ID NO: 422992 - DNA, 841 bp, Homo sapiens
  misc_feature (14)..(14): n is a, c, g, or t
ccagaggatcccanctctcctctcgacatctctgtgtggtgggggcattgctgctgaccgtggttacttcatccagcccactgtgtttggagatgtgcaggatggcatgaccatcgccaaggaggagatcttcgggccagtgatgcagatcctgaagttcaagaccatagaggaggttgttgggagagccaacaattccacgtacgggctggccgcagctgtcttcacaaaggatttggacaaggccaattacctgtcccaggccctccaggcgggcactgtgtgggtcaactgctatgatgtgtttggagcccagtcaccctttggtggctacaagatgtcggggagtggccgggagttgggcgagtacgggctgcaggcatacactgaagtgaaaactgtcacagtcaaagtgcctcagaagaactcataagaatcatgcaagcttcctccctcagccattgatggaaagttcagcaagatcagcaacaaaaccaagaaaaatgatccttgcgtgctgaatatctgaaaagagaaatttttcctacaaaatctcttgggtcaagaaagttctagaatttgaattgataaacatggtgggttggctgagggtaagagtatatgaggaaccttttaaacgacaacaatactgctagctttcaggatgatttttaaaaaatagattcaaatgtgttatcctctctctgaaacgcttcctataactcgagtttataggggaagaaaaagctattgtttacaattatatcaccattaaggcaactgctacaccctgctttgtattctgggctaagattcattaaaaactagctgctcttaaaaa

SEQ ID NO: 422993 - DNA, 1434 bp, Homo sapiens
cggggtcggctcagtggccctgagaccctagctctgctctcggtccgctcgctgtccgctagcccgctgcgatgttgcgcgctgccgcccgcttcgggccccgcctgggccgccgcctcttgtcagccgccgccacccaggccgtgcctgcccccaaccagcagcccgaggtcttctgcaaccagattttcataaacaatgaatggcacgatgccgtcagcaggaaaacattccccaccgtcaatccgtccactggagaggtcatctgtcaggtagctgaaggggacaaggaagatgtggacaaggcagtgaaggccgcccgggccgccttccagctgggctcaccttggcgccgcatggacgcatcacacaggggccggctgctgaaccgcctggccgatctgatcgagcgggaccggacctacctggcggccttggagaccctggacaatggcaagccctatgtcatctcctacctggtggatttggacatggtcctcaaatgtctccggtattatgccggctgggctgataagtaccacgggaaaaccatccccattgacggagacttcttcagctacacacgccatgaacctgtgggggtgtgcgggcagatcattccgtggaatttcccgctcctgatgcaagcatggaagctgggcccagccttggcaactggaaacgtggttgtgatgaaggtagctgagcagacacccctcaccgccctctatgtggccaacctgatcaaggaggctggctttccccctggtgtggtcaacattgtgcctggatttggccccacggctggggccgccattgcctcccatgaggatgtggacaaagtggcattcacaggctccactgagattggccgcgtaatccaggttgctgctgggagcagcaacctcaagagagtgaccttggagctgggggggaagagccccaacatcatcatgtcagatgccgatatggattgggccgtggaacaggcccacttcgccctgttcttcaaccagggccagtgctgctgtgccggctcccggaccttcgtgcaggaggacatctatgatgagtttgtggagcggagcgttgcccgggccaagtctcgggtggtcgggaacccctttgatagcaagaccgagcaggggccgcaggtggatgaaactcagtttaagaagatcctcggctacatcaacacggggaagcaagagggggcgaagctgctgtgtggtgggggcattgctgctgaccgtggttacttcatccagcccactgtgtttggagatgtgcaggatggcatgaccatcgccaaggaggagatcttcgggccagtgatgcagatcctgaagttcaagaccatagaggaggtcggagagggaggggatgtcggagagggagaggatgtctgagagggagggatgtcggagagggaga

SEQ ID NO: 422994 - DNA, 1409 bp, Homo sapiens
cggggtcggctcagtggccctgagaccctagctctgctctcggtccgctcgctgtccgctagcccgctgcgatgttgcgcgctgccgcccgcttcgggccccgcctgggccgccgcctcttgtcagccgccgccacccaggccgtgcctgcccccaaccagcagcccgaggtcttctgcaaccagattttcataaacaatgaatggcacgatgccgtcagcaggaaaacattccccaccgtcaatccgtccactggagaggtcatctgtcaggtagctgaaggggacaaggaagatgtggacaaggcagtgaaggccgcccgggccgccttccagctgggctcaccttggcgccgcatggacgcatcacacaggggccggctgctgaaccgcctggccgatctgatcgagcgggaccggacctacctggcggccttggagaccctggacaatggcaagccctatgtcatctcctacctggtggatttggacatggtcctcaaatgtctccggtattatgccggctgggctgataagtaccacgggaaaaccatccccattgacggagacttcttcagctacacacgccatgaacctgtgggggtgtgcgggcagatcattccgtggaatttcccgctcctgatgcaagcatggaagctgggcccagccttggcaactggaaaccgtggttacttcatccagcccactgtgtttggagatgtgcaggatggcatgaccatcgccaaggaggagatcttcgggccagtgatgcagatcctgaagttcaagaccatagaggaggttgttgggagagccaacaattccacgtacgggctggccgcagctgtcttcacaaaggatttggacaaggccaattacctgtcccaggccctccaggcgggcactgtgtgggtcaactgctatgatgtgtttggagcccagtcaccctttggtggctacaagatgtcggggagtggccgggagttgggcgagtacgggctgcaggcatacactgaagtgaaaactgtcacagtcaaagtgcctcagaagaactcataagaatcatgcaagcttcctccctcagccattgatggaaagttcagcaagatcagcaacaaaaccaagaaaaatgatccttgcgtgctgaatatctgaaaagagaaatttttcctggctgagggtaagagtatatgaggaaccttttaaacgacaacaatactgctagctttcaggatgatttttaaaaaatagattcaaatgtgttatcctctctctgaaacgcttcctataactcgagtttataggggaagaaaaagctattgtttacaattatatcaccattaaggcaactgctacaccctgctttgtattctgggctaagattcattaaaaactagctgctcttaaaaa

SEQ ID NO: 422995 - DNA, 140 bp, Homo sapiens
cttacaatactggtagtcagtattaggttgacagctggtcctgagaacttctttccttctcattgtagattttcataaacaatgaatggcacgatgccgtcagcaggaaaacattccccaccgtcaatccgtccactgga

SEQ ID NO: 422996 - DNA, 950 bp, Homo sapiens
cggggtcggctcagtggccctgagaccctagctctgctctcggtccgctcgctgtccgctagcccgctgcgatgttgcgcgctgccgcccgcttcgggccccgcctgggccgccgcctcttgtcagccgccgccacccaggccgtgcctgcccccaaccagcagcccgaggtcttctgcaaccagattttcataaacaatgaatggcacgatgccgtcagcaggaaaacattccccaccgtcaatccgtccactggagaggtcatctgtcaggtagctgaaggggacaaggaagatgtggacaaggcagtgaaggccgcccgggccgccttccagctgggctcaccttggcgccgcatggacgcatcacacaggggccggctgctgaaccgcctggccgatctgatcgagcgggaccggacctacctggcggccttggagaccctggacaatggcaagccctatgtcatctcctacctggtggatttggacatggtcctcaaatgtctccggtattatgccggctgggctgataagtaccacgggaaaaccatccccattgacggagacttcttcagctacacacgccatgaacctgtgggggtgtgcgggcagatcattccgtggaatttcccgctcctgatgcaagcatggaagctgggcccagccttggcaactggaaacgtggttgtgatgaaggtagctgagcagacacccctcaccgccctctatgtggccaacctgatcaaggagctgcttcccctgtgtgtccactgtgctgattgcccccggctgggcgcgttgcctccctgagatttgccagtggcttcccggccccggattgcccgttaccaggtttgtggaaccgacccaatggccttgctgggggaaagccccattctttagccctgttggccgtgccgcccttccgttcaccggctttgtcgcgcc

SEQ ID NO: 422997 - DNA, 242 bp, Homo sapiens
  misc_feature (14)..(14): n is a, c, g, or t
ccagaggatcccanctctcctctcgacatctctgtgtggtgggggcattgctgctgaccgtggttacttcatccagcccactgtgtttggagatgtgcaggatggcatgaccatcgccaaggaggagatcttcgggccagtgatgcagatcctgaagttcaagaccatagaggaggtcggagagggaggggatgtcggagagggagaggatgtctgagagggagggatgtcggagagggaga

SEQ ID NO: 422998 - DNA, 1953 bp, Homo sapiens
cacctcatggacctggcaggaaacaaggctgcagccttggatatagccatgattaaaatggtcgccccgtccatggcctcccgagtgattgatcgtgcgattcagattttcataaacaatgaatggcacgatgccgtcagcaggaaaacattccccaccgtcaatccgtccactggagaggtcatctgtcaggtagctgaaggggacaaggaagatgtggacaaggcagtgaaggccgcccgggccgccttccagctgggctcaccttggcgccgcatggacgcatcacacaggggccggctgctgaaccgcctggccgatctgatcgagcgggaccggacctacctggcggccttggagaccctggacaatggcaagccctatgtcatctcctacctggtggatttggacatggtcctcaaatgtctccggtattatgccggctgggctgataagtaccacgggaaaaccatccccattgacggagacttcttcagctacacacgccatgaacctgtgggggtgtgcgggcagatcattccgtggaatttcccgctcctgatgcaagcatggaagctgggcccagccttggcaactggaaacgtggttgtgatgaaggtagctgagcagacacccctcaccgccctctatgtggccaacctgatcaaggaggctggctttccccctggtgtggtcaacattgtgcctggatttggccccacggctggggccgccattgcctcccatgaggatgtggacaaagtggcattcacaggctccactgagattggccgcgtaatccaggttgctgctgggagcagcaacctcaagagagtgaccttggagctgggggggaagagccccaacatcatcatgtcagatgccgatatggattgggccgtggaacaggcccacttcgccctgttcttcaaccagggccagtgctgctgtgccggctcccggaccttcgtgcaggaggacatctatgatgagtttgtggagcggagcgttgcccgggccaagtctcgggtggtcgggaacccctttgatagcaagaccgagcaggggccgcaggtggatgaaactcagtttaagaagatcctcggctacatcaacacggggaagcaagagggggcgaagctgctgtgtggtgggggcattgctgctgaccgtggttacttcatccagcccactgtgtttggagatgtgcaggatggcatgaccatcgccaaggaggagatcttcgggccagtgatgcagatcctgaagttcaagaccatagaggaggttgttgggagagccaacaattccacgtacgggctggccgcagctgtcttcacaaaggatttggacaaggccaattacctgtcccaggccctccaggcgggcactgtgtgggtcaactgctatgatgtgtttggagcccagtcaccctttggtggctacaagatgtcggggagtggccgggagttgggcgagtacgggctgcaggcatacactgaagtgaaaactgtcacagtcaaagtgcctcagaagaactcataagaatcatgcaagcttcctccctcagccattgatggaaagttcagcaagatcagcaacaaaaccaagaaaaatgatccttgcgtgctgaatatctgaaaagagaaatttttcctacaaaatctcttgggtcaagaaagttctagaatttgaattgataaacatggtgggttggctgagggtaagagtatatgaggaaccttttaaacgacaacaatactgctagctttcaggatgatttttaaaaaatagattcaaatgtgttatcctctctctgaaacgcttcctataactcgagtttataggggaagaaaaagctattgtttacaattatatcaccattaaggcaactgctacaccctgctttgtattctgggctaagattcattaaaaactagctgctcttaaaaa

SEQ ID NO: 422999 - DNA, 1970 bp, Homo sapiens
cggggtcggctcagtggccctgagaccctagctctgctctcggtccgctcgctgtccgctagcccgctgcgatgttgcgcgctgccgcccgcttcgggccccgcctgggccgccgcctcttgtcagccgccgccacccaggccgtgcctgcccccaaccagcagcccgaggtcttctgcaaccagattttcataaacaatgaatggcacgatgccgtcagcaggaaagaagatgtggacaaggcagtgaaggccgcccgggccgccttccagctgggctcaccttggcgccgcatggacgcatcacacaggggccggctgctgaaccgcctggccgatctgatcgagcgggaccggacctacctggcggccttggagaccctggacaatggcaagccctatgtcatctcctacctggtggatttggacatggtcctcaaatgtctccggtattatgccggctgggctgataagtaccacgggaaaaccatccccattgacggagacttcttcagctacacacgccatgaacctgtgggggtgtgcgggcagatcattccgtggaatttcccgctcctgatgcaagcatggaagctgggcccagccttggcaactggaaacgtggttgtgatgaaggtagctgagcagacacccctcaccgccctctatgtggccaacctgatcaaggaggctggctttccccctggtgtggtcaacattgtgcctggatttggccccacggctggggccgccattgcctcccatgaggatgtggacaaagtggcattcacaggctccactgagattggccgcgtaatccaggttgctgctgggagcagcaacctcaagagagtgaccttggagctgggggggaagagccccaacatcatcatgtcagatgccgatatggattgggccgtggaacaggcccacttcgccctgttcttcaaccagggccagtgctgctgtgccggctcccggaccttcgtgcaggaggacatctatgatgagtttgtggagcggagcgttgcccgggccaagtctcgggtggtcgggaacccctttgatagcaagaccgagcaggggccgcaggtggatgaaactcagtttaagaagatcctcggctacatcaacacggggaagcaagagggggcgaagctgctgtgtggtgggggcattgctgctgaccgtggttacttcatccagcccactgtgtttggagatgtgcaggatggcatgaccatcgccaaggaggagatcttcgggccagtgatgcagatcctgaagttcaagaccatagaggaggttgttgggagagccaacaattccacgtacgggctggccgcagctgtcttcacaaaggatttggacaaggccaattacctgtcccaggccctccaggcgggcactgtgtgggtcaactgctatgatgtgtttggagcccagtcaccctttggtggctacaagatgtcggggagtggccgggagttgggcgagtacgggctgcaggcatacactgaagtgaaaactgtcacagtcaaagtgcctcagaagaactcataagaatcatgcaagcttcctccctcagccattgatggaaagttcagcaagatcagcaacaaaaccaagaaaaatgatccttgcgtgctgaatatctgaaaagagaaatttttcctacaaaatctcttgggtcaagaaagttctagaatttgaattgataaacatggtgggttggctgagggtaagagtatatgaggaaccttttaaacgacaacaatactgctagctttcaggatgatttttaaaaaatagattcaaatgtgttatcctctctctgaaacgcttcctataactcgagtttataggggaagaaaaagctattgtttacaattatatcaccattaaggcaactgctacaccctgctttgtattctgggctaagattcattaaaaactagctgctcttaaaaa

SEQ ID NO: 423000 - DNA, 1975 bp, Homo sapiens
cggggtcggctcagtggccctgagaccctagctctgctctcggtccgctcgctgtccgctagcccgctgcgatgttgcgcgctgccgcccgcttcgggccccgcctgggccgccgcctcttgtcagccgccgccacccaggccgtgcctgcccccaaccagcagcccgaggtcttctgcaaccagattttcataaacaatgaatggcacgatgccgtcagcaggaaaacattccccaccgtcaatccgtccactggagaggtcatctgtcaggtagctgaaggggacaaggaagatgtggacaaggcagtgaaggccgcccgggccgccttccagctgggctcaccttggcgccgcatggacgcatcacacaggggccggctgctgaaccgcctggccgatctgatcgagcgggaccggacctacctggcggccttggagaccctggacaatggcaagccctatgtcatctcctacctggtggatttggacatggtcctcaaatgtctccgtatgccggctgggctgataagtaccacgggggggtgtgcgggcagatcattccgtggaatttcccgctcctgatgcaagcatggaagctgggcccagccttggcaactggaaacgtggttgtgatgaaggtagctgagcagacacccctcaccgccctctatgtggccaacctgatcaaggaggctggctttccccctggtgtggtcaacattgtgcctggatttggccccacggctggggccgccattgcctcccatgaggatgtggacaaagtggcattcacaggctccactgagattggccgcgtaatccaggttgctgctgggagcagcaacctcaagagagtgaccttggagctgggggggaagagccccaacatcatcatgtcagatgccgatatggattgggccgtggaacaggcccacttcgccctgttcttcaaccagggccagtgctgctgtgccggctcccggaccttcgtgcaggaggacatctatgatgagtttgtggagcggagcgttgcccgggccaagtctcgggtggtcgggaacccctttgatagcaagaccgagcaggggccgcaggtggatgaaactcagtttaagaagatcctcggctacatcaacacggggaagcaagagggggcgaagctgctgtgtggtgggggcattgctgctgaccgtggttacttcatccagcccactgtgtttggagatgtgcaggatggcatgaccatcgccaaggaggagatcttcgggccagtgatgcagatcctgaagttcaagaccatagaggaggttgttgggagagccaacaattccacgtacgggctggccgcagctgtcttcacaaaggatttggacaaggccaattacctgtcccaggccctccaggcgggcactgtgtgggtcaactgctatgatgtgtttggagcccagtcaccctttggtggctacaagatgtcggggagtggccgggagttgggcgagtacgggctgcaggcatacactgaagtgaaaactgtcacagtcaaagtgcctcagaagaactcataagaatcatgcaagcttcctccctcagccattgatggaaagttcagcaagatcagcaacaaaaccaagaaaaatgatccttgcgtgctgaatatctgaaaagagaaatttttcctacaaaatctcttgggtcaagaaagttctagaatttgaattgataaacatggtgggttggctgagggtaagagtatatgaggaaccttttaaacgacaacaatactgctagctttcaggatgatttttaaaaaatagattcaaatgtgttatcctctctctgaaacgcttcctataactcgagtttataggggaagaaaaagctattgtttacaattatatcaccattaaggcaactgctacaccctgctttgtattctgggctaagattcattaaaaactagctgctcttaaaaa

SEQ ID NO: 423001 - DNA, 2038 bp, Homo sapiens
  misc_feature (2024)..(2024): n is a, c, g, or t
cggggtcggctcagtggccctgagaccctagctctgctctcggtccgctcgctgtccgctagcccgctgcgatgttgcgcgctgccgcccgcttcgggccccgcctgggccgccgcctcttgtcagccgccgccacccaggccgtgcctgcccccaaccagcagcccgaggtcttctgcaaccagattttcataaacaatgaatggcacgatgccgtcagcaggaaaacattccccaccgtcaatccgtccactggagaggtcatctgtcaggtagctgaaggggacaaggaagatgtggacaaggcagtgaaggccgcccgggccgccttccagctgggctcaccttggcgccgcatggacgcatcacacaggggccggctgctgaaccgcctggccgatctgatcgagcgggaccggacctacctggcggccttggagaccctggacaatggcaagccctatgtcatctcctacctggtggatttggacatggtcctcaaatgtctccggtattatgccggctgggctgataagtaccacgggaaaaccatccccattgacggagacttcttcagctacacacgccatgaacctgtgggggtgtgcgggcagatcattccgtggaatttcccgctcctgatgcaagcatggaagctgggcccagccttggcaactggaaacgtggttgtgatgaaggtagctgagcagacacccctcaccgccctctatgtggccaacctgatcaaggaggctggctttccccctggtgtggtcaacattgtgcctggatttggccccacggctggggccgccattgcctcccatgaggatgtggacaaagtggcattcacaggctccactgagattggccgcgtaatccaggttgctgctgggagcagcaacctcaagagagtgaccttggagctgggggggaagagccccaacatcatcatgtcagatgccgatatggattgggccgtggaacaggcccacttcgccctgttcttcaaccagggccagtgctgctgtgccggctcccggaccttcgtgcaggaggacatctatgatgagtttgtggagcggagcgttgcccgggccaagtctcgggtggtcgggaacccctttgatagcaagaccgagcaggggccgcaggtggatgaaactcagtttaagaagatcctcggctacatcaacacggggaagcaagagggggcgaagctgctgtgtggtgggggcattgctgctgaccgtggttacttcatccagcccactgtgtttggagatgtgcaggatggcatgaccatcgccaaggaggagatcttcgggccagtgatgcagatcctgaagttcaagaccatagaggaggttgttgggagagccaacaattccacgtacgggctggccgcagctgtcttcacaaaggatttggacaaggccaattacctgtcccaggccctccaggcgggcactgtgtgggtcaactgctatgatgtgtttggagcccagtcaccctttggtggctacaagatgtcggggagtggccgggagttgggcgagtacgggctgcaggcatacactgaagtgaaaactgtcacagtcaaagtgcctcagaagaactcataagaatcatgcaagcttcctccctcagccattgatggaaagttcagcaagatcagcaacaaaaccaagaaaaatgatccttgcgtgctgaatatctgaaaagagaaatttttcctacaaaatctcttgggtcaagaaagttctagaatttgaattgataaacatggtgggttggctgagggtaagagtatatgaggaaccttttaaacgacaacaatactgctagctttcaggatgatttttaaaaaatagattcaaatgtgttatcctctctctgaaacgcttcctataactcgagtttataggggaagaaaaagctattggtatgtaatctagcgacgtgtgtgttaaggtgagggatacgatgactcgcactaacggggcgactagcagatggcacantgggacagttggga

SEQ ID NO: 423002 - DNA, 4661 bp, Homo sapiens
gcgcgttccctcttggccccaaagcgagtccggcgggcggctcctcggggttgggcgaccgagcggggccggccgggcggggggcgggcccgtgaaggcggcgcagcgcggcgcgggaggcgtgctgggcgcggggctgcggtgcccagaggctgcggcattaggggctcggcgcccccgaccttccgcgtcccggggtggcggcggcggcggcggcggcggcgcgggcggcatatgatgctgagctggctgctccagaatgaaccacagctctgagaaggggaagtagaaacagctggcgccctgccatggcctgtgaaccacaggtggacccgggggccactggcccattgcccccctcctcccctggctggagtgccctgcctggagggagccctcctggctgggggcaaggagcctcctccctctggccttaattctgcctcctgggggcttcccagtcaaatccagtccttctctcaagaggatttgaggatggccaccgtgtccctccttgttgcgaggaggttctcatggccagaggtgtgatgccgccaggcttcgggctcaccccacgagcctggtatggttatcactcagccagatgaagcttctggtctgcttccagagctccacaatggccaggtcctcactgttctccggattgacaatacctgtgcacccatctccttcgacctgggagccgcagaagagcaactgcaaacttggggcatccaggtcccggctgaccagtacaggagcttggctgagagtgccctcttggagccccaagtgagaagatatatcatctacaactcgaggcctatgcggctggcctttgctgtggttttctatgtggtggtgtgggccaatatctactctaccagtcagatgtttgccttggggaaccactgggctggcatgctgctcgtgaccctggccgcggtgagcctgaccttgactcttgtgctggtctttgaaagacaccagaagaaggccaacaccaacacggacctgaggctggcagctgccaatggagccctcctgagacaccgggtgctgctgggggtgacagacacagtggaaggatgccagagtgtgattcagctttggtttgtctacttcgacctggagaactgtgtgcagtttttgtctgatcatgttcaagaaatgaagactagccaagagtccttgctgagaagcagattgagccagttgtgtgttgtcatggagactggggtgagccctgcaacagcggaggggcctgagaacttggaggatgctcctctcctgcccggcaattcttgtcctaacgagaggccactcatgcagactgagcttcatcagcttgttcctgaggctgagccggaggaaatggcccgccagctgctggcagtgtttggcggctactacatccggcttctagtgacctcccagctccctcaggcaatggggacacgacacacgaactctccgagaattccatgcccctgccagctcatagaagcctacatcctaggcacagggtgctgcccgttcctggcgaggtgacctagggatgaaggtactcatcttccttcaagactgagcagtcaggaaggcttcaggagcccaagatggccaatggggagccccaggtgaggagagaagcatctgggggcactccaaaaggggcctgtgatgtcagccactggggtgttgtgctcacttcagggcccagcacaaaaatccttgtttgacatctcatgctgaccccctggcctttgcagaagctgatggttacagagctagtcccaccaaagctactctctctgctgcttagaactgtggacacgtatggaaagactggacccccattgctttcattgttcagagaacccaggagacatgaagatgaccagactgggcaaattatgtgtccaaaacttggcctcagatgatgtttccatctccaaccccttcatgccagatggggaaactgaggctcagagaggatactgctctatgtggcattgccttgaacccctaaaattatcagacttcctttttccaatataaagaaaaaaagtaagttttcagaattctctcaatttttaagtttttctcccccatattttgtgaaaagcagtggtatgtgtacgtgttgtctaccagtacacaggctgcagaagacagagacagaagaaagagatcaagggcagataactgttgataggaatatttgagaaagattgatcctgtttgacttgaggacttattttgttcacaggcatgcacgcttgtggttgtggttttatattacagatgtagaacaatggttatgtttcccgacatgaacattgtcctggaatgaagtgtgatcagccacttgtggaattctttgaagagctcagaggcttccaagtgatctgctcctgaacaagtttgaagacctattgtttcatagacccaagaccaaacgcatctaaaggatccccagcccccaagacctagcctttgtctgcgattttggcttcatctcccacaaaacccctttatgagttcacgctctttcctggactgacatacctattcctttccatttgttggactcctattcatgcttcaaagtccagctttcttaagcccttctttaggaagccttcccacacagccaaccctgctgctctctgcctcctttaaattcttgatacagctgctgcttgttctgatgttttatggtattgattctgttttcctgtgtatatgccagtttttctagctagactgtaaactccttaaggacagagactacaccttgtactttttgtgcatgacctggacctgctaaggaaaaaaaaatcttgtggattgattgctttgccatccccacagcagcttttgcaaattgctttccaaactcacttgaatgatgacattgctgtggacctgggttctggacctgatctgccacttcaagctgtgtaatttttggcaagttgctttctttgcctggtcctcagtttgcccatcaatataatgggtggattggatgatttttttttttttaattgagatggagtcttgcactgtcacccaggctggagtgcagtggcgcgatcttggctcactgcaacccccgccacctaggttcaagtgattctcatgcctcagcctcccaagtagctgggactacaggtgtgcaccactactcctggatatttttttggtgtttttagtagagatggggtttcgccatgttggccaagctggtcttgaactcctgacctcaggtgatccacccgcctcgggctcccaaagtgctgggattacagacgtgaggcaccacaaccagcctggatgattcttaagggcccttctaggaccaaagttctgggaatttctagcttattctgccccctcatagcccttggcctatctatctttatccacatgcagaaacatctggcaaccccacatggctgagatgacctggtcctaggacacccttggacagaagactggcctacctagcagacctggatttttcttcctgatctgctgcttccaagttgtgtgaccttggctaagtcacttaacctttctgattgtcatttcgctttttaataaagtgggtctggtgaacaagaaatgtaataaacacgtggcttgccattcaagagatgagtctgaccattcactttctgtgtgccagagaagagagatcatgggtatagaccagcccctggaaaggctgctttggtcaaggctgagagcagctttgctcaaggaaattattcacgaaggtgaccactgtctttctgacctggcacagaggaaatgttggctgtgaatgtgaccaatagaaagaagcccgtatttctcagtcagtcctagaaccccggtaagtaattaacagagaataaaaatgtgtttgttaaatgacaaagcagcagtttttcaattgtaaggtctgcttgagagcctttgatgtgtgtttcttttcctgacttttcctttctttagaatttttgatggtctcacctggtgggtggggctttcagggtatgcccacaatgtacatttctcggcatctgtgcctcagtttcctcatttataaaatccctatgatctctgtctcacctactttacagggttgctgtgaagatcgcatactacacacaggaatgctcatcagtttttaaattttatttaatttttatttatttttttttaaatgtaattttttcagagagataaggtcttgctatgttacccagcctagtcttgaactcctggcctcaagtgatcctcctgccttggcctcccatgctgctgggattacaggtgtgaactaccatgcccagccagctcctaagtcttaaggctctgtgttagtgatagatgtggccatggtgtaggcagtgcaatgtcttcgagtgagagtgaaggtggtaactcattgcatggattctagagttctgtttattctaatccaagttcttccacttaaaaacaatgttcttcctctcattgagtctcattcctcatctataggatgggaataagagcatgtacctggcaggttgttgtaaggattaaatggtgtaaaaaaatgtcaagtgcttgcaactttgaataccaaacttgagtgaaagctcaataaattgttacttaaaaaa

SEQ ID NO: 423003 - DNA, 3727 bp, Homo sapiens
  misc_feature (19)..(19): n is a, c, g, or t
  misc_feature (36)..(36): n is a, c, g, or t
  misc_feature (40)..(40): n is a, c, g, or t
ctatagtatccccgagtantgtacgaggcgggtggngcanaagagcactgcaaacttggggcatccaggtcccggctgaccagtacaggagcttggctgagagtgccctcttggagccccaagtgagaagatatatcatctacaactcgaggcctatgcggctggcctttgctgtggttttctatgtggtggtgtgggccaatatctactctaccagtcagatgtttgccttggggaaccactgggctggcatgctgctcgtgaccctggccgcggtgagcctgaccttgactcttgtgctggtctttgaaagacaccagaagaaggccaacaccaacacggacctgaggctggcagctgccaatggagccctcctgagacaccgggtgctgctgggggtgacagacacagtggaaggatgccagagtgtgattcaggaaatggcccgccagctgctggcagtgtttggcggctactacatccggcttctagtgacctcccagctccctcaggcaatggggacacgacacacgaactctccgagaattccatgcccctgccagctcatagaagcctacatcctaggcacagggtgctgcccgttcctggcgaggtgacctagggatgaaggtactcatcttccttcaagactgagcagtcaggaaggcttcaggagcccaagatggccaatggggagccccaggtgaggagagaagcatctgggggcactccaaaaggggcctgtgatgtcagccactggggtgttgtgctcacttcagggcccagcacaaaaatccttgtttgacatctcatgctgaccccctggcctttgcagaagctgatggttacagagctagtcccaccaaagctactctctctgctgcttagaactgtggacacgtatggaaagactggacccccattgctttcattgttcagagaacccaggagacatgaagatgaccagactgggcaaattatgtgtccaaaacttggcctcagatgatgtttccatctccaaccccttcatgccagatggggaaactgaggctcagagaggatactgctctatgtggcattgccttgaacccctaaaattatcagacttcctttttccaatataaagaaaaaaagtaagttttcagaattctctcaatttttaagtttttctcccccatattttgtgaaaagcagtggtatgtgtacgtgttgtctaccagtacacaggctgcagaagacagagacagaagaaagagatcaagggcagataactgttgataggaatatttgagaaagattgatcctgtttgacttgaggacttattttgttcacaggcatgcacgcttgtggttgtggttttatattacagatgtagaacaatggttatgtttcccgacatgaacattgtcctggaatgaagtgtgatcagccacttgtggaattctttgaagagctcagaggcttccaagtgatctgctcctgaacaagtttgaagacctattgtttcatagacccaagaccaaacgcatctaaaggatccccagcccccaagacctagcctttgtctgcgattttggcttcatctcccacaaaacccctttatgagttcacgctctttcctggactgacatacctattcctttccatttgttggactcctattcatgcttcaaagtccagctttcttaagcccttctttaggaagccttcccacacagccaaccctgctgctctctgcctcctttaaattcttgatacagctgctgcttgttctgatgttttatggtattgattctgttttcctgtgtatatgccagtttttctagctagactgtaaactccttaaggacagagactacaccttgtactttttgtgcatgacctggacctgctaaggaaaaaaaaatcttgtggattgattgctttgccatccccacagcagcttttgcaaattgctttccaaactcacttgaatgatgacattgctgtggacctgggttctggacctgatctgccacttcaagctgtgtaatttttggcaagttgctttctttgcctggtcctcagtttgcccatcaatataatgggtggattggatgatttttttttttttaattgagatggagtcttgcactgtcacccaggctggagtgcagtggcgcgatcttggctcactgcaacccccgccacctaggttcaagtgattctcatgcctcagcctcccaagtagctgggactacaggtgtgcaccactactcctggatatttttttggtgtttttagtagagatggggtttcgccatgttggccaagctggtcttgaactcctgacctcaggtgatccacccgcctcgggctcccaaagtgctgggattacagacgtgaggcaccacaaccagcctggatgattcttaagggcccttctaggaccaaagttctgggaatttctagcttattctgccccctcatagcccttggcctatctatctttatccacatgcagaaacatctggcaaccccacatggctgagatgacctggtcctaggacacccttggacagaagactggcctacctagcagacctggatttttcttcctgatctgctgcttccaagttgtgtgaccttggctaagtcacttaacctttctgattgtcatttcgctttttaataaagtgggtctggtgaacaagaaatgtaataaacacgtggcttgccattcaagagatgagtctgaccattcactttctgtgtgccagagaagagagatcatgggtatagaccagcccctggaaaggctgctttggtcaaggctgagagcagctttgctcaaggaaattattcacgaaggtgaccactgtctttctgacctggcacagaggaaatgttggctgtgaatgtgaccaatagaaagaagcccgtatttctcagtcagtcctagaaccccggtaagtaattaacagagaataaaaatgtgtttgttaaatgacaaagcagcagtttttcaattgtaaggtctgcttgagagcctttgatgtgtgtttcttttcctgacttttcctttctttagaatttttgatggtctcacctggtgggtggggctttcagggtatgcccacaatgtacatttctcggcatctgtgcctcagtttcctcatttataaaatccctatgatctctgtctcacctactttacagggttgctgtgaagatcgcatactacacacaggaatgctcatcagtttttaaattttatttaatttttatttatttttttttaaatgtaattttttcagagagataaggtcttgctatgttacccagcctagtcttgaactcctggcctcaagtgatcctcctgccttggcctcccatgctgctgggattacaggtgtgaactaccatgcccagccagctcctaagtcttaaggctctgtgttagtgatagatgtggccatggtgtaggcagtgcaatgtcttcgagtgagagtgaaggtggtaactcattgcatggattctagagttctgtttattctaatccaagttcttccacttaaaaacaatgttcttcctctcattgagtctcattcctcatctataggatgggaataagagcatgtacctggcaggttgttgtaaggattaaatggtgtaaaaaaatgtcaagtgcttgcaactttgaataccaaacttgagtgaaagctcaataaattgttacttaaaaaa

SEQ ID NO: 423004 - DNA, 2418 bp, Homo sapiens
ccgagctcggttccccagttacaacagcatgcacgcttgtggttgtggttttatattacagatgtagaacaatggttatgtttcccgacatgaacattgtcctggaatgaagtgtgatcagccacttgtggaattctttgaagagctcagaggcttccaagtgatctgctcctgaacaagtttgaagacctattgtttcatagacccaagaccaaacgcatctaaaggatccccagcccccaagacctagcctttgtctgcgattttggcttcatctcccacaaaacccctttatgagttcacgctctttcctggactgacatacctattcctttccatttgttggactcctattcatgcttcaaagtccagctttcttaagcccttctttaggaagccttcccacacagccaaccctgctgctctctgcctcctttaaattcttgatacagctgctgcttgttctgatgttttatggtattgattctgttttcctgtgtatatgccagtttttctagctagactgtaaactccttaaggacagagactacaccttgtactttttgtgcatgacctggacctgctaaggaaaaaaaaatcttgtggattgattgctttgccatccccacagcagcttttgcaaattgctttccaaactcacttgaatgatgacattgctgtggacctgggttctggacctgatctgccacttcaagctgtgtaatttttggcaagttgctttctttgcctggtcctcagtttgcccatcaatataatgggtggattggatgatttttttttttttaattgagatggagtcttgcactgtcacccaggctggagtgcagtggcgcgatcttggctcactgcaacccccgccacctaggttcaagtgattctcatgcctcagcctcccaagtagctgggactacaggtgtgcaccactactcctggatatttttttggtgtttttagtagagatggggtttcgccatgttggccaagctggtcttgaactcctgacctcaggtgatccacccgcctcgggctcccaaagtgctgggattacagacgtgaggcaccacaaccagcctggatgattcttaagggcccttctaggaccaaagttctgggaatttctagcttattctgccccctcatagcccttggcctatctatctttatccacatgcagaaacatctggcaaccccacatggctgagatgacctggtcctaggacacccttggacagaagactggcctacctagcagacctggatttttcttcctgatctgctgcttccaagttgtgtgaccttggctaagtcacttaacctttctgattgtcatttcgctttttaataaagtgggtctggtgaacaagaaatgtaataaacacgtggcttgccattcaagagatgagtctgaccattcactttctgtgtgccagagaagagagatcatgggtatagaccagcccctggaaaggctgctttggtcaaggctgagagcagctttgctcaaggaaattattcacgaaggtgaccactgtctttctgacctggcacagaggaaatgttggctgtgaatgtgaccaatagaaagaagcccgtatttctcagtcagtcctagaaccccggtaagtaattaacagagaataaaaatgtgtttgttaaatgacaaagcagcagtttttcaattgtaaggtctgcttgagagcctttgatgtgtgtttcttttcctgacttttcctttctttagaatttttgatggtctcacctggtgggtggggctttcagggtatgcccacaatgtacatttctcggcatctgtgcctcagtttcctcatttataaaatccctatgatctctgtctcacctactttacagggttgctgtgaagatcgcatactacacacaggaatgctcatcagtttttaaattttatttaatttttatttatttttttttaaatgtaattttttcagagagataaggtcttgctatgttacccagcctagtcttgaactcctggcctcaagtgatcctcctgccttggcctcccatgctgctgggattacaggtgtgaactaccatgcccagccagctcctaagtcttaaggctctgtgttagtgatagatgtggccatggtgtaggcagtgcaatgtcttcgagtgagagtgaaggtggtaactcattgcatggattctagagttctgtttattctaatccaagttcttccacttaaaaacaatgttcttcctctcattgagtctcattcctcatctataggatgggaataagagcatgtacctggcaggttgttgtaaggattaaatggtgtaaaaaaatgtcaagtgcttgcaactttgaataccaaacttgagtgaaagctcaataaattgttacttaaaaaa

SEQ ID NO: 423005 - DNA, 4601 bp, Homo sapiens
  misc_feature (4454)..(4455): n is a, c, g, or t
gcgcgttccctcttggccccaaagcgagtccggcgggcggctcctcggggttgggcgaccgagcggggccggccgggcggggggcgggcccgtgaaggcggcgcagcgcggcgcgggaggcgtgctgggcgcggggctgcggtgcccagaggctgcggcattaggggctcggcgcccccgaccttccgcgtcccggggtggcggcggcggcggcggcggcggcgcgggcggcatatgatgctgagctggctgctccagaatgaaccacagctctgagaaggggaagtagaaacagctggcgccctgccatggcctgtgaaccacaggtggacccgggggccactggcccattgcccccctcctcccctggctggagtgccctgcctggagggagccctcctggctgggggcaagagctccacaatggccaggtcctcactgttctccggattgacaatacctgtgcacccatctccttcgacctgggagccgcagaagagcaactgcaaacttggggcatccaggtcccggctgaccagtacaggagcttggctgagagtgccctcttggagccccaagtgagaagatatatcatctacaactcgaggcctatgcggctggcctttgctgtggttttctatgtggtggtgtgggccaatatctactctaccagtcagatgtttgccttggggaaccactgggctggcatgctgctcgtgaccctggccgcggtgagcctgaccttgactcttgtgctggtctttgaaagacaccagaagaaggccaacaccaacacggacctgaggctggcagctgccaatggagccctcctgagacaccgggtgctgctgggggtgacagacacagtggaaggatgccagagtgtgattcagctttggtttgtctacttcgacctggagaactgtgtgcagtttttgtctgatcatgttcaagaaatgaagactagccaagagtccttgctgagaagcagattgagccagttgtgtgttgtcatggagactggggtgagccctgcaacagcggaggggcctgagaacttggaggatgctcctctcctgcccggcaattcttgtcctaacgagaggccactcatgcagactgagcttcatcagcttgttcctgaggctgagccggaggaaatggcccgccagctgctggcagtgtttggcggctactacatccggcttctagtgacctcccagctccctcaggcaatggggacacgacacacgaactctccgagaattccatgcccctgccagctcatagaagcctacatcctaggcacagggtgctgcccgttcctggcgaggtgacctagggatgaaggtactcatcttccttcaagactgagcagtcaggaaggcttcaggagcccaagatggccaatggggagccccaggtgaggagagaagcatctgggggcactccaaaaggggcctgtgatgtcagccactggggtgttgtgctcacttcagggcccagcacaaaaatccttgtttgacatctcatgctgaccccctggcctttgcagaagctgatggttacagagctagtcccaccaaagctactctctctgctgcttagaactgtggacacgtatggaaagactggacccccattgctttcattgttcagagaacccaggagacatgaagatgaccagactgggcaaattatgtgtccaaaacttggcctcagatgatgtttccatctccaaccccttcatgccagatggggaaactgaggctcagagaggatactgctctatgtggcattgccttgaacccctaaaattatcagacttcctttttccaatataaagaaaaaaagtaagttttcagaattctctcaatttttaagtttttctcccccatattttgtgaaaagcagtggtatgtgtacgtgttgtctaccagtacacaggctgcagaagacagagacagaagaaagagatcaagggcagataactgttgataggaatatttgagaaagattgatcctgtttgacttgaggacttattttgttcacaggcatgcacgcttgtggttgtggttttatattacagatgtagaacaatggttatgtttcccgacatgaacattgtcctggaatgaagtgtgatcagccacttgtggaattctttgaagagctcagaggcttccaagtgatctgctcctgaacaagtttgaagacctattgtttcatagacccaagaccaaacgcatctaaaggatccccagcccccaagacctagcctttgtctgcgattttggcttcatctcccacaaaacccctttatgagttcacgctctttcctggactgacatacctattcctttccatttgttggactcctattcatgcttcaaagtccagctttcttaagcccttctttaggaagccttcccacacagccaaccctgctgctctctgcctcctttaaattcttgatacagctgctgcttgttctgatgttttatggtattgattctgttttcctgtgtatatgccagtttttctagctagactgtaaactccttaaggacagagactacaccttgtactttttgtgcatgacctggacctgctaaggaaaaaaaaatcttgtggattgattgctttgccatccccacagcagcttttgcaaattgctttccaaactcacttgaatgatgacattgctgtggacctgggttctggacctgatctgccacttcaagctgtgtaatttttggcaagttgctttctttgcctggtcctcagtttgcccatcaatataatgggtggattggatgatttttttttttttaattgagatggagtcttgcactgtcacccaggctggagtgcagtggcgcgatcttggctcactgcaacccccgccacctaggttcaagtgattctcatgcctcagcctcccaagtagctgggactacaggtgtgcaccactactcctggatatttttttggtgtttttagtagagatggggtttcgccatgttggccaagctggtcttgaactcctgacctcaggtgatccacccgcctcgggctcccaaagtgctgggattacagacgtgaggcaccacaaccagcctggatgattcttaagggcccttctaggaccaaagttctgggaatttctagcttattctgccccctcatagcccttggcctatctatctttatccacatgcagaaacatctggcaaccccacatggctgagatgacctggtcctaggacacccttggacagaagactggcctacctagcagacctggatttttcttcctgatctgctgcttccaagttgtgtgaccttggctaagtcacttaacctttctgattgtcatttcgctttttaataaagtgggtctggtgaacaagaaatgtaataaacacgtggcttgccattcaagagatgagtctgaccattcactttctgtgtgccagagaagagagatcatgggtatagaccagcccctggaaaggctgctttggtcaaggctgagagcagctttgctcaaggaaattattcacgaaggtgaccactgtctttctgacctggcacagaggaaatgttggctgtgaatgtgaccaatagaaagaagcccgtatttctcagtcagtcctagaaccccggtaagtaattaacagagaataaaaatgtgtttgttaaatgacaaagcagcagtttttcaattgtaaggtctgcttgagagcctttgatgtgtgtttcttttcctgacttttcctttctttagaatttttgatggtctcacctggtgggtggggctttcagggtatgcccacaatgtacatttctcggcatctgtgcctcagtttcctcatttataaaatccctatgatctctgtctcacctactttacagggttgctgtgaagatcgcatactacacacaggaatgctcatcagtttttaaattttatttaatttttatttatttttttttaaatgtaattttttcagagagataaggtcttgctatgttacccagcctagtcttgaactcctggcctcaagtgatcctcctgccttggcctcccatgctgctgggattacaggtgtgaactaccatgcccagccagctcctaagtcttaaggctctgtgttagtgatagatgtggccatggtgtaggcagtgcaatgtcttcgagtgagagtgaaggtggtaactcattgcatggattctagagttctgtttattctaatccaagttcttccacttaaaaacaatgttcttcctctcattgagtctcattcctcatctataggatgggaataagagcatgtacctggcaggttgttgtaaggattaaatggtgtaaaaaaatgtcaagtgcttgcaactttgaataccaaacttgagtgaaagctcaataaattgttacttaaaaaaaaaatannttaaaataaaaaaataataatattaaaaaaaatttaagtggggtcctggtacccaaatttccctttggtgagtcgttttacaattaaaatgtcccggggggtgccatgggccctaaatttggcaaaaactttggccgtttccccaa

SEQ ID NO: 423006 - DNA, 3415 bp, Homo sapiens
gcgcgttccctcttggccccaaagcgagtccggcgggcggctcctcggggttgggcgaccgagcggggccggccgggcggggggcgggcccgtgaaggcggcgcagcgcggcgcgggaggcgtgctgggcgcggggctgcggtgcccagaggctgcggcattaggggctcggcgcccccgaccttccgcgtcccggggtggcggcggcggcggcggcggcggcgcgggcggcatatgatgctgagctggctgctccagaatgaaccacagctctgagaaggggaagtagaaacagctggcgccctgccatggcctgtgaaccacaggtggacccgggggccactggcccattgcccccctcctcccctggctggagtgccctgcctggagggagccctcctggctgggggcaagagctccacaatggccaggtcctcactgttctccggattgacaatacctgtgcacccatctccttcgacctgggagccgcagaagagcaactgcaaacttggggcatccaggtcccggctgaccagtacaggagcttggctgagagtgccctcttggagccccaagtgagaagatatatcatctacaactcgaggcctatgcggctggcctttgctgtggttttctatgtggtggtgtgggccaatatctactctaccagtcagatgtttgccttggggaaccactgggctggcatgctgctcgtgaccctggccgcggtgagcctgaccttgactcttgtgctggtctttgaaagacaccagaagaaggccaacaccaacacggacctgaggctggcagctgccaatggagccctcctgagacaccgggtgctgctgggggtgacagacacagtggaaggatgccagagtgtgattcagctttggtttgtctacttcgacctggagaactgtgtgcagtttttgtctgatcatgttcaagaaatgaagactagccaagagtccttgctgagaagcagattgagccagttgtgtgttgtcatggagactggggtgagccctgcaacagcggaggggcctgagaacttggaggatgctcctctcctgcccggcaattcttgtcctaacgagaggccactcatgcagactgagcttcatcagcttgttcctgaggctgagccggaggaaatggcccgccagctgctggcagtgtttggcggctactacatccggcttctagtgacctcccagctccctcaggcaatggggacacgacacacgaactctccgagaattccatgcccctgccagctcatagaagcctacatcctaggcacagggtgctgcccgttcctggcgaggtgacctagggatgaaggtactcatcttccttcaagactgagcagtcaggaaggcttcaggagcccaagatggccaatggggagccccaggtgaggagagaagcatctgggggcactccaaaaggggcctgtgatgtcagccactggggtgttgtgctcacttcagggcccagcacaaaaatccttgtttgacatctcatgctgaccccctggcctttgcagaagctgatggttacagagctagtcccaccaaagctactctctctgctgcttagaactgtggacacgtatggaaagactggacccccattgctttcattgttcagagaacccaggagacatgaagatgaccagactgggcaaattatgtgtccaaaacttggcctcagatgatgtttccatctccaaccccttcatgccagatggggaaactgaggctcagagaggatactgctctatgtggcattgccttgaacccctaaaattatcagacttcctttttccaatataaagaaaaaaagtaagttttcagaattctctcaatttttaagtttttctcccccatattttgtgaaaagcagtggtatgtgtacgtgttgtctaccagtacacaggctgcagaagacagagacagaagaaagagatcaagggcagataactgttgataggaatatttgagaaagattgatcctgtttgacttgaggacttattttgttcacaggcatgcacgcttgtggttgtggttttatattacagatgtagaacaatggttatgtttcccgacatgaacattgtcctggaatgaagtgtgatcagccacttgtggaattctttgaagagctcagaggcttccaagtgatctgctcctgaacaagtttgaagacctattgtttcatagacccaagaccaaacgcatctaaaggatccccagcccccaagacctagcctttgtctgcgattttggcttcatctcccacaaaacccctttatgagttcacgctctttcctggactgacatacctattcctttccatttgttggactcctattcatgcttcaaagtccagctttcttaagcccttctttaggaagccttcccacacagccaaccctgctgctctctgcctcctttaaattcttgatacagctgctgcttgttctgatgttttatggtattgattctgttttcctgtgtatatgccagtttttctagctagactgtaaactccttaaggacagagactacaccttgtactttttgtgcatgacctggacctgctaaggaaaaaaaaatcttgtggattgattgctttgccatccccacagcagcttttgcaaattgctttccaaactcacttgaatgatgacattgctgtggacctgggttctggacctgatctgccacttcaagctgtgtaatttttggcaagttgctttctttgcctggtcctcagtttgcccatcaatataatgggtggattggatgatttttttttttttaattgagatggagtcttgcactgtcacccaggctggagtgcagtggcgcgatcttggctcactgcaacccccgccacctaggttcaagtgattctcatgcctcagcctcccaagtagctgggactacaggtgtgcaccactactcctggatatttttttggtgtttttagtagagatggggtttcgccatgttggccaagctggtcttgaactcctgacctcaggtgatccacccgcctcgggctcccaaagtgctgggattacagacgtgaggcaccacaaccagcctggatgattcttaagggcccttctaggaccaaagttctgggaatttctagcttattctgccccctcatagcccttggcctatctatctttatccacatgcagaaacatctggcaaccccacatggctgagatgacctggtcctaggacacccttggacagaagactggcctacctagcagacctggatttttcttcctgatctgctgcttccaagttgtgtgaccttggctaagtcacttaacctttctgattgtcatttcgctttttaataaagtgggtctggtgaacaaga

SEQ ID NO: 423007 - DNA, 1502 bp, Homo sapiens
atggcatcctaattcttgtcccccccgatatccctcactttctcctaccccgccagtagatgtacccgagccctcatccggactatcctgtctcccctattttaccagtaccattatcacccaccaattaattttcttttttttttttgacacggagtcttgctctcacaaccagcctggatgattcttaagggcccttctaggaccaaagttctgggaatttctagcttattctgccccctcatagcccttggcctatctatctttatccacatgcagaaacatctggcaaccccacatggctgagatgacctggtcctaggacacccttggacagaagactggcctacctagcagacctggatttttcttcctgatctgctgcttccaagttgtgtgaccttggctaagtcacttaacctttctgattgtcatttcgctttttaataaagtgggtctggtgaacaagaaatgtaataaacacgtggcttgccattcaagagatgagtctgaccattcactttctgtgtgccagagaagagagatcatgggtatagaccagcccctggaaaggctgctttggtcaaggctgagagcagctttgctcaaggaaattattcacgaaggtgaccactgtctttctgacctggcacagaggaaatgttggctgtgaatgtgaccaatagaaagaagcccgtatttctcagtcagtcctagaaccccggtaagtaattaacagagaataaaaatgtgtttgttaaatgacaaagcagcagtttttcaattgtaaggtctgcttgagagcctttgatgtgtgtttcttttcctgacttttcctttctttagaatttttgatggtctcacctggtgggtggggctttcagggtatgcccacaatgtacatttctcggcatctgtgcctcagtttcctcatttataaaatccctatgatctctgtctcacctactttacagggttgctgtgaagatcgcatactacacacaggaatgctcatcagtttttaaattttatttaatttttatttatttttttttaaatgtaattttttcagagagataaggtcttgctatgttacccagcctagtcttgaactcctggcctcaagtgatcctcctgccttggcctcccatgctgctgggattacaggtgtgaactaccatgcccagccagctcctaagtcttaaggctctgtgttagtgatagatgtggccatggtgtaggcagtgcaatgtcttcgagtgagagtgaaggtggtaactcattgcatggattctagagttctgtttattctaatccaagttcttccacttaaaaacaatgttcttcctctcattgagtctcattcctcatctataggatgggaataagagcatgtacctggcaggttgttgtaaggattaaatggtgtaaaaaaatgtcaagtgcttgcaactttgaataccaaacttgagtgaaagctcaataaattgttacttaaaaaa

SEQ ID NO: 423008 - DNA, 518 bp, Homo sapiens
cagtgagctgagattgtgccattgcactccacactccagcctgggcaacagagcgagactccatctcaaaaaaaaaaaataaaaacaaaacaaaacaaaaaagagacacatcaggtgggctcagtggctcacccctataatcctagcactttgggaggctgaggcaggtggattgcttgaatctaagagttcaacaccagcagccagctcctaagtcttaaggctctgtgttagtgatagatgtggccatggtgtaggcagtgcaatgtcttcgagtgagagtgaaggtggtaactcattgcatggattctagagttctgtttattctaatccaagttcttccacttaaaaacaatgttcttcctctcattgagtctcattcctcatctataggatgggaataagagcatgtacctggcaggttgttgtaaggattaaatggtgtaaaaaaatgtcaagtgcttgcaactttgaataccaaacttgagtgaaagctcaataaattgttacttaaaaaa

SEQ ID NO: 423009 - DNA, 242 bp, Homo sapiens
gtctctcaaaacactgggattacaggcatgagtcactgtgactgcctccacccccgaccatttaataggggaggaaatgggacagtcctgagggtggggattgtcccttggcatctgggggtgggatggtgtgtttctactgcccagagcctgggagctccccagtagcatggaggtctggtgatgggcctggcgtttgtcttacaggccaacaccaacacggacctgaggctggcagctgc

SEQ ID NO: 423010 - DNA, 4447 bp, Homo sapiens
gcgcgttccctcttggccccaaagcgagtccggcgggcggctcctcggggttgggcgaccgagcggggccggccgggcggggggcgggcccgtgaaggcggcgcagcgcggcgcgggaggcgtgctgggcgcggggctgcggtgcccagaggctgcggcattaggggctcggcgcccccgaccttccgcgtcccggggtggcggcggcggcggcggcggcggcgcgggcggcatatgatgctgagctggctgctccagaatgaaccacagctctgagaaggggaagtagaaacagctggcgccctgccatggcctgtgaaccacaggtggacccgggggccactggcccattgcccccctcctcccctggctggagtgccctgcctggagggagccctcctggctgggggcaagagctccacaatggccaggtcctcactgttctccggattgacaatacctgtgcacccatctccttcgacctgggagccgcagaagagcaactgcaaacttggggcatccaggtcccggctgaccagtacaggagcttggctgagagtgccctcttggagccccaagtgagaagatatatcatctacaactcgaggcctatgcggctggcctttgctgtggttttctatgtggtggtgtgggccaatatctactctaccagtcagatgtttgccttggggaaccactgggctggcatgctgctcgtgaccctggccgcggtgagcctgaccttgactcttgtgctggtctttgaaagacaccagaagaaggccaacaccaacacggacctgaggctggcagctgccaatggagccctcctgagacaccgggtgctgctgggggtgacagacacagtggaaggatgccagagtgtgattcagctttggtttgtctacttcgacctggagaactgtgtgcagtttttgtctgatcatgttcaagaaatgaagactagccaagagtccttgctgagaagcagattgagccagttgtgtgttgtcatggagactggggtgagccctgcaacagcggaggggcctgagaacttggaggatgctcctctcctgcccggcaattcttgtcctaacgagaggccactcatgcagactgagcttcatcagcttgttcctgaggctgagccggaggaaatggcccgccagctgctggcagtgtttggcggctactacatccggcttctagtgacctcccagctccctcaggcaatggggacacgacacacgaactctccgagaattccatgcccctgccagctcatagaagcctacatcctaggcacagggtgctgcccgttcctggcgaggtgacctagggatgaaggtactcatcttccttcaagactgagcagtcaggaaggcttcaggagcccaagatggccaatggggagccccaggtgaggagagaagcatctgggggcactccaaaaggggcctgtgatgtcagccactggggtgttgtgctcacttcagggcccagcacaaaaatccttgtttgacatctcatgctgaccccctggcctttgcagaagctgatggttacagagctagtcccaccaaagctactctctctgctgcttagaactgtggacacgtatggaaagactggacccccattgctttcattgttcagagaacccaggagacatgaagatgaccagactgggcaaattatgtgtccaaaacttggcctcagatgatgtttccatctccaaccccttcatgccagatggggaaactgaggctcagagaggatactgctctatgtggcattgccttgaacccctaaaattatcagacttcctttttccaatataaagaaaaaaagtaagttttcagaattctctcaatttttaagtttttctcccccatattttgtgaaaagcagtggtatgtgtacgtgttgtctaccagtacacaggctgcagaagacagagacagaagaaagagatcaagggcagataactgttgataggaatatttgagaaagattgatcctgtttgacttgaggacttattttgttcacaggcatgcacgcttgtggttgtggttttatattacagatgtagaacaatggttatgtttcccgacatgaacattgtcctggaatgaagtgtgatcagccacttgtggaattctttgaagagctcagaggcttccaagtgatctgctcctgaacaagtttgaagacctattgtttcatagacccaagaccaaacgcatctaaaggatccccagcccccaagacctagcctttgtctgcgattttggcttcatctcccacaaaacccctttatgagttcacgctctttcctggactgacatacctattcctttccatttgttggactcctattcatgcttcaaagtccagctttcttaagcccttctttaggaagccttcccacacagccaaccctgctgctctctgcctcctttaaattcttgatacagctgctgcttgttctgatgttttatggtattgattctgttttcctgtgtatatgccagtttttctagctagactgtaaactccttaaggacagagactacaccttgtactttttgtgcatgacctggacctgctaaggaaaaaaaaatcttgtggattgattgctttgccatccccacagcagcttttgcaaattgctttccaaactcacttgaatgatgacattgctgtggacctgggttctggacctgatctgccacttcaagctgtgtaatttttggcaagttgctttctttgcctggtcctcagtttgcccatcaatataatgggtggattggatgatttttttttttttaattgagatggagtcttgcactgtcacccaggctggagtgcagtggcgcgatcttggctcactgcaacccccgccacctaggttcaagtgattctcatgcctcagcctcccaagtagctgggactacaggtgtgcaccactactcctggatatttttttggtgtttttagtagagatggggtttcgccatgttggccaagctggtcttgaactcctgacctcaggtgatccacccgcctcgggctcccaaagtgctgggattacagacgtgaggcaccacaaccagcctggatgattcttaagggcccttctaggaccaaagttctgggaatttctagcttattctgccccctcatagcccttggcctatctatctttatccacatgcagaaacatctggcaaccccacatggctgagatgacctggtcctaggacacccttggacagaagactggcctacctagcagacctggatttttcttcctgatctgctgcttccaagttgtgtgaccttggctaagtcacttaacctttctgattgtcatttcgctttttaataaagtgggtctggtgaacaagaaatgtaataaacacgtggcttgccattcaagagatgagtctgaccattcactttctgtgtgccagagaagagagatcatgggtatagaccagcccctggaaaggctgctttggtcaaggctgagagcagctttgctcaaggaaattattcacgaaggtgaccactgtctttctgacctggcacagaggaaatgttggctgtgaatgtgaccaatagaaagaagcccgtatttctcagtcagtcctagaaccccggtaagtaattaacagagaataaaaatgtgtttgttaaatgacaaagcagcagtttttcaattgtaaggtctgcttgagagcctttgatgtgtgtttcttttcctgacttttcctttctttagaatttttgatggtctcacctggtgggtggggctttcagggtatgcccacaatgtacatttctcggcatctgtgcctcagtttcctcatttataaaatccctatgatctctgtctcacctactttacagggttgctgtgaagatcgcatactacacacaggaatgctcatcagtttttaaattttatttaatttttatttatttttttttaaatgtaattttttcagagagataaggtcttgctatgttacccagcctagtcttgaactcctggcctcaagtgatcctcctgccttggcctcccatgctgctgggattacaggtgtgaactaccatgcccagccagctcctaagtcttaaggctctgtgttagtgatagatgtggccatggtgtaggcagtgcaatgtcttcgagtgagagtgaaggtggtaactcattgcatggattctagagttctgtttattctaatccaagttcttccacttaaaaacaatgttcttcctctcattgagtctcattcctcatctataggatgggaataagagcatgtacctggcaggttgttgtaaggattaaatggtgtaaaaaaatgtcaagtgcttgcaactttgaataccaaacttgagtgaaagctcaataaattgttacttaaaaaa

SEQ ID NO: 423011 - DNA, 3949 bp, Homo sapiens
gcgcgttccctcttggccccaaagcgagtccggcgggcggctcctcggggttgggcgaccgagcggggccggccgggcggggggcgggcccgtgaaggcggcgcagcgcggcgcgggaggcgtgctgggcgcggggctgcggtgcccagaggctgcggcattaggggctcggcgcccccgaccttccgcgtcccggggtggcggcggcggcggcggcggcggcgcgggcggcatatgatgctgagctggctgctccagaatgaaccacagctctgagaaggggaagtagaaacagctggcgccctgccatggcctgtgaaccacaggtggacccgggggccactggcccattgcccccctcctcccctggctggagtgccctgcctggagggagccctcctggctgggggcaagagctccacaatggccaggtcctcactgttctccggattgacaatacctgtgcacccatctccttcgacctgggagccgcagaagagcaactgcaaacttggggcatccaggtcccggctgaccagtacaggagcttggctgagagtgccctcttggagccccaagtgagaagatatatcatctacaactcgaggcctatgcggctggcctttgctgtggttttctatgtggtggtgtgggccaatatctactctaccagtcagatgtttgccttggggaaccactgggctggcatgctgctcgtgaccctggccgcggtgagcctgaccttgactcttgtgctggtctttgaaagacaccagaagaaggccaacaccaacacggacctgaggctggcagctgccaatggagccctcctgagacaccgggtgctgctgggggtgacagacacagtggaaggatgccagagtgtgattcagctttggtttgtctacttcgacctggagaactgtgtgcagtttttgtctgatcatgttcaagaaatgaagactagccaagagtccttgctgagaagcagattgagccagttgtgtgttgtcatggagactggggtgagccctgcaacagcggaggggcctgagaacttggaggatgctcctctcctgcccggcaattcttgtcctaacgagaggccactcatgcagactgagcttcatcagcttgttcctgaggctgagccggaggaaatggcccgccagctgctggcagtgtttggcggctactacatccggcttctagtgacctcccagctccctcaggcaatggggacacgacacacgaactctccgagaattccatgcccctgccagctcatagaagcctacatcctaggcacagggtgctgcccgttcctggcgaggtgacctagggatgaaggtactcatcttccttcaagactgagcagtcaggaaggcttcaggagcccaagatggccaatggggagccccaggtgaggagagaagcatctgggggcactccaaaaggggcctgtgatgtcagccactggggtgttgtgctcacttcagggcccagcacaaaaatccttgtttgacatctcatgctgaccccctggcctttgcagaagctgatggttacagagctagtcccaccaaagctactctctctgctgcttagaactgtggacacgtatggaaagactggacccccattgctttcattgttcagagaacccaggagacatgaagatgaccagactgggcaaattatgtgtccaaaacttggcctcagatgatgtttccatctccaaccccttcatgccagatggggaaactgaggctcagagaggatactgctctatgtggcattgccttgaacccctaaaattatcagacttcctttttccaatataaagaaaaaaagtaagttttcagaattctctcaatttttaagtttttctcccccatattttgtgaaaagcagtggtatgtgtacgtgttgtctaccagtacacaggctgcagaagacagagacagaagaaagagatcaagggcagataactgttgataggaatatttgagaaagattgatcctgtttgacttgaggacttattttgttcacaggcatgcacgcttgtggttgtggttttatattacagatgtagaacaatggttatgtttcccgacatgaacattgtcctggaatgaagtgtgatcagccacttgtggaattctttgaagagctcagaggcttccaagtgatctgctcctgaacaagtttgaagacctattgtttcatagacccaagaccaaacgcatctaaaggatccccagcccccaagacctagcctttgtctgcgattttggcttcatctcccacaaaacccctttatgagttcacgctctttcctggactgacatacctattcctttccatttgttggactcctattcatgcttcaaagtccagctttcttaagcccttctttaggaagccttcccacacagccaaccctgctgctctctgcctcctttaaattcttgatacagctgctgcttgttctgatgttttatggtattgattctgttttcctgtgtatatgccagtttttctagctagactgtaaactccttaaggacagagactacaccttgtactttttgtgcatgacctggacctgctaaggaaaaaaaaatcttgtggattgattgctttgccatccccacagcagcttttgcaaattgctttccaaactcacttgaatgatgacattgctgtggacctgggttctggacctgatctgccacttcaagctgtgtaatttttggcaagttgctttctttgcctggtcctcagtttgcccatcaatataatgggtggattggatgatttttttttttttaattgagatggagtcttgcactgtcacccaggctggagtgcagtggcgcgatcttggctcactgcaacccccgccacctaggttcaagtgattctcatgcctcagcctcccaagtagctgggactacaggtgtgcaccactactcctggatatttttttggtgtttttagtagagatggggtttcgccatgttggccaagctggtcttgaactcctgacctcaggtgatccacccgcctcgggctcccaaagtgctgggattacagacgtgaggcaccacaaccagcctggatgattcttaagggcccttctaggaccaaagttctgggaatttctagcttattctgccccctcatagcccttggcctatctatctttatccacatgcagaaacatctggcaaccccacatggctgagatgacctggtcctaggacacccttggacagaagactggcctacctagcagacctggatttttcttcctgatctgctgcttccaagttgtgtgaccttggctaagtcacttaacctttctgattgtcatttcgctttttaataaagtgggtctggtgaacaagaaatgtaataaacacgtggcttgccattcaaaaaaaaaaaaaaaaaaaaaaaaaaaaaaaaaaaaaaaaaaaaaaaaaaaaggggggggcccccaaaaattccccccggggggccccaatcgccccccccgtttttgggacaaagggggccccccatatagagggcgcgcaggaatataaacgcgacggagcaccggggcaacgagaataacaacagccggagagggggaaaacgagcgcgccacagtgaggaacactacgtaggaggaggcgagccccaataccacgcggggggggggaggaaccaaaatggggagcaacaaacacccccccgacagcgagagatgatacaagcgccccagggcgggaaaaaactacaacaaccatgctcgaggggtactgctcgaggggtataacaaccacagcgcaacatttcgcctgcgggcagagcaagaaagatgggcgacaacaggcagacgcgcgactgtgcgacaacacactttactccccgagggcactataagtaagaaacgcg

SEQ ID NO: 423012 - DNA, 2742 bp, Homo sapiens
  misc_feature (825)..(825): n is a, c, g, or t
aacaacatcctgggattgggacccactttctgggcactgctggccagtcccaaaatggaacataaggaagtggttcttctacttcttttatttctgaaatcaggtcaaggagagcctctggatgactatgtgaatacccagggggcttcactgttcagtgtcactaagaagcagctgggagcaggaagtatagaagaatgtgcagcaaaatgtgaggaggacgaagaattcacctgcagggcattccaatatcacagtaaagagcaacaatgtgtgataatggctgaaaacaggaagtcctccataatcattaggatgagagatgtagttttatttgaaaagaaagtgtatctctcagagtgcaagactgggaatggaaagaactacagagggacgatgtccaaaacaaaaaatggcatcacctgtcaaaaatggagttccacttctccccacagacctagattctcacctgctacacacccctcagagggactggaggagaactactgcaggaatccagacaacgatccgcaggggccctggtgctatactactgatccagaaaagagatatgactactgcgacattcttgagtgtgaagaggaatgtatgcattgcagtggagaaaactatgacggcaaaatttccaagaccatgtctggactggaatgccaggcctgggactctcagagcccacacgctcatggatacattccttccaaatttccaaacaagaacctgaagaagaattactgtcgtaaccccgatagggagctgcggccttggtgtttcaccaccgaccccaacaagcgctgggaactttgngacatcccccgctgcacaacacctccaccatcttctggtcccacctaccagtgtctgaagggaacaggtgaaaactatcgcgggaatgtggctgttaccgtgtccgggcacacctgtcagcactggagtgcacagacccctcacacacataacaggacaccagaaaacttcccctgcaaaaatttggatgaaaactactgccgcaatcctgacggaaaaagggccccatggtgccatacaaccaacagccaagtgcggtgggagtactgtaagataccgtcctgtgactcctccccagtatccacggaacaattggctcccacagcaccacctgagctaacccctgtggtccaggactgctaccatggtgatggacagagctaccgaggcacatcctccaccaccaccacaggaaagaagtgtcagtcttggtcatctatgacaccacaccggcaccagaagaccccagaaaactacccaaatgctggcctgacaatgaactactgcaggaatccagatgccgataaaggcccctggtgttttaccacagaccccagcgtcaggtgggagtactgcaacctgaaaaaatgctcaggaacagaagcgagtgttgtagcacctccgcctgttgtcctgcttccagatgtagagactccttccgaagaagactgtatgtttgggaatgggaaaggataccgaggcaagagggcgaccactgttactgggacgccatgccaggactgggctgcccaggagccccatagacacagcattttcactccagagacaaatccacgggcgggtctggaaaaaaattactgccgtaaccctgatggtgatgtaggtggtccctggtgctacacgacaaatccaagaaaactttacgactactgtgatgtccctcagtgtgcggccccttcatttgattgtgggaagcctcaagtggagccgaagaaatgtcctggaagggttgtaggggggtgtgtggcccacccacattcctggccctggcaagtcagtcttagaacaaggtttggaatgcacttctgtggaggcaccttgatatccccagagtgggtgttgactgctgcccactgcttggagaagtccccaaggccttcatcctacaaggtcatcctgggtgcacaccaagaagtgaatctcgaaccgcatgttcaggaaatagaagtgtctaggctgttcttggagcccacacgaaaagatattgccttgctaaagctaagcagtcctgccgtcatcactgacaaagtaatcccagcttgtctgccatccccaaattatgtggtcgctgaccggaccgaatgtttcatcactggctggggagaaacccaaggtacttttggagctggccttctcaaggaagcccagctccctgtgattgagaataaagtgtgcaatcgctatgagtttctgaatggaagagtccaatccaccgaactctgtgctgggcatttggccggaggcactgacagttgccagggtgacagtggagggcctctggtttgcttcgagaaggacaaatacattttacaaggagtcacttcttggggtcttggctgtgcacgccccaataagcctggtgtctatgttcgtgtttcaaggtttgttacttggattgagggagtgatgagaaataattaattggacgggagacagagtgacgcactgactcacctagaggctgggacgtgggtagggatttagcatgctggaaataactggcagtaatcaaacgaagacactgtccccagctaccagctacgccaaacctcggcattttttgtgttattttctgactgctggattctgtagtaaggtgacatagctatgacatttgttaaaaataaactctgtacttaactttgatttgagtaaattttggttttggtcttcaac

SEQ ID NO: 423013 - DNA, 737 bp, Homo sapiens
  misc_feature (76)..(77): n is a, c, g, or t
  misc_feature (84)..(84): n is a, c, g, or t
  misc_feature (97)..(97): n is a, c, g, or t
  misc_feature (104)..(105): n is a, c, g, or t
catctcaaggtattcggggcccaccaaaaataatcccccccgcatgtcaggaatagagtgtctagctgttcttgannccacacnaaaagatatgccntgctaanntaagcagtcctgccgtcatcactgacaaagtaatcccagcttgtctgccatccccaaattatgtggtcggtacttttggagctggccttctcaaggaagcccagctccctgtgattgagaataaagtgtgcaatcgctatgagtttctgaatggaagagtccaatccaccgaactctgtgctgggcatttggccggaggcactgacagttgccagggtgacagtggagggcctctggtttgcttcgagaaggacaaatacattttacaaggagtcacttcttggggtcttggctgtgcacgccccaataagcctggtgtctatgttcgtgtttcaaggtttgttacttggattgagggagtgatgagaaataattaattggacgggagacagagtgacgcactgactcacctagaggctgggacgtgggtagggatttagcatgctggaaataactggcagtaatcaaacgaagacactgtccccagctaccagctacgccaaacctcggcattttttgtgttattttctgactgctggattctgtagtaaggtgacatagctatgacatttgttaaaaataaactctgtacttaactttgatttgagtaaattttggttttggtcttcaac

SEQ ID NO: 423014 - DNA, 3520 bp, Homo sapiens
  misc_feature (825)..(825): n is a, c, g, or t
aacaacatcctgggattgggacccactttctgggcactgctggccagtcccaaaatggaacataaggaagtggttcttctacttcttttatttctgaaatcaggtcaaggagagcctctggatgactatgtgaatacccagggggcttcactgttcagtgtcactaagaagcagctgggagcaggaagtatagaagaatgtgcagcaaaatgtgaggaggacgaagaattcacctgcagggcattccaatatcacagtaaagagcaacaatgtgtgataatggctgaaaacaggaagtcctccataatcattaggatgagagatgtagttttatttgaaaagaaagtgtatctctcagagtgcaagactgggaatggaaagaactacagagggacgatgtccaaaacaaaaaatggcatcacctgtcaaaaatggagttccacttctccccacagacctagattctcacctgctacacacccctcagagggactggaggagaactactgcaggaatccagacaacgatccgcaggggccctggtgctatactactgatccagaaaagagatatgactactgcgacattcttgagtgtgaagaggaatgtatgcattgcagtggagaaaactatgacggcaaaatttccaagaccatgtctggactggaatgccaggcctgggactctcagagcccacacgctcatggatacattccttccaaatttccaaacaagaacctgaagaagaattactgtcgtaaccccgatagggagctgcggccttggtgtttcaccaccgaccccaacaagcgctgggaactttgngacatcccccgctgcacaacacctccaccatcttctggtcccacctaccagtgtctgaagggaacaggtgaaaactatcgcgggaatgtggctgttaccgtgtccgggcacacctgtcagcactggagtgcacagacccctcacacacataacaggacaccagaaaacttcccctgcaaaaatttggatgaaaactactgccgcaatcctgacggaaaaagggccccatggtgccatacaaccaacagccaagtgcggtgggagtactgtaagataccgtcctgtgactcctccccagtatccacggaacaattggctcccacagcaccacctgagctaacccctgtggtccaggactgctaccatggtgatggacagagctaccgaggcacatcctccaccaccaccacaggaaagaagtgtcagtcttggtcatctatgacaccacaccggcaccagaagaccccagaaaactacccaaatgctggcctgacaatgaactactgcaggaatccagatgccgataaaggcccctggtgttttaccacagaccccagcgtcaggtgggagtactgcaacctgaaaaaatgctcaggaacagaagcgagtgttgtagcacctccgcctgttgtcctgcttccagatgtagagactccttccgaagaagactgtatgtttgggaatgggaaaggataccgaggcaagagggcgaccactgttactgggacgccatgccaggactgggctgcccaggagccccatagacacagcattttcactccagagacaaatccacgggcgggtctggaaaaaaattactgccgtaaccctgatggtgatgtaggtggtccctggtgctacacgacaaatccaagaaaactttacgactactgtgatgtccctcagtgtgcggccccttcatttgattgtgggaagcctcaagtggagccgaagaaatgtcctggaagggttgtaggggggtgtgtggcccacccacattcctggccctggcaagtcagtcttagaacaaggtttggaatgcacttctgtggaggcaccttgatatccccagagtgggtgttgactgctgcccactgcttggagaagtccccaaggccttcatcctacaaggtcatcctgggtgcacaccaagaagtgaatctcgaaccgcatgttcaggaaatagaagtgtctaggctgttcttggagcccacacgaaaagatattgccttgctaaagctaagcagtcctgccgtcatcactgacaaagtaatcccagcttgtctgccatccccaaattatgtggtcgctgaccggaccgaatgtttcatcactggctggggagaaacccaaggtacttttggagctggccttctcaaggaagcccagctccctgtgattgagaataaagtgtgcaatcgctatgagtttctgaatggaagagtccaatccaccgaactctgtgctgggcatttggccggaggcactgacagttgccagggtgacagtggagggcctctggtttgcttcgagaaggacaaatacattttacaaggagtcacttcttggggtcttggctgtgcacgccccaataagcctggtgtctatgttcgtgtttcaaggtttgttacttggattgagggagtgatgagaaataattaattggacgggagacagagtgacgcactgactcacctagaggctgggacgtgggtagggatttagcatgctggaaataactggcagtaatcaaacgaagacactgtccccagctaccagctacgccaaacctcggcattttttgtgttattttctgactgctggattctgtagtaaggtgacatagctatgacatttgttaaaaataaactctgtacttaactttgatttgagtaaattttggttttggtcttcaacattttcatgctctttgttcaccccaccaattttaaatgggcagatggggggatttagctgcttttgataaggaacagctgcacaaaggactgagcaggctgcaaggtcacagaggggagagccaagaagttgtccacgcatttacctcatcagctaacgagggcttgacatgcatttttactgtctttattcctgacactgagatgaatgttttcaaagctgcaacatgtatggggagtcatgcaaaccgattctgttattgggaatgaaatctgtcaccgactgcttgacttgagcccaggggacacagagcagagagctgtatatgatggagtgaaccggtccatggatgtgtaacacaagaccaactgagagtctgaatgttattctggggcacacgtgagtctaggattggtgccaagagcatgtaaatgaacaacaagcaaatattgaaggtggaccacttatttcccattgctaattgcctgcccggttttgaaacagtctgcagtacacacggtgacaggagaatgacctgtgggagagatacatgtttagaaggaagagaaaggacaaaggcacacgttttaccatttaaaatattgttaccaaacaaaaatatccattcaaaatacaatttaacaatgcaacagtcatcttacagcagagaaatgcagagaaaagcaaaactgcaagtgactgtgaataaagggtgaatgtagtctcaaatcctcaaagagctgtgtttatttcattgacaaatagattatttgtattc

SEQ ID NO: 423015 - DNA, 2684 bp, Homo sapiens
  misc_feature (767)..(767): n is a, c, g, or t
aacaacatcctgggattgggacccactttctgggcactgctggccagtcccaaaatggaacataaggaagtggttcttctacttcttttatttctgaaatcaggtcaaggagagcctctggatgactatgtgaatacccagggggcttcactgttcagtgtcactaagaagcagctgggagcaggaagtatagaagaatgtgcagcaaaatgtgaggaggacgaagaattcacctgcagggcattccaatatcacagtaaagagcaacaatgtgtgataatggctgaaaacaggaagtcctccataatcattaggatgagagatgtagttttatttgaaaagaaagtgtatctctcagagtgcaagactgggaatggaaagaactacagagggacgatgtccaaaacaaaaaatggcatcacctgtcaaaaatggagttccacttctccccacagacctagattctcacctgctacacacccctcagagggactggaggagaactactgcaggaatccagacaacgatccgcaggggccctggtgctatactactgatccagaaaagagatatgactactgcgacattcttgagtgtgaagaggaatgtatgcattgcagtggagctatgacggcccacacgctcatggatacattccttccaaatttccaaacaagaacctgaagaagaattactgtcgtaaccccgatagggagctgcggccttggtgtttcaccaccgaccccaacaagcgctgggaactttgngacatcccccgctgcacaacacctccaccatcttctggtcccacctaccagtgtctgaagggaacaggtgaaaactatcgcgggaatgtggctgttaccgtgtccgggcacacctgtcagcactggagtgcacagacccctcacacacataacaggacaccagaaaacttcccctgcaaaaatttggatgaaaactactgccgcaatcctgacggaaaaagggccccatggtgccatacaaccaacagccaagtgcggtgggagtactgtaagataccgtcctgtgactcctccccagtatccacggaacaattggctcccacagcaccacctgagctaacccctgtggtccaggactgctaccatggtgatggacagagctaccgaggcacatcctccaccaccaccacaggaaagaagtgtcagtcttggtcatctatgacaccacaccggcaccagaagaccccagaaaactacccaaatgctggcctgacaatgaactactgcaggaatccagatgccgataaaggcccctggtgttttaccacagaccccagcgtcaggtgggagtactgcaacctgaaaaaatgctcaggaacagaagcgagtgttgtagcacctccgcctgttgtcctgcttccagatgtagagactccttccgaagaagactgtatgtttgggaatgggaaaggataccgaggcaagagggcgaccactgttactgggacgccatgccaggactgggctgcccaggagccccatagacacagcattttcactccagagacaaatccacgggcgggtctggaaaaaaattactgccgtaaccctgatggtgatgtaggtggtccctggtgctacacgacaaatccaagaaaactttacgactactgtgatgtccctcagtgtgcggccccttcatttgattgtgggaagcctcaagtggagccgaagaaatgtcctggaagggttgtaggggggtgtgtggcccacccacattcctggccctggcaagtcagtcttagaacaaggtttggaatgcacttctgtggaggcaccttgatatccccagagtgggtgttgactgctgcccactgcttggagaagtccccaaggccttcatcctacaaggtcatcctgggtgcacaccaagaagtgaatctcgaaccgcatgttcaggaaatagaagtgtctaggctgttcttggagcccacacgaaaagatattgccttgctaaagctaagcagtcctgccgtcatcactgacaaagtaatcccagcttgtctgccatccccaaattatgtggtcgctgaccggaccgaatgtttcatcactggctggggagaaacccaaggtacttttggagctggccttctcaaggaagcccagctccctgtgattgagaataaagtgtgcaatcgctatgagtttctgaatggaagagtccaatccaccgaactctgtgctgggcatttggccggaggcactgacagttgccagggtgacagtggagggcctctggtttgcttcgagaaggacaaatacattttacaaggagtcacttcttggggtcttggctgtgcacgccccaataagcctggtgtctatgttcgtgtttcaaggtttgttacttggattgagggagtgatgagaaataattaattggacgggagacagagtgacgcactgactcacctagaggctgggacgtgggtagggatttagcatgctggaaataactggcagtaatcaaacgaagacactgtccccagctaccagctacgccaaacctcggcattttttgtgttattttctgactgctggattctgtagtaaggtgacatagctatgacatttgttaaaaataaactctgtacttaactttgatttgagtaaattttggttttggtcttcaac
